United States Patent Application Publication US 2024/0327476 A1 - sequence listing, part 123

SEQ ID NO: 234159 - DNA, 2349 bp, synthetic construct
  misc_feature 1..2349: note = Description of Artificial Sequence: Synthetic coding sequence
  source 1..2349: mol_type = other DNA
atgtcaataaacctcactgtagatatttacatttaccttctgtctaatgccagatcagtgtgcggtaaacagaggtccaagcagttgtacttcttgtttagccctaaacactactggcggatctcccatatttctttgcagcgcggttttcatactaacataatccggtgtaaatggactaagtcagaggcgcactcatgctccaagcactgctatagtccgtcaaaccatggcctacatatcgggatactaaagctgagcacctctgcccctaaaggcctgaccaaggttaacatctgcatgtcccggatcaagagtactctgaattctgtttctaaagctgtttttggcaaccaaaacgaaatgatctctcgcctggctcagtttaagccttccagccagatcctgcgcaaggtgagtgactctggatggctgaaacagaaaaacatcaaacaagctatcaagagccttaaaaaatactcagacaaatctgccgaaaagagtcccttccctgaggagaagtcccatattattgataaggaggaggacatcggcaagcgatctctgttccactacacctcttctatcactactaaattcggcgatagtttttactttttatccaatcacattaactcatacttcaaacgcaaggagaagatgagccagcagaaggaaaacgagcacttcagggataaatcagagcttgaggataagaaggttgaggagggcaaacttcgctccccagaccccggtatacttgcatataaaccgggatccgagtcggtgcacactgtcgataagccaaccagcccatcagccattcccgatgtgctacaggtgagtacaaaacagtcaattgccaactttttgagccggcctactgagggggtacaggcacttgtaggcggttacataggcggactggtgcccaaattgaaatacgactcaaagtcccagtctgaagagcaggaagagccagcaaagaccgatcaggccgtctccaaggatcgtaacgctgaggagaagaaacgcctctccctgcagagggaaaaaatcattgcgagagtgtctatagacaaccgcactagagccctagtgcaagccttgaggcgtaccacggatcctaaactgtgcattactcgtgtggaagagctgacatttcacctgctcgagttccccgaggggaagggcgttgctgtcaaagaacgcatcatcccttacctcctcaggcttcgccagataaaagacgaaactctgcaagcagcggtccgagaaatcctggccctgatcggatatgtcgaccctgttaagggtcgcggaatcagaattttgtccatcgacggtggcggtactagaggcgtggtagcccttcaaaccttaaggaaattggtcgagctgacccagaaacccgtgcatcagttattcgactatatctgcggcgtcagcacgggggctatcctggcatttatgctcggtctcttccacatgccattagacgagtgcgaagagctttacaggaagcttgggtccgatgtattttcacagaatgttatcgtcggaacggtgaaaatgagttggtctcacgccttctatgacagccaaacttgggaaaatatcctgaaggacagaatggggtcggcattaatgattgagacagccaggaatcccacatgtcctaaagtggcagctgtcagcaccatcgtaaaccgaggaattactcctaaagccttcgtattcagaaattatggccactttcccggaatcaactcacactacctgggagggtgtcagtataagatgtggcaagcgatccgcgctagctccgccgctcccggatattttgcggagtatgcactcggcaatgacctgcatcaagacgggggtctccttctgaacaatccctccgccctcgccatgcatgaatgcaaatgcctttggcctgacgtaccccttgagtgcatcgtgagcctgggtacgggcagatatgagagcgacgtgcgcaacacagtgacctacacatccctgaaaacaaaactgagcaacgtgatcaactcagccacagacacggaagaggtgcatattatgctcgatggattgctgccccctgatacttacttccgtttcaatcctgtcatgtgcgaaaacatcccgcttgacgagagtcgaaacgagaagctcgaccaactgcaactggagggtttaaaatacattgaacgcaacgagcagaagatgaagaaggtcgccaaaatcttgtcccaggagaagactaccctgcagaaaattaatgactggatcaagttgaaaacagatatgtacgagggccttcctttcttctccaagctgtag

SEQ ID NO: 234160 - DNA, 2154 bp, synthetic construct
  misc_feature 1..2154: note = Description of Artificial Sequence: Synthetic coding sequence
  source 1..2154: mol_type = other DNA
atgtccataaatttaaccgttgacatttatatttatctgctgtctaacgccagaagtgtatgtgggaaacagagaagcaaacagctctacttcctgtttagtcctaaacactactggaggatctcgcacataagccttcagcgcggattccacactaacattatccgctgcaagtggaccaagtcagaagcacactcatgctccaagcactgttactcacctagcaatcacggtctgcacattggcatcctcaagctttccaccagcgcgcctaagggcttgacgaaagtgaacatttgtatgagccgtatcaagtccacattaaacagtgtgtccaaggccgtgttcggtaatcagaacgagatgatcagcaggttagcccagttcaagccaagtagtcaaattctccggaaagtctccgactctggctggctgaaacaaaagaatattaaacaggccatcaagtccctcaagaagtactcagacaaaagcgctgaaaaatccccgtttccggaggaaaaaagtcatatcatcgataaggaagaagacatcggcaagaggtccctattccactatacctcttcaataacaaccaagtttggtgacagtttctacttcttgtcaaatcatatcaactcctatttcaagcgcaaggaaaaaatgagtcagcagaaggaaaacgagcattttcgggacaaaagcgaactcgaggataagaaggtcgaagaaggcaaacttcgatccccagacccaggcatcctggcgtacaagccgggtagtgaatccgtacacacagtggataaacccacaagtccctctgcaattcccgatgtcctccaggtgtcaactaaacagagcattgccaacttcctgtctcggccaaccgagggggtgcaagccctggtgggtggatacattggagggttagtgccaaagttgaagtacgactccaagagtcaatctgaagaacaggaggaacccgcaaaaaccgatcaagccgtttcaaaggatcgtaacgctgaagagaagaagcggctgtcgctgcaaagagagaagattattgcaagagtgtctatcgacaacaggacgagggcactggtgcaagctctaagacgtacgaccgacccaaagttatgcattaccagagtcgaagagttgactttccaccttttggagttccccgaagggaagggcgtggccgtcaaagaacgcatcataccatatctcctacgcctccgacaaattaaagatgagactttacaggccgcagtgagagagatcttagcgcttatagggtatgttgaccccgtgaagggaagaggaatcaggattctatcaatagatgggggtggcactcggggtgttgtggctctgcagacgttaagaaaactagttgaacttacgcaaaaacctgtgcaccaattgtttgactacatctgtggcgtctctacaggggctatccttgccttcatgctcggtctatttcacatgccccttgatgaatgtgaggagctctatcgaaaattgggaagcgacgtcttttcacagaatgtcatagtaggcaccgtgaaaatgtcttggagccatgcgttttacgactcccaaacgtgggagaacattttaaaagatcgtatgggatctgctctgatgatcgagacagcacgcaaccctacttgccccaaggatggcggactgttactcaacaatccgagtgctctagccatgcatgagtgcaaatgcctatggcctgatgtgcccctggaatgtatcgtgtcattagggacggggaggtacgagtctgatgtcagaaacacagtcacctacacatctcttaagacgaaactaagcaatgtcattaattctgcgaccgacacggaggaggtccacattatgcttgatgggctgctgcccccagacacttatttccgcttcaacccagttatgtgtgagaacatcccactcgatgaaagtagaaacgagaaactggaccagctccagctggaaggactgaagtatattgagcgcaatgagcagaagatgaaaaaggtcgcaaaaatactgtcccaggagaagactactcttcagaagataaatgactggataaagttgaaaaccgacatgtacgagggactgccctttttcagtaaactttag

SEQ ID NO: 234161 - DNA, 2049 bp, synthetic construct
  misc_feature 1..2049: note = Description of Artificial Sequence: Synthetic coding sequence
  source 1..2049: mol_type = other DNA
atgtctagaataaagtccacattgaatagcgttagtaaagcggtgtttggaaaccaaaacgagatgatatccagactcgcccaattcaaaccaagtagccagatactcaggaaagtgtcagattcaggatggcttaagcagaagaatataaaacaagcaatcaaatcactgaagaagtacagtgataagagcgcagagaagtctccattccccgaggaaaagagccacataatcgacaaagaagaggacatcgggaagcgctctttgttccattatactagctccattacaacaaagttcggcgacagcttctactttctgtcaaaccacatcaattcatatttcaaacggaaggagaaaatgtcccagcagaaggagaacgaacacttccgggataagagtgaattggaagacaagaaagtggaggaggggaaactgaggtcccctgacccaggcatactcgcctacaagcctggatcagagagcgtccatacagtcgataagcctactagccccagtgctatccccgacgtactgcaagtcagcacaaagcagagtattgccaattttctttcccgtccaactgagggagtgcaagcccttgtcggcggatatatcgggggtttagtgccaaagctgaagtacgacagcaagagccagtctgaagaacaggaagaaccagccaagaccgaccaggctgtctccaaggatcgaaatgccgaggagaagaagcggctgtccctgcaacgtgaaaaaatcatagctcgcgttagtatcgataatcggactagagccctggtacaagctcttcgcaggaccacggaccccaagctgtgtattaccagagtcgaagagcttacgttccatctgctggaatttcccgagggcaagggtgtggcagtgaaggaaagaatcataccgtacctacttcgcctgagacagatcaaggacgagaccctccaggccgctgtccgtgagatcctggcattaattgggtatgtcgatcccgtaaaaggcagagggatacggatcctctccatcgacggtggagggacaaggggagtagtggccttgcagactttgcggaagctcgtagagctgacacagaagcctgttcatcagctcttcgactacatctgcggagtgtcaaccggcgcaattctcgccttcatgttaggactgtttcatatgccccttgacgagtgtgaggaactttatagaaagttggggagtgacgtgttctctcagaacgttattgtcggcaccgtgaaaatgtcctggtcccacgcgttctatgattcacagacctgggagaacatccttaaagacaggatgggctcagcccttatgatcgagacagcgaggaacccaacctgtcccaaagttgccgcagtgagcaccatcgtcaaccgcggaatcaccccaaaggctttcgtgttcaggaattacggacatttcccgggaattaattctcattatctcggcggatgccagtacaaaatgtggcaggcgattagggcctccagtgccgctcctggttatttcgcagagtacgccttgggcaacgatcttcatcaggatgggggactactgctcaataatccctccgcccttgcaatgcacgaatgtaagtgtctatggcccgatgttcctttggagtgcatcgtgagcctgggtacagggagatacgagagcgacgtgcggaacacggtgacatacacatccctcaaaacgaaactaagtaatgtgataaatagtgctactgacacagaagaagtgcacattatgcttgatggcctccttccacctgatacgtattttaggtttaatccggtcatgtgcgagaacatccctttagacgaaagccggaatgagaaactagaccagttgcagctggagggactgaaatacatcgaacggaacgagcagaagatgaagaaggttgccaagatcttaagtcaagagaagaccacactgcagaagatcaatgattggatcaagctcaagactgatatgtatgaggggctcccgttcttctccaaactatag

SEQ ID NO: 234162 - DNA, 3612 bp, synthetic construct
  misc_feature 1..3612: note = Description of Artificial Sequence: Synthetic coding sequence
  source 1..3612: mol_type = other DNA
atgacccgctcaccccctctgcgtgaactaccaccatcttatactccaccagcccgaacagccgcaccacagatcctggccggttcactgaaggcccctctctggctgagagcctactttcagggcctgctgtttagcctgggctgcgggatacagcggcattgcggaaaggttctgtttcttggattgctcgccttcggggcacttgccctcggtttaaggatggccatcatcgagacaaacctggagcagttatgggttgaggtcgggagcagagtgagccaagaacttcattataccaaagaaaagctaggcgaggaggcggcttacacaagccagatgctgatccagacagctcggcaggagggtgaaaatattttgacacctgaggctctaggcctgcatcttcaagccgcactgaccgctagtaaagtccaagtctcattgtatggcaagagctgggatttgaataagatctgttacaagtctggggtcccgcttatcgagaacggaatgatagagaggatgattgagaagcttttcccatgtgtgatcctaactcccctggattgtttttgggaaggcgctaagctgcagggcggttccgcttatctgccagggagacccgatatccagtggaccaacctcgaccctgagcagcttttggaggaacttggcccatttgccagtctggaaggtttcagggagctgctggacaaggctcaggtcgggcaggcatacgtggggagaccttgtctgcatcccgatgacctgcattgtcccccatccgccccaaatcaccactccagacaagcgccaaatgtggcacacgaactatctggagggtgccatggattctcacataaatttatgcactggcaggaagaactgttgctaggaggcatggcccgtgacccacagggagaactgctacgggctgaggcactacagagtacgttcctgttaatgtcccccagacagttgtatgagcacttccgtggggattaccagacgcacgatattggatggtcagaggaacaagcctccacagtgctgcaggcatggcagaggagatttgtgcagctggcacaggaagccctccctgagaacgcctcacagcagatccatgcttttagtagcactacgttggatgatatcttgcacgccttttccgaagtgtcagccgctcgcgttgtggggggatatttattaatgctcgcctacgcatgcgtgaccatgctccgttgggactgcgcacagagtcaggggtccgtgggactggcaggggtcctgctggtggccttagctgtcgcgtcaggactgggactctgcgcgctgctcggaatcactttcaatgcggcaactacacaggtcctccccttcctggcactaggcatcggggtagacgatgtcttcctgctggcgcacgcgttcactgaagcgctgcctggaaccccacttcaggagagaatgggcgagtgcctccagcggacagggacctccgtggtgctcaccagcattaacaacatggctgccttcttgatggcagcattggttcctataccagcattacgggcattctctctccaggcagctatcgtggtgggatgcacatttgtggcagtgatgctggtgttccccgcaattctgtctctagacctgcgtagaaggcattgtcagcggctggatgtgttgtgctgcttttccagtccatgtagcgcacaggtcattcagattctgccccaggagctgggcgacggaaccgtccccgttggaatcgctcaccttacggcgaccgttcaggctttcactcactgcgaggcaagcagtcagcatgttgtcaccatcttgcctccgcaagcacacctggtaccgccacctagtgatcctctgggctcagagctctttagtccaggtggttccactagagacctgcttggacaggaggaggaaaccaggcagaaggccgcttgcaagagtctcccatgcgcccgatggaatttagcacattttgctcgctaccagttcgccccactcctgctacagtctcacgctaaagccatcgtgctggtgctgttcggcgctctattgggtttatccctgtacggggctaccctggtgcaagacggcctggcccttacagatgtggtgcctagagggaccaaagaacacgctttcctgagcgctcaattgagatatttttccctgtatgaagtggctctggtgactcagggcggatttgactatgcgcacagccagcgcgcacttttcgatcttcaccagagattcagctctctcaaagcagtgttgccgccaccagcaacacaggcccctcggacttggttacactattatcgcaactggcttcagggaatacaggctgcatttgaccaggattgggcctccggacggattacccgccactcctatagaaacggatccgaagacggtgccctcgcatataaactgttaatccaaactggcgatgcacaggagcctctggacttctctcagttgacgactcggaagctggtggatcgggagggactgataccaccagaactgttttacatgggcctgaccgtttgggtttcatccgacccactcggcctggccgcaagccaggccaacttctatccaccccctccagagtggctgcacgacaagtacgatactaccggagagaatctcagaatccctcccgcacagccgttggagttcgctcagttcccgtttctcctcaggggactgcagaaaacagccgactttgtggaagccatcgaaggagcgagggccgcttgtgcagaggccggacaggccggagttcatgcctatccgagcggctcgccgtttttgttttgggagcagtatctgggcctgcgcagatgcttcctcctcgccgtgtgtatcctgctggtttgcacattcctggtgtgcgccttgttgctgttaaatccctggacagctggattgatcgtcctggtattggcaatgatgactgtcgagcttttcgggatcatgggttttttgggcataaagctgagcgcaattcccgtggtgatactcgtggcatctgtgggaattggggttgaattcaccgtgcatgttgcattaggctttctgactacccagggcagccggaaccttagggcggctcatgctcttgagcacacttttgcaccagtgactgacggagcaatttctaccctcctcgggcttctcatgctggccggatcacattttgatttcatcgtcagatacttctttgcagctctaactgtactaacactgcttggcctgctgcatggactggtattattgcccgtcctgctttcgatcttgggacctccaccagaggtaatccaaatgtataaagagtcccccgagattctgagcccgcctgcccctcagggaggcggactgcgctggggtgcgtccagctctctgccgcagtctttcgcgagagtgactacctccatgaccgtggctatacaccccccacctttgccaggagcatacattcaccctgcaccagacgaaccgccttggagccccgcagccaccagctccggaaacctgtccagccggggacccggtccggcaaccggttag

SEQ ID NO: 234163 - DNA, 267 bp, synthetic construct
  misc_feature 1..267: note = Description of Artificial Sequence: Synthetic coding sequence
  source 1..267: mol_type = other DNA
tagttcgattttatcgtgcgttactttttcgccgctctcactgttctcactctcctgggtctgctgcacggcttggtcctcctgcctgtgcttctatctatactcggacccccaccagaagtgattcagatgtataaggaaagcccagagatcttaagccctcccgctccccagggaggcggattgagggtgggatccttgcaggtgaatattagctattggaaagagctgctctggtgccaggatctgagacctgaggagatttag

SEQ ID NO: 234164 - DNA, 3441 bp, synthetic construct
  misc_feature 1..3441: note = Description of Artificial Sequence: Synthetic coding sequence
  source 1..3441: mol_type = other DNA
atgaccaggagccctcccctcagggagttacctccaagttacacaccccctgcgaggactgcggctccccagatactggccggatctctaaaagcgcctctgtggctgagagcatactttcagggcctgctgttctccctgggatgcgggattcaacgacattgtggtaaggtcctttttctaggtctgctcgcttttggcgctttagccctggggttacggatggccatcatcgagactaacctcgagcaactctgggtggaggtggggagtagagtgtcacaagagctccattacactaaagaaaagctgggggaggaggccgcttacaccagccagatgctcattcagaccgcgaggcaggaaggtgagaatattttgacgccagaggccctgggcctgcaccttcaagccgctctaacggcctccaaggtccaggtttctctgtacgggaaatcttgggatctcaacaaaatatgttacaagtcgggtgttccgttgattgaaaacggcatgatagaacggatgatcgagaagttgtttccttgcgtgatactgacacccctggattgcttctgggaaggagccaagctccagggaggttccgcatatctaccagggagacccgatatacagtggaccaatctggatcccgaacaacttttggaagagctgggccctttcgcctccctggagggtttccgagagttgctggataaagcacaggtgggacaggcttacgtcggtagaccctgcctccaccctgatgacctacattgtcctccatccgcaccaaaccaccactccagacaagctcccaatgtggctcatgagctgtccggtgggtgtcatgggttctcgcacaagtttatgcactggcaggaggaactcctgttggggggtatggccagagatccacagggcgagctactaagagccgaggcgctgcagtctacgtttctcctcatgtcacctagacaactgtacgagcacttcagaggagactatcagacccacgacatcggatggtctgaggaacaggcttctaccgtcctccaggcttggcaacgtaggttcgtgcagctggctcaggaggctcttcccgagaacgcaagccagcagattcatgccttttcaagcaccaccctagatgatatcttgcatgcctttagcgaagttagcgcggctcgggtggtgggcggataccttctgatgctggcgtacgcttgtgtgacaatgttacgctgggactgcgctcagagccagggttcagttggacttgcaggcgtacttctcgtggcactggcggttgctagtggtctgggactctgtgcgctgctgggcatcacctttaatgccgcaacgacacaagtgctgcccttcttggcccttggaatcggcgttgacgatgtattcctgttagcacatgcattcactgaagcactgccaggcactcctctgcaggagcggatgggggaatgtctgcagcgaacagggacaagcgttgtgttgacgagcattaacaacatggccgcttttctaatggcagcgctggtgccaattccagctctccgcgcatttagcctccaagcagccatcgttgtgggctgtactttcgttgctgtgatgttagtgtttcccgcaatcctgtccctggatctaagaaggcggcattgtcagcgccttgacgtgctgtgctgcttcagttccccgtgtagcgcacaggtcatccagattctgccacaagagctgggtgatgggaccgtccccgtcggcatcgcacatctgacagcaactgttcaggccttcacccattgcgaagcatcttcacagcatgtcgtcacaatccttcctccccaagcccacctcgtgccaccaccttcagaccccttggggtctgagctcttctcccccggaggatctactcgggacctgttagggcaggaagaggagacccgacagaaggccgcttgtaagagtttgccgtgtgccaggtggaacctagcccacttcgccaggtaccagttcgcaccgttactgctccagtcgcatgccaaggctatcgtgctcgtgctgttcggcgcactcctgggcctctccctctatggggctacactggttcaggacggattggctttaactgatgtcgtgcctagaggcaccaaggagcacgcgttcctgagcgctcagctgaggtatttttccttgtacgaagtggcacttgtgacccagggagggtttgactatgcccactcccagagggccctttttgatctccatcagcggttctccagcctgaaagcggttctacccccacccgcaacacaggcacccagaacttggcttcattactacagaaattggctgcaggggattcaggctgcctttgaccaggactgggcttccggacgcattacccggcatagctacagaaacggtagtgaggatggtgctcttgcgtataagctgttgattcaaacaggcgatgcacaggaacccttagacttttcccagttgactacaagaaagctggtggatcgggagggtctgatcccgccagagcttttttacatgggacttactgtctgggtcagctctgatcccttgggcctggcagccagtcaggctaatttctacccccctcccccagaatggctgcacgataagtacgacactacgggggagaacctgagaatcccaccggcacagcctctcgaatttgcacagtttccatttctgctgcggggactgcagaagacggcagacttcgtcgaggctatcgaaggggctcgagctgcatgcgcggaagccggtcaggctggcgtgcatgcatacccctccggctccccttttctcttctgggaacagtacttaggcttaaggcggtgcttcctgctcgctgtgtgtattctactggtctgcacattcctggtgtgcgccctcttattactaaacccttggactgccggattgattgtcttggttctggctatgatgactgtggaactgtttgggatcatgggatttctggggataaagctgtccgcaatccccgtggttattctggttgcctccgtgggaataggagttgagtttacagttcacgtggcgctcggtttcctcaccactcaggggtccagaaaccttagggccgctcacgcgctggagcacaccttcgccccagttaccgacggcgctattagcactttactagggctgttaatgttagccggaagtcacttcgactttatagttcggtacttcttcgccgcactgactgttttgacactgctgggcctgctgcatggcctagtgctcttgcccgtgctgctttctatactcggtccacccccagaagtgatccagatgtataaagagagtcctgaaattctgtcccctcctgctcctcagggtggcggactccggcctgaggagatctag

SEQ ID NO: 234165 - DNA, 2667 bp, synthetic construct
  misc_feature 1..2667: note = Description of Artificial Sequence: Synthetic coding sequence
  source 1..2667: mol_type = other DNA
atgctccggcaggtgctgcaccgcggacttagaacctgtttctcccgcttgggccacttcatcgcatcccatcctgtcttttttgcctccgcgccagttctgatctccatattgcttggtgcctctttctcccggtaccaggtcgaggagtcggtggagcatcttctcgctcctcagcactccctcgctaagattgagcgaaacctggtgaattccttgttccctgtcaatcggtccaaacatcggctgtattctgacttgcagaccccgggacgctatgggagagtgattgtcaccagttttcaaaaggctaacatgctggaccagcatcacacagacctaatcctcaagcttcacgcagctgtaactaaaattcaggttcccaggccagggtttaattacacctttgcgcatatctgcattctgaataatgacaaaacatgtattgtcgacgacattgttcacgttctggaggaactgaaaaacgcacgggctacaaacaggactaactttgctataacataccccatcacccacttgaaagatgggagggccgtgtacaacggccaccagctgggcggtgttactgtgcactcgaaggatagggttaagtccgcggaagctattcagctgacctattatttacagagcatcaactctctcaacgacatggtagctgaacggtgggagtcttcattttgcgacacagtacggctttttcaaaaatccaattccaaagtcaagatgtatccttacacaagttcaagtcttagagaggattttcagaagacctcccgtgtgtctgaaaggtacttagtgaccagcctaatcctggtggtgacaatggccatcctgtgttgctcaatgcaggactgcgttagaagcaagccctggctggggctgctgggtctagtgaccataagtctcgcaaccctcaccgccgctggcattataaacctgacgggcggaaaatataactctaccttcctgggtgtcccattcgttatgctcggccatggattgtatggcacatttgagatgctttccagttggcgtaaaactagagaggatcagcacgtcaaggaaaggacagcggcagtctatgctgattcaatgctgtcattctcgctgaccacggccatgtatctagtaacttttgggatcggggcttcgccgttcacgaatattgaggccgcaagaattttttgttgcaattcctgtatagccatttttttcaactacttgtacgtcctctcattttacggcagctctctagtatttacaggctacatcgagaataattaccaacattcgatcttctgcagaaaagttccgaagcctgaggcgctgcaagagaaacccgcatggtacagattcctactgacagcgagattttcagaggatacggccgaaggcgaagaagctaacacctatgagagccatttactcgtgtgcttcttaaaacgctattattgtgattggatcactaacacatacgtcaagccgttcgttgtgcttttttacttgatctacatcagctttgccctaatggggtaccttcaggtcagtgaaggtagcgatctctctaatatcgtagctactgcgacccagacgatcgaatatacaactgcacagcagaaatactttagcaattactcccctgtgatcgggttttatatctacgaaagcattgagtattggaacacatcagtacaggaggatgttttagaatacaccaaaggttttgtcaggattagctggtttgagagctatcttaattacctccggaagctgaatgtctctacaggtctccccaaaaaaaacttcaccgacatgttacgcaactccttccttaaagctccacagttctctcatttccaggaggacatcatttttagtaagaagtacaatgatgaggtagacgtggtggcatccaggatgtttctggtcgccaagaccatggagaccaatagggaagagctctacgatctcctggagacattgcggcgattatctgtgacctcgaaagtcaaattcattgtctttaacccatcttttgtttacatggatcgctacgcatcaagtctcggggcacctttgcacaatagctgcatttcggctctgttccttctgtttttcagcgcttttcttgtcgccgactcgcttataaacgtatggattaccctgactgtggtctcagttgagtttggagtaattggctttatgactctctggaaagtcgagctggactgtatctccgttctctgcctcatctatggcataaattacacaatcgacaattgtgcgccaatgctgtccacctttgtgctaggcaaggacttcacccgcaccaagtgggttaagaatgctctcgaagtgcatggcgtggccatcttacaatcctacctgtgctacatcgtggggctgatcccattagccgctgtgccctcaaaccttacatgtactctgttccgctgcctgttcttaatcgctttcgtgacattcttccattgttttgccattctgcccgtcattctgacattcctccccccatccaagaagaaacgcaaggagaaaaagaacccagagaacagagaggaaattgaatgcgtggaaatggtcgatattgatagcacgcgtgttgttgaccagatcactacggtgtag

SEQ ID NO: 234166 - DNA, 4179 bp, synthetic construct
  misc_feature 1..4179: note = Description of Artificial Sequence: Synthetic coding sequence
  source 1..4179: mol_type = other DNA
atggacacagaggacgatccactcttacaggatgtttggttagaggaagagcaagaagaagaagaggcaacaggagaaactttcctgggcgcacaaaagcctggacctcagcctggggctgggggtcaatgctgctggaggcattggccattagcaagtagacctccagcgtccggtttctggtcgaccctgggctgggccttcacaaatccatgttgcgctggactggtgctgttcctgggctgctctattcctatggcgctgtcagcattcatgtttctgtattatcccccattggatatcgacatctcttacaacgcctttgagattagaaaccatgaggcatcccagaggtttgatgcgttaacccttgcccttaaaagccaatttggttcttggggacgtaacaggagagacctggcggattttacctccgagacactgcagcgcctgatcagtgagcagttgcagcagctccacttaggaaaccgatctcgacaggcttctcgggcacccagagttatcccagcggcatcactcgggggacctgggccttacagggacacatctgccgcacagaagccaaccgctaacagaagcggccgactgcgacgggagactcccccattagaagacctcgccgcaaaccagtcagaagaccctcgcaaccagaggctgtcaaaaaatggccgatatcagccatctattcctccccatgctgccgtggcagctaatcagagccgcgcacgtaggggagcttcccggtgggattatagccgagcttacgtgtccgccaatacccagacgcacgcccactggaggatcgaactgatatttttggcgcgtggcgatgcagagagaaatatctttaccagcgaacgccttgtgacaatacacgagattgaaaggaagattatggatcatcccggttttagagaattttgctggaaacctcacgaggtacttaaagacctgccgctaggaagctattcctattgcagtccacccagttccttaatgacatacttttttcccacagagcgaggcggaaaaatatattatgatgggatggggcaggatctggcagacattcggggaagtctggaattggcaatgacacaccctgaattctactggtacgtggacgaagggctttcagccgataaccttaagagcagtctactccggtctgaaattctgttcggagcccctcttcccaattattactccgtagacgataggtgggaagaacaacgcgctaagtttcagtccttcgttgtcacgtacgtcgctatgctggccaaacagagcacatccaaggttcaggtcctgtacggcggaaccgatctgttcgattacgaggttcgcagaaccttcaacaacgatatgctgctggcttttatttcctcatcatgtatcgctgcactggtgtacattctaacctcttgctctgtgttcctctcctttttcggaattgcatctatcggtctctcttgccttgtggccctgtttctctaccatgtggtatttgggatccagtatctcggcatccttaatggggtcgcggcttttgtcatcgtaggcattggcgttgacgacgtgttcgtgttcatcaatacatatagacaggccacgcacctggaggacccacagttgcgaatgattcatacagttcaaacagccggtaaagccaccttttttacctccctcacaacagccgcagcctatgcggcaaatgtgttctctcagatcccagcagtccatgacttcggactcttcatgtcattgattgttagctgctgttggctcgccgtactcgtaacaatgcctgccgcactaggactgtggtcactctatctggcacccctagagtcgagctgccagacttcttgtcaccagaattgcagtcgaaagacatcccttcattttcctggagatgtgtttgcggcacctgaacaggttgggggaagtcccgcacagggtcccattccttacttggatgacgatatacccctgctggaagtggaggaggagccagtgagcttggagctgggcgatgttagcttagtgtcggtgagccccgagggcctccaacctgccagcaatactgggtcaaggggtcacttaatagtccagctgcaggaactactccatcactgggtgctgtggtcagccgttaagagcaggtgggtgatcgttggcctgtttgtgagcatactgatactgagcctggtcttcgccagcagactcaggcctgcttcgagagcgcctctattgttcagacccgatactaatatccaggtgctgctggatctgaaatacaacctgtccgctgagggcattagctgtattacatgctccggcctgtttcaggaaaaacctcattccttgcagaataatatacggacttctcttgaaaagaagagacgcggttctggtgtcccttgggcctcccgcccagaagcgactctgcaggattttccgggtaccgtctacattagcaaggtcaagagtcaaggccaccctgctgtatataggctctccctgaacgcatctctgccagccccatggcaggccgttagccctggagacggcgaagtgccttcattccaggtctatcgagcaccctttggtaacttcacaaagaagctgacagcttgtatgagcacagtaggcctgttgcaggctgctagccccagccgaaaatggatgctcaccacactggcctgcgacgccaaacgcggttggaaatttgactttagcttttacgtcgccactaaggaacagcagcacactcggaagctatatttcgcgcaatcgcacaagccaccctttcatggtcgggtgtgtatggcacctccaggctgcttgctgagcagctcaccagacggccctaccaaaggcttcttttttgtcccttccgagaaggtccctaaggccaggctctctgctactttcggatttaacccatgtgtgaacaccggatgtgggaaacccgcagtcaggcctctagtagatacgggagccatggttttcgtggtctttggcataatcggagtgaatagaaccagacaggtggacaaccatgtgattggagatccaggtagcgtcgtctacgatagttccttcgatctgtttaaggagattggtcacctgtgtcatctctgcaaggctattgcggctaattccgagttggtcaaacccggaggggcacagtgtctaccctcgggctattcgatctcctcctttctgcagatgctgcatcctgaatgtaaagaattgcctgaacctaacctgctccccggacaactcagccacggcgcagtgggcgtcagagaggggagagtgcagtggattagcatggctttcgaaagcaccacctacaaagggaaatcctcctttcagacctactcggactatctacgctgggaatctttcctccagcaacagctgcaggctctgcctgaggggtctgtgttgaggcggggatttcagacgtgcgagcattggaagcagatatttatggagatcgtgggcgtgcaatctgctttgtgtggccttgtgctcagcctcctgatctgtgtcgctgctgtagcagtgttcactactcacattctgctccttctacccgttctgctttctattttggggattgtgtgtctcgtcgtgacgatcatgtactggtccgggtgggaaatgggagctgtggaggccatctctctgtccattcttgtgggatcctccgtcgactactgtgtgcaccttgtcgagggctatctcttggccggtgagaatctgccccctcatcaggcggaagatgctcggacccaacgccagtggaggaccctcgaggccgttagacatgtaggcgtagctattgtgtcctctgctctgactaccgtgattgcaaccgttcctctgtttttttgcatcattgcaccatttgcaaaattcggaaagattgtcgccttaaacactggtgtgtcaatactttacactttaactgtgtctacagctctgctcggaatcatggccccaagctccttcaccaggacccgcacatctttcctcaaggcactcggcgcagtcctactggctggagctttgggactcggcgcttgcctggtcctgcttcagtcaggctacaaaatccccctgcccgctggcgcatcgctgtag

SEQ ID NO: 234167 - DNA, 4179 bp, synthetic construct
  misc_feature 1..4179: note = Description of Artificial Sequence: Synthetic coding sequence
  source 1..4179: mol_type = other DNA
atggacactgaagatgaccctctcctgcaggatgtgtggctggaggaagagcaggaggaggaggaggccacaggagagacctttcttggtgcccagaaaccgggacctcagcctggcgctggcggacagtgctgctggagacactggcccctcgcaagccgccctcctgcgtctgggttctggtcaacactgggatgggctttcactaacccctgctgcgctggtttggttttgtttctcggctgcagcatccctatggccctttccgcgttcatgtttttatattatcctccactcgatatcgatatcagctataatgcctttgagatcaggaatcatgaagctagtcagcggttcgacgccctgaccttggccctcaagtcccagttcggttcttggggacggaacagacgcgatctggcggattttacaagcgaaaccctgcagagactgatctctgagcagcttcagcaattacacctgggtaaccggtccaggcaggcctctagggccccaagagtaattccagcggcttccctgggaggtccaggcccttaccgggatacatctgcagcccagaagcccactgccaaccggtctggcaggttgcgcagggagactcctccactggaggacttggctgctaaccagtcagaggaccccagaaatcagagactgagcaagaacgggagataccagcctagcattccaccgcatgcagccgtggccgcaaaccagtccagggccaggagaggagctagtcgatgggattactctcgcgcatatgtctccgctaacacacaaacccacgcacactggagaattgagttgatttttcttgcaaggggcgacgccgagcggaacatcttcactagcgaaagactcgttacgatccacgaaattgagaggaagataatggaccatcctggattcagggaattttgttggaagccccatgaagtgttgaaagatttacccctaggaagttactcgtactgctcgccgccatcctctctgatgacatacttcttccctactgagaggggcggtaagatttactacgacggcatgggacaggacctcgcggatattagaggatccttagaattggccatgacccacccagaattttattggtacgtcgacgagggtctgtcagctgataacttgaagagctctttgttacgcagtgaaatcctgttcggagcacctctgccaaactactactcagtcgacgaccgttgggaagaacaaagagccaagtttcagtctttcgtggtcacctatgtggcaatgctggccaagcaaagtacatctaaagtacaggtgttgtacgggggaacagacctttttgactacgaagtgcgcaggacctttaataatgacatgctgctggcctttatcagcagctcctgcattgccgctctggtgtatatcctgacaagttgcagcgtcttcctctccttcttcggcattgcctctatcgggctgagttgtctagtcgctttgttcctgtaccacgtggtgttcggcattcagtacttgggtattcttaatggtgttgccgcattcgtgattgtgggtatcggcgtggacgacgtcttcgtgttcataaatacgtaccgacaggctactcacctggaagatccacagctcaggatgattcacactgtccaaacagctggaaaggcgacattcttcacatctttaactactgccgcagcttatgccgctaacgttttctcccagattcccgcagtacatgactttgggctctttatgtcactgatagtgtcctgctgttggctggctgtgttagtaactatgcctgcggcattgggcctttggtcgctctacctggcccctctagaatccagttgccaaacatcctgtcatcagaattgtagccgaaaaacgtcgctccacttccctggagacgtgtttgcagcccctgagcaggtgggaggttcaccagcccagggtccgatcccatacctggatgacgacataccattactggaggttgaggaggaacctgttagtctcgaactgggagatgtgtctctggtctcggtctctcccgaaggcctccagccagcatcgaacacaggttcccgcggacacctcattgtgcagctgcaagaactcctgcatcactgggtgttgtggtcagctgtgaagtccagatgggtgattgtaggtctttttgtgtcaatcctaatcttgtcgttggtgttcgcctctagactgcgcccagcctctcgggcacctcttttattccgacccgataccaacattcaggtgttgttggacctgaagtacaacctctccgcagagggcatcagctgcatcacctgctctggcttgtttcaggagaagcctcattctttgcagaacaacatccggacctccctggagaaaaaacgcagggggtctggcgtgccatgggcctcgagaccggaagcgacgctgcaggacttcccaggcactgtctacatcagtaaggttaagtcccagggacaccccgctgtttaccggctcagcctcaacgcctcactgcccgcaccctggcaggcagtgtctcctggagacggggaagtgcccagtttccaggtctaccgtgcaccctttggaaatttcaccaagaaattaaccgcctgcatgtcaaccgttgggctcctgcaggcggctagccccagccgcaaatggatgttgaccacacttgcctgcgatgccaagcgcggatggaagttcgacttcagcttttatgtcgcgaccaaggagcagcagcatactcgcaagctttacttcgctcagagtcataaaccccctttccacggcagagtgtgcatggctcctccaggctgcctgctgagcagcagcccggatggacctacaaaagggtttttcttcgtgccttctgagaaagtgcccaaggcgagactctctgccactttcgggtttaacccctgcgttaacaccggatgtggtaagcctgcagtcagacctcttgtagatactggagccatggttttcgtcgtcttcggaatcataggcgttaaccgaaccagacaagtcgacaatcacgtgattggggatcccggttcggtggtgtacgactcctcctttgacctcttcaaagaaataggccatctgtgccatttgtgcaaggcgattgccgcaaatagcgaactggttaagcctgggggtgctcagtgtctcccaagtggttattccattagtagctttttacagatgctccatcctgaatgcaaagagctgcctgaaccaaatctgctgccaggccaacttagccacggggctgtaggggtgcgggaggggagagtccagtggatatccatggcattcgaatctaccacatacaagggaaaaagttcctttcaaacctattctgactatttgagatgggaaagctttttgcagcagcagcttcaagccctcccagagggctccgtgctgcggagaggcttccagacctgcgaacattggaagcagatttttatggagatagcaggcgtgcaaagcgctctgtgtggacttgtgttgtcactcttgatctgtgtcgctgctgtggctgtcttcactacccatatactactgctgctcccagtgctgttgagcatcctgggcattgtgtgcctggtggtgacgatcatgtactggagcgggtgggagatgggagcagtagaagccatctcgcttagcatcctggttgggtccagcgttgattactgtgtacatctagttgaaggctatcttctggctggtgaaaacctccctccgcatcaggcagaggatgccagaacccagcggcagtggcgaacgcttgaagctgtgcggcacgtcggcgtggccatagtctcatccgctctcaccaccgtcatagccactgtgccacttttcttctgtatcattgcgccatttgctaagtttggcaaaatcgtagcactgaataccggagtttctatcttatacaccctgaccgtttccacagcactactgggcatcatggcacctagcagttttaccagaacccgcacttcctttttaaaagcgctgggagcagtgttgttggccggagctctgggattgggagcttgtctcgtgctcctgcagtcggggtacaaaatacctctgcccgctggcgcttccttgtag

SEQ ID NO: 234168 - DNA, 2304 bp, synthetic construct
  misc_feature 1..2304: note = Description of Artificial Sequence: Synthetic coding sequence
  source 1..2304: mol_type = other DNA
atgccctgggtcgaacccaagcccagacctgggcctgagcagaaaccgaaactcacaaagccggactccgctacaggtcctcaatggtaccaggagagccaggagtcagagagtgaagggaagcagccccctcccggtcccctcgctcctccaaagtcccctgaaccgtctggcccactggcttcggagcaggacgcccctctccctgagggagacgacgctcccccacggcctagcatgctcgacgacgcgccaaggcttcctctcgagctggatgacgccccactgccagaggaggaaaccccagaacccactgcaatctgccggcacagacatagatgtcatacagactgcctagaaggactcctcagccggacatttcagtggctcggatggcaagttggtgctcatccctggattttcctgctcgcccctttgatgctcactgctgctctcggtaccgggtttctctatctgcctaaggatgaagaagaggatctcgaggagcattacactccagtcgggtcccccgcaaaggctgaaaggcgcttcgttcagggacacttcactacaaacgactcctataggttttcagcttcacggagatctaccgaggctaactttgtgtcccttctcgtggtatcttattccgacagtctgttagatccagcgactttcgcagaggtctccaagttggacggagcggtccaagatctcagagtggccagggagaagggatctcaaattcagtaccagcaggtttgtgccaggtaccgcgcactctgcgtgcctcccaaccccatcctgtacgcctggcaagtaaataaaacactgaatctgtccagcatttcttttcccgcttataaccacggaagacaccccctctacttaactgggttcttcggcggttatatcctcggcggttccctaggcatgggccagctcctgttgcgggctaaagccatgaggctactgtattaccttaagaccgaagatcctgaatacgatgtgcagtctaaacagtggctcactcacctgctggaccagtttactaatatcaagaatatactggcactgaagaagattgaggtggtgcacttcacttcactttccagacagttggagttcgaggccacatctgtaactgttattcccgtctttcatctggcttacatcctgatcatactgtttgccgtgactagttgcttccggttcgattgcattagaaataagatgtgtgtggctgcgttcggcgtcatctcagcctttcttgcagttgtaagcggctttggcctgctgttgcatatcggcgtgcctttcgtgatcattgtggcaaactccccattcctcatcttgggagtgggggtggacgacatgtttataatgatcagtgcttggcacaagacaaatttagccgatgacatccgcgagaggatgagcaacgtgtactctaaagctgccgtgtccattacaatcaccaccatcacaaacattctggcgctttacacaggcattatgagttccttccgcagtgtgcagtgtttctgcatctatacgggcatgactctccttttttgctatttctacaatatcacatgcttcggggcattcatggcgctagacggcaagcgggaagtcgtctgtctgtgctggcttaaaaaagccgatcccaagtggccctcctttaaaaagttttgttgctttccattcggctccgtcccggatgaacatgggaccgatatccatcccatcagtctgttttttcgggactactttggaccttttctgacccgctctgaatccaaatacttcgtggtgtttatttacgtcctgtatattattagctccatttacgggtgcttccatgtgcaggagggcttggatctccgaaacctagcatctgacgatagttatattacaccgtactttaatgtcgaggagaactacttcagtgactacgggccacgagtcatggttatcgtgacaaaaaaagttgattattgggacaaggatgtaagacagaaactcgagaactgtactaagattttcgagaagaatgtgtatgtggataaaaacctgaccgagttttggctcgacgcatatgtccagtatctgaagggcaattcccaggatcctaatgagaagaacacattcatgaacaacatccctgactttctgtcaaatttcccaaatttccaacacgatataaacatctctagcagtaatgaaataattagctccagaggcttcattcagaccactgacgtgagcagctccgccaagaagaaaatcctcttgttctag

SEQ ID NO: 234169 - DNA, 978 bp, synthetic construct
  misc_feature 1..978: note = Description of Artificial Sequence: Synthetic coding sequence
  source 1..978: mol_type = other DNA
atgacagaacggagaagagacgaactcagtgaagaaattaacaatcttagggaaaaagtgatgaagcagagtgaagagaacaataatttgcagtctcaagtgcagaaattgacggaagaaaatactaccttgcgggaacaggtggagccaacacccgaagatgaggacgatgacatagagttgcgaggcgcagctgccgcagccgcaccccctcccccaatcgaggaggaatgtccagaagatctgccagagaagttcgatggcaaccctgacatgcttgcaccatttatggcacagtgccagatttttatggagaaaagcacacgagatttttccgttgacagagtgcgggtgtgctttgtgacctctatgatgacagggcgtgccgctcgctgggcatcggccaaactcgaaagaagccattaccttatgcacaattaccctgcatttatgatggaaatgaagcacgttttcgaggacccccagaggcgggaggtcgctaagagaaaaattcgtaggctgcggcagggtatgggctctgtgatcgactatagcaacgctttccagatgatcgcccaagacctggattggaatgaaccggcattgattgatcagtatcacgagggcctgtccgatcacatccaagaagagctttctcatctggaagtcgctaagtcactatctgcattgataggccagtgtatccacattgagaggagactcgccagagccgcagccgctaggaaacccagatctcctcccagagccctggtgctcccgcacatagccagccatcaccaagtcgaccctacggaaccagtgggaggagccaggatgaggctgactcaagaagaaaaagaaaggcggaggaagctaaacctctgcctctattgcggcacgggcggacattacgcagataactgtcccgcaaaggcctccaaatcctctccagcagggaactctccggctccactctag

SEQ ID NO: 234170 - DNA, 978 bp, synthetic construct
  misc_feature 1..978: note = Description of Artificial Sequence: Synthetic coding sequence
  source 1..978: mol_type = other DNA
atgactgagaggcgacgggacgagctgtccgaggaaataaacaatctccgtgaaaaagtgatgaaacaatccgaagaaaataataatctgcagtcacaggtgcagaaattaacggaagaaaacacgacactcagggagcaggtcgagcccacacctgaagatgaagacgatgatattgaattacgcggtgcagcagcagccgcagcccctcctcccccaatcgaagaggaatgccctgaggatctgcccgagaagtttgacggtaatccagatatgctcgcacctttcatggctcagtgtcaaatcttcatggagaaatcaacccgtgacttctctgtggaccgtgtccgggtttgtttcgtaacctccatgatgacagggcgagctgcacgttgggcctcagccaagctggaacggtcacactacttaatgcacaattacccagcgtttatgatggagatgaaacatgtctttgaggaccctcagaggagggaagtggccaaacggaaaattaggcgcctgaggcaggggatgggaagtgtaatcgactacagcaatgcctttcaaatgatcgctcaggacctcgattggaatgaacctgcccttatcgaccagtatcacgaagggctctctgatcacatccaggaggagctgtctcacctggaagttgctaaatccctgagtgccctgattggccagtgtatacatattgaaaggagactggctcgtgcagccgctgcccgtaaaccaagaagccctcccagggctttagtgctcccacacattgcatcccaccaccaagtggatcccacagagcccgtaggtggagcaaggatgcgacttacccaggaagagaaagagagaagaagaaaacttaatttgtgcttgtactgtggtactggcggacactacgctgacaattgtcctgctaaagcgtccaaatcaagcccagcaggaaacagtcctgcccctctgtag

SEQ ID NO: 234171 - DNA, 1311 bp, synthetic construct
  misc_feature 1..1311: note = Description of Artificial Sequence: Synthetic coding sequence
  source 1..1311: mol_type = other DNA
atgatggcaacccagaccctcagtatcgacagctaccaagacgggcagcagatgcaggtggtgaccgagctgaaaactgaacaagaccctaattgttctgagccagacgcggagggcgtcagtccgcctcctgtcgaatcacagacccccatggacgtcgataagcaggccatctacaggcaccctttattcccactgttagcccttctttttgagaaatgcgaacagtcaacccagggatccgagggcactaccagtgcatctttcgacgtcgatatcgaaaatttcgtgcgcaaacaggagaaggaaggtaaaccctttttctgtgaagatcccgaaaccgataatctgatggtcaaggcgatacaggtgctcaggatccacttattggaattagagaaggtgaacgagctgtgtaaggatttttgttctcgatatatcgcctgcttgaagactaaaatgaactccgagactctcctctccggtgagcccggatccccctactctcctgttcaatcccaacaaattcagtctgccatcacgggaacaatttcgcctcagggaattgtggttccagcctcggccttacagcagggcaacgtggccatggccaccgtcgctggcggaactgtctatcagcccgtgactgtagtcaccccacagggtcaggtggtgactcaaacactgagtcccggaactattcggattcaaaatagtcaactccagctacaacttaatcaggatctctctattctccaccaagatgacggcagctccaagaataaaagaggcgtgcttcccaagcacgccacaaatgtcatgcggtcctggcttttccagcacattgggcatccttatcctaccgaagatgaaaaaaagcagatagccgcacagaccaacctcacactgctccaggtcaataattggttcatcaatgcccgtcgcagaattctgcagcctatgttagattcttcatgttcagaaacacctaagacaaagaaaaagacagcacagaaccgcccagtccaacgcttctggcctgactcgatagcgtcgggtgtggctcagccacctccatctgagctgactatgagcgaaggcgcagtggtgactataaccactcccgtcaatatgaatgtcgacagcctgcagtccttaagctcagacggggctacgttggccgttcagcaggtgatgatggctggacagtccgaggatgagtccgtcgattcgaccgaggaggacgcaggtgccctagccccagctcacatatccggactcgtgctggagaattcggacagcttgcagtag

SEQ ID NO: 234172 - DNA, 960 bp, synthetic construct
  misc_feature 1..960: note = Description of Artificial Sequence: Synthetic coding sequence
  source 1..960: mol_type = other DNA
atggtgaaagcgattcaggtgctacgcatccaccttttagagttggagaaggtaaatgagctgtgcaaagatttctgctctcggtatatagcttgtttgaagaccaagatgaattctgagaccctgttgtcaggcgaacctgggtcaccttattctccagtccagtctcagcagatccaatccgcaatcaccggcacaatatctccccaggggatcgtcgtgcctgccagtgccctgcagcagggtaacgtggccatggctaccgttgccggtggtacagtctaccaacccgtcacagtggtgacgccccaaggccaagttgtaacacaaaccctttctccgggaacaataaggatccagaacagccagctccagctacagctgaatcaggatctttccatcctccaccaggatgacggcagctctaaaaataaaaggggcgtgctcccaaagcacgcaaccaacgtgatgagaagctggctctttcagcatattggccacccttaccccaccgaggacgagaagaagcagattgccgcacagaccaatctgacactccttcaggttaacaactggtttatcaacgccaggcggaggatcctgcagcctatgctggattcctcttgctccgaaacgcccaagactaaaaagaaaaccgcacaaaatcgacctgtacaaaggttttggccggactctatagccagcggtgtcgcccagccccctccttctgagctgactatgagcgaaggggcagtggtcaccatcactaccccggtcaacatgaacgttgattccctgcaaagtctgagtagcgatggtgctaccctcgctgttcagcaagttatgatggcaggacagagcgaagatgagagcgtagattctacagaagaagatgccggtgctctagctccagctcacatttctggccttgtcctggagaacagtgactccctacaatag

SEQ ID NO: 234173 - DNA, 1260 bp, synthetic construct
  misc_feature 1..1260: note = Description of Artificial Sequence: Synthetic coding sequence
  source 1..1260: mol_type = other DNA
atgatggcaacccagacactgtcgatcgactcatatcaggacggacagcagatgcaggttgtcactgagttgaaaacagaacaggaccccaactgttccgagcccgatgccgaaggcgtgtctccacctcccgtggaaagtcagacaccgatggatgtagacaagcaggctatctaccgccaccctcttttccctcttcttgctctccttttcgagaaatgtgaacagtccacccagggaagcgagggcaccaccagcgcctcctttgacgtggatatagaaaactttgtgcggaagcaagagaaggaaggcaaaccctttttctgtgaagatcctgaaactgacaacttgatggttaaggcaatccaggtactgaggatacatctcctcgagctggaaaaagtcaatgaactgtgtaaggacttctgctctcgctatatcgcctgtcttaagacgaaaatgaactcagagactttgctctcaggagaacctggaagtccctacagccccgtacagagccagcaaattcagtctgctattaccggcactatttctcctcagggaattgttgtcccagcatctgcgctccagcagggcaacgtggccatggccactgtagcgggagggacggtctatcagccagtgactgtggttacaccacaaggacaagtggtgacacagacactgtcaccaggaacaattagaatccagaactcccagctccagctccaattgaaccaggacctgagcatcttgcatcaggatgatgggtcctccaagaataaacgcggagtcctgccaaagcacgctactaacgtgatgcgcagctggcttttccaacacatcggccacccttatccaacagaggatgaaaagaagcagattgcagctcaaacgaatctgacactgctacaggtgaataactggttcatcaacgcccgacgaagaatactgcaacctatgctcgatagttcctgttccgagactcccaagaccaagaaaaaaaccgcacaaaaccgacctgtgcaacgtttttggcccgattccattgcttctggagtcgctcagcctcctccctctgagttgactatgtccgaggggaccggaggacgaccaagacctgacatggtcgatcatggagttggaatcatgaacaaaagacctggatctggcctcctggcacctccgaggccagctgagaacgatatactgaaaccacctctgcggagctcctttgtcaactgtctgctgatcttctag

SEQ ID NO: 234174 - DNA, 1419 bp, synthetic construct
  misc_feature 1..1419: note = Description of Artificial Sequence: Synthetic coding sequence
  source 1..1419: mol_type = other DNA
atgatgcagcatgccagtcctgctcctgcgttgaccatgatggcgacgcagaatgttcccccacccccataccaggattctcctcagatgacagccaccgcccagccgccatcgaaggcccaggcagtacatatttccgcaccaagcgctgccgcttctacccctgtccccagcgccccaatcgacccgcaggcacagcttgaagccgacaaaagggccgtgtaccgccaccccctttttcccctcttgaccctgttgtttgagaagtgcgagcaggcaacccaaggaagtgaatgtatcacaagtgcctcctttgacgtagacatcgagaattttgttcaccagcaggagcaggagcataaaccctttttttccgacgaccctgaactagacaacctcatggttaaggcaatccaggtgcttagaatacacctgttggaactggagaaggttaacgaattgtgtaaggacttctgtaacaggtatattacatgcctcaagaccaagatgcacagtgataatttgctgaggaatgatctggggggaccgtactcccccaatcaaccatctatcaatctccattcacaggacctcctgcagaattcccctaactctatgtctggcgtgagcaataacccccagggtatcgttgttccggcttccgcccttcagcaaggcaatatcgccatgacaacggttaacagccaagtggtatccggaggtgccctttatcaaccggtgacaatggtgacatcccaaggtcaggtcgtgactcaggctatcccccagggcgctatccaaatccagaatacccaggtgaatctggacctgacctccctcctggataatgaggacaagaaaagcaaaaataagaggggcgtgttgcctaagcacgcaacaaacatcatgcgtagctggcttttccagcatctgatgcacccatacccaacggaagacgaaaaacgccaaattgccgctcagaccaatctgacacttctacaagtgaataattggtttatcaatgctcgaagacgcatccttcagcccatgctggacgcctccaatccggacccggcaccaaaggctaaaaaaattaaatcccagcatagacccacgcagcgattctggcccaattccatcgctgccggagtgctacagcagcaagggggagccccaggcacaaaccccgatggctccattaatttagacaacctgcagagcctgtcctcagattccgctaccatggctatgcagcaagccatgatggcagctcatgacgacagtctcgacggcaccgaggaagaggacgaggatgagatggaggaggaagaagaagaagaactggaggaggaagtggacgagcttcaaactaccaatgtatccgaccttgggctggagcactcagattcgcttgaatag

SEQ ID NO: 234175 - DNA, 120 bp, synthetic construct
  misc_feature 1..120: note = Description of Artificial Sequence: Synthetic coding sequence
  source 1..120: mol_type = other DNA
atgatgcagcatgctagtcctgcccctgcactgactatgatggccacacagaatgtgccaccaccaccttatcaggacagccctcagatgacagcgactgctcagccaccttcaaaatag

SEQ ID NO: 234176 - DNA, 1332 bp, synthetic construct
  misc_feature 1..1332: note = Description of Artificial Sequence: Synthetic coding sequence
  source 1..1332: mol_type = other DNA
atgaccgcaaccgctcagccgccatcaaaggcacaagcggtccatatcagtgctccctctgccgcagcctccactccagtgcccagtgcccctatagacccccaggcccagctagaagcagacaagagggccgtgtaccgccacccactctttcctctcctcacactgttatttgagaagtgtgaacaggctactcaggggagcgaatgcattacttcagccagttttgatgtcgatatagagaatttcgtgcaccagcaggaacaggagcacaagccctttttttccgatgatccagagctggataaccttatggtaaaggccattcaggtgttgcgaatccacttgctggagctggagaaagtcaacgaactttgcaaggatttttgcaaccgttatattacatgtctgaagactaaaatgcactcagataacctgttacgcaatgatctgggcggaccatattctccaaatcaaccctctataaaccttcactcgcaagacctgctccagaacagtcccaacagtatgtccggagtgagcaacaacccccagggtatcgtggtgccggcttcagcgctccaacaggggaacattgccatgaccaccgtaaacagccaggtagttagcgggggagctctctatcagcccgtgaccatggttacgagccaggggcaggtggtgacccaggcgatcccccagggagccatacagatccaaaatacccaggtcaacctcgatcttacatcacttctggacaacgaagacaaaaagtccaaaaataagaggggggtgctgccaaagcacgccaccaatataatgagatcatggctattccagcacctcatgcatccctatccgactgaggatgagaagcgacaaatagctgcccagaccaatctgacgctgttacaggtgaataactggttcatcaacgcccgacggaggattctgcagcctatgctggatgcttccaacccggacccagccccaaaagctaaaaagatcaaatctcagcaccggccaacgcagcgtttttggcccaattccattgctgcaggagtgctgcaacagcaggggggagcacccggtacaaacccagacgggtctatcaatctggacaacctccaaagtttgtcgtcagactcagccactatggcaatgcagcaggccatgatggccgcacacgatgacagtttggatggaacagaggaggaagacgaggatgagatggaagaggaagaagaggaagagctcgaagaagaggttgatgagttgcagaccactaatgtttctgacctcggcctcgagcactccgactcactagagtag

SEQ ID NO: 234177 - DNA, 1332 bp, synthetic construct
  misc_feature 1..1332: note = Description of Artificial Sequence: Synthetic coding sequence
  source 1..1332: mol_type = other DNA
atgactgcgaccgcccaacccccatccaaagctcaggccgttcatatctctgcacctagtgccgctgcaagtacccccgtcccaagcgctcccatcgaccctcaggctcagctggaggccgataaaagggctgtgtacaggcatcccttatttccactactcacccttctcttcgaaaaatgcgaacaggctacacaaggttccgagtgcatcacctcagcatcattcgacgtggacattgaaaacttcgttcaccagcaagaacaggagcacaagccattttttagtgacgaccccgagctggacaaccttatggttaaggccattcaagtgctgagaatccacttactcgagctcgagaaagttaacgaattgtgcaaagacttttgtaacaggtatatcacttgtctgaaaaccaaaatgcactcagacaacctcctcaggaacgatctcggcggaccctattcacccaaccagccctctattaacctccattctcaggatctccttcagaattctcccaattctatgtcgggcgtgtccaataacccccaggggattgtcgtgcctgcatctgccctccaacagggtaacattgcaatgaccaccgtgaacagccaagtcgtctctggaggagccctctatcagcccgttactatggtcacatcccaggggcaagttgtgacccaagcaatcccgcagggcgcaatccagatccaaaacacacaagtcaatctagatctgactagcctgctggataatgaggataaaaagtcgaaaaacaagcggggtgtactaccaaagcacgccactaacatcatgagatcctggctgtttcagcatttgatgcacccctacccaaccgaggacgagaagcgtcagatcgccgcacagacaaacttgacccttctgcaggtcaacaactggtttattaacgcgcgacgacgtattctgcagccgatgcttgacgcttccaatccggatccagctccaaaggctaagaagatcaagtcacagcacaggcccacacaaaggttctggccaaatagtatcgccgcaggggttctgcaacagcaagggggagcccctgggactaaccccgatggatccataaatttggataatttacagtcgctcagctctgattccgctaccatggcaatgcagcaggccatgatggctgcccatgacgacagcttggacggcaccgaggaggaggacgaagacgagatggaagaagaggaggaggaggagctcgaggaggaagtcgatgagctccaaaccaccaacgtctcagatcttgggttggaacacagtgacagcctggagtag

SEQ ID NO: 234178 - DNA, 123 bp, synthetic construct
  misc_feature 1..123: note = Description of Artificial Sequence: Synthetic coding sequence
  source 1..123: mol_type = other DNA
atgatgcaacacgcgtcccctgcccctgccctcacaatgatggcgactcagaacgtgccaccgcctccgtaccaagacagtccccagatgaccgctaccgcgcagccaccctccaaggcttag

SEQ ID NO: 234179 - DNA, 921 bp, synthetic construct
  misc_feature 1..921: note = Description of Artificial Sequence: Synthetic coding sequence
  source 1..921: mol_type = other DNA
atgatggctacgcagaatgttcctcctccaccgtaccaggatagtccccaaatgacggcgacagcccagcccccatccaaagctcaggcggtccacatatcagcaccgagtgcagctgcgtccactccagtgccttcagctccaatagaccctcaggctcagctggaagctgacaaacgcgcagtgtaccgccatcccttgttcccgctgctgactctgttgtttgaaaagtgtgagcaggctactcaggggagcgaatgtatcacaagcgcatcattcgacgtggacatagagaattttgttcaccagcaggagcaggagcataagccatttttcagcgatgacccagaactggataatttgatggtcaaagcgatccaggtgctacggatccacctgctggagttggaaaaggtgaacgaactgtgcaaagacttctgtaaccgatacattacatgtctgaaaacgaaaatgcactcagataacctactgagaaatgacctgggcggaccctatagtcctaaccagccgtccatcaatctgcatagccaagatttgctccaaaattctccaaattccatgagcggggtgagcaacaacccacaaggaatagtagtacccgcttccgccctgcaacagggaaacattgctatgacaaccgtgaattctcaggttgtgtctggtggggctctgtaccagcccgtgacaatggtaacatcccagggacaggtggtgacccaggcaatccctcagggagctatccagattcagaacactcaagtaaacctggaccttacctccctgctggataatgaggacaagaagtctaaaaacaagagaggtgtccttccaaagcacgcgactaacatcatgaggtcatggttgttccagcatcatgccccactgcctcatgggggttag

SEQ ID NO: 234180 - DNA, 1227 bp, synthetic construct
  misc_feature 1..1227: note = Description of Artificial Sequence: Synthetic coding sequence
  source 1..1227: mol_type = other DNA
atgtcacgccctcacccgacaagaacagcgcataggcaccccctttttccactcctgacactgctcttcgagaagtgcgagcaagccactcagggctcagaatgcattacttcagcctctttcgacgtggatattgaaaattttgtccatcaacaggagcaggaacataaacctttcttctctgatgatcccgaactggacaatctgatggtcaaggccattcaagtcctacgtattcatctcctggagttggaaaaagtgaatgagttatgcaaggacttttgcaatcgatacattacatgccttaaaacgaaaatgcactcagataatctgctacggaacgacctaggtggaccttacagccccaaccagccctcaattaatctccactcccaggatcttctacaaaactcaccaaattccatgagcggagtgtcaaataacccacaagggatcgtagtgccggcttctgctttgcagcaaggtaacatcgcaatgaccacagtcaattcacaggtcgtgtctggcggtgcattataccagccagttactatggttacaagccaagggcaggttgtcacacaagcaattccacagggtgcaatccagatccagaacacccaggttaacctcgacttaacctctctattggacaacgaagataaaaagtcgaaaaataaacggggagtactcccgaaacacgccaccaatatcatgagatcatggctgtttcaacacctgatgcacccttatcctaccgaggacgagaagcgccagatcgctgcgcagactaaccttaccctgcttcaggtgaataactggtttataaacgcgagaaggaggatcctgcagcctatgctggacgcatccaacccagaccccgctcccaaggccaaaaaaatcaagagtcaacacagacccacccagcgcttctggccaaactccatagccgctggcgtcctccaacagcaaggaggagctcccggaaccaatccagacgggagtattaacctggacaacctgcagagcctgtcaagcgattccgccaccatggcgatgcagcaagctatgatggccgctcatgacgacagtctggatgggactgaggaggaggacgaagacgagatggaggaggaggaagaggaggagttggaggaagaagtggacgaattgcagaccacaaacgtgagcgaccttggcttggagcatagcgactcattggaatag

SEQ ID NO: 234181 - DNA, 297 bp, synthetic construct
  misc_feature 1..297: note = Description of Artificial Sequence: Synthetic coding sequence
  source 1..297: mol_type = other DNA
atgatgcagcacgcgtcacctgcgccagctttgactatgatggcaacccagaacgtgccccctcctccgtatcaggactcccctcagatgaccgccacggcacagcctccttcaaaggcacaggctgtgcacatctctgcaccgagcgctgccgcttcaacccctgtgccttcggcgcctattgaccctcaggcgcagttggaggccgacaagagagcagtgtatcgacacccgctttttccattgctcactcttctctttgagaagtgcgaacaggcgacacagggatctgaatag

SEQ ID NO: 234182 - DNA, 234 bp, synthetic construct
  misc_feature 1..234: note = Description of Artificial Sequence: Synthetic coding sequence
  source 1..234: mol_type = other DNA
atgatgcaacacgcttccccggctccggcactgactatgatggccacacagaatgtacccccaccaccatatcaggactctcctcagatgacggcaaccgcccagcccccttcaaaggcccaagcagtacatatctcggccccaagtgctgccgctagcaccccagtgccaagcgctcctatcgacccccaagcccagctggaggccgacaagcgcgcagtttaccgctggtag

SEQ ID NO: 234183 - DNA, 990 bp, synthetic construct
  misc_feature 1..990: note = Description of Artificial Sequence: Synthetic coding sequence
  source 1..990: mol_type = other DNA
atgacacgggattttaagcccggagacctgatctttgcgaaaatgaaaggatatccacactggcctgctagagtggacgaggtacccgatggtgcagtgaaaccacccaccaataagctcccgatcttttttttcggcacccacgaaaccgctttcctggggccaaaggatatattcccttacagcgagaacaaagagaaatatggaaagccaaataaacggaaggggttcaatgaggggctctgggagatcgataataatcctaaggtgaaattctcatctcagcaggcagctactaaacagtcaaacgcatcgagcgatgtagaagtggaagagaaggagacatcagtgtccaaggaggatactgaccacgaggagaaagcttccaacgaagacgtaaccaaggcggtggacatcactactcccaaagcagcaagaagagggaggaaaagaaaggctgagaagcaagtcgaaacagaggaggcgggagtggtgacaacagccactgcctccgtcaaccttaaggtgagccccaaacggggtcgcccagctgcaactgaagtgaaaattcctaagccaagaggccgtccaaaaatggttaagcaaccttgtcccagtgagagtgatattataaccgaggaggacaaatccaaaaaaaaaggtcaagaagaaaagcaacccaagaagcagcccaaaaaggacgaagagggacaaaaagaggaagacaaaccaagaaaggagcccgataaaaaggaggggaagaaagaggtggaaagcaagcgtaagaatctggcaaaaacaggcgtgacgagcacttcagactcggaggaggaaggggatgatcaggagggcgaaaagaagcgaaagggcggtaggaactttcagaccgcccacaggagaaatatgttaaagggccaacatgagaaagaggctgcggacaggaagagaaagcaggaggagcaaatggaaacggaacactttgcactatag

SEQ ID NO: 234184 - DNA, 1002 bp, synthetic construct
  misc_feature 1..1002: note = Description of Artificial Sequence: Synthetic coding sequence
  source 1..1002: mol_type = other DNA
atgaccagggacttcaagcccggagatcttatcttcgctaagatgaaaggatacccccattggccagcaagggtagacgaagttccggacggcgctgtgaagccaccaactaacaaattgccaatcttcttctttggcactcacgaaacagcgtttctggggcctaaagacatttttccctactccgagaacaaagagaaatacgggaaaccaaacaagcgcaagggctttaatgaaggactgtgggagatcgacaacaatcccaaagtgaaattcagcagtcaacaagccgctacgaaacagtcaaacgcttcttcagacgtggaggtcgaggagaaggagacatcagtctcaaaggaggacaccgaccatgaggagaaggccagtaacgaggatgttaccaaggccgtagatatcaccacccctaaagctgctcgccgtggccgaaaacggaaggcagagaagcaggtggagactgaagaagcaggcgtcgtgacaacagcgactgcctcagtgaatctaaaggttagccccaaaagaggaaggccggcagccacggaggtgaaaatcccaaagcctagaggtcgacccaagatggtgaagcagccttgtccttctgagagcgacattatcaccgaagaagataagtccaagaagaaaggacaggaggagaaacagccgaagaagcagcccaaaaaggacgaagagggacagaaggaggaggacaaacccaggaaagagccagacaaaaaggaaggcaaaaaggaggtagaaagcaaaagaaagaatctggccaaaaccggggtgacctccacaagcgactctgaggaggagggggacgatcaggaaggagaaaagaagcgaaaagggggacgcaacttccagacggctcatcggaggaatatgctgaagggccagcatgagaaagaagccgctgaccgtaaaaggaaacaagaggaacagatggaaacagaacaccagaccacatgcaatctgcaatag

SEQ ID NO: 234185 - DNA, 1593 bp, synthetic construct
  misc_feature 1..1593: note = Description of Artificial Sequence: Synthetic coding sequence
  source 1..1593: mol_type = other DNA
atgactcgggacttcaaaccaggcgacctcatcttcgcaaaaatgaagggctatccacactggcccgcacgggttgacgaggtccccgatggagccgttaagccgcctacaaataagctgcctattttcttcttcggtacccatgaaaccgctttcctgggcccaaaggacatcttcccctactctgaaaataaagagaagtacgggaagcccaacaaaaggaaaggctttaacgaaggtttgtgggagattgataacaatcctaaggtaaagttttcgtcccagcaggctgcaacaaagcagagtaatgcgagtagcgatgtggaggtcgaagaaaaagagacgtccgttagcaaggaggatacagatcacgaggaaaaggctagcaacgaggatgtcaccaaggctgtggacataactactcctaaagcagcccgaaggggacgtaaaagaaaagccgagaaacaggtggaaactgaggaggcaggcgtggtgaccacagctactgcttccgttaatcttaaggtgagccccaaacgaggcagaccagcagccacggaggtgaaaatccctaagccgagaggccgaccaaaaatggtgaaacagccttgtccgtcggagtctgacattataaccgaagaagataagagcaagaaaaagggtcaagaggaaaagcagcccaaaaagcagcccaagaaagacgaagaagggcaaaaggaggaggataaacccagaaaggagccggataaaaaggaaggaaagaaggaggtagaatcaaagcgcaagaatctggctaagactggagtcacaagcacgtccgactctgaggaggagggtgacgaccaggagggggaaaagaaacggaaggggggtcgcaactttcaaaccgctcatcggagaaacatgctcaagggacaacacgagaaagaggcagccgacagaaaacgcaaacaagaggaacagatggagaccgagcagcaaaataaggatgagggtaagaaacccgaagtcaagaaagtcgagaagaagcgtgaaacttcaatggattctaggctgcaaagaatacacgctgaaatcaaaaattcgctgaaaatcgacaacttggatgtcaatcgttgcatcgaggctctcgacgagctcgcctccctgcaggtgacaatgcagcaggcccagaagcacacggagatgatcactacattgaaaaagattcgaaggttcaaagtttcgcaggtaataatggagaagtctacaatgctatacaataagttcaaaaacatgttcttggttggcgaaggtgactcagtgattactcaagtgctgaataagagtctggcagaacaaaggcagcatgaagaggctaacaagaccaaagaccagggaaaaaagggccctaacaaaaaactggaaaaggaacagaccggcagcaaaaccctcaatggaggatccgatgcacaggacgggaatcaaccgcaacataacggcgaatccaatgaagatagtaaggataatcacgaggcttcgaccaagaaaaaaccttcctccgaggaacgcgagaccgaaatcagtctgaaggattcaacattggacaattag

SEQ ID NO: 234186 - DNA, 1593 bp, synthetic construct
  misc_feature 1..1593: note = Description of Artificial Sequence: Synthetic coding sequence
  source 1..1593: mol_type = other DNA
atgacaagggatttcaagccgggagacctcatatttgctaagatgaaaggctacccccactggcccgctagagtagatgaggtgcccgacggagccgtgaagcctccaacaaacaaactccccattttcttcttcggcacccatgagacagccttcctgggtcccaaggacatcttcccatattccgagaataaagaaaaatatgggaagccaaacaaacgcaagggtttcaacgaaggcctgtgggagatcgacaacaatccaaaagtgaaattctcttcccaacaggcagcgacaaagcagagcaacgcgagcagcgatgttgaggtcgaggaaaaggagacatctgtgtccaaggaggataccgaccacgaagagaaagcttccaatgaggatgtcacgaaggcggtcgacataaccacgcctaaggctgcccgaagggggagaaaacgcaaagccgagaagcaggtagaaacggaggaggcaggggtggtcaccaccgcaaccgcctcagtgaatttaaaagtgagcccaaaaagggggagacctgccgcaaccgaggtaaagatacccaaaccgcgtggcagacccaaaatggttaaacagccatgtccttccgagagtgatatcatcactgaagaagacaagagcaaaaaaaaagggcaggaagagaagcagcccaaaaagcagccaaagaaagacgaagaaggccagaaggaagaggataagcccaggaaagagccagataaaaaggaaggaaaaaaagaagtggagtctaaaaggaaaaacctggccaagacaggagtgaccagcacttctgacagcgaggaagagggagatgatcaagaaggcgaaaagaagagaaaggggggacggaacttccagactgctcaccgtagaaacatgctgaaaggacagcatgagaaagaggctgccgacagaaagagaaagcaggaagaacagatggagaccgagcagcagaacaaagacgaggggaaaaagccagaagtcaagaaggtcgagaaaaaacgggagacgtccatggactctaggctgcaacggattcatgctgaaatcaaaaactccctgaagatagataatctcgatgtgaatagatgcatcgaagctttagatgaattggccagtctccaagttaccatgcagcaagcacagaagcacactgagatgatcaccactctgaaaaaaatcaggcggttcaaggtgtcccaggttatcatggagaagagcaccatgctttacaacaaatttaaaaatatgtttctcgtcggcgaaggcgacagcgtcataacacaggtgttaaacaaaagcctggcggagcagcgacagcacgaggaagcgaataaaacaaaagaccagggaaaaaagggccctaataaaaagctggagaaagagcagacaggctcaaagaccctgaatggcggatcggatgcccaagatggaaatcagcctcagcacaacggtgaatctaatgaagattctaaagacaaccacgaggctagcacaaagaagaagcctagcagcgaagagagggagactgagattagtctaaaagattcaactctggataactag

SEQ ID NO: 234187 - DNA, 1002 bp, synthetic construct
  misc_feature 1..1002: note = Description of Artificial Sequence: Synthetic coding sequence
  source 1..1002: mol_type = other DNA
atgactcgagactttaagcctggtgacctcatatttgccaagatgaaaggttacccgcattggcccgcacgtgtcgatgaggtccctgatggagcagttaaaccccctaccaacaagctccctattttctttttcggtacccacgagaccgcattcctgggaccaaaggacatctttccctactcggaaaacaaagaaaagtatggtaaacctaacaagaggaaagggttcaatgaaggcctttgggagatcgataataatccaaaggtgaaattcagctcacagcaggccgcaaccaagcagtctaacgcgtcttccgacgtcgaggtcgaggaaaaagagacctcagtcagtaaggaagataccgaccatgaagaaaaagcttcaaatgaggacgtgacgaaagccgtggacattaccacaccgaaagccgcaagacgtggcagaaaacgaaaagccgagaaacaggtggaaacagaggaagccggtgtcgtcactacggccactgccagtgtcaatctgaaggttagcccaaagagaggacgtcctgccgctaccgaagtcaagataccaaaacccagaggcaggccaaaaatggtcaagcaaccttgtccctccgaatctgatattattacggaggaggacaaatccaagaaaaaaggccaggaagaaaagcagcctaagaaacagccaaagaaagatgaggagggtcagaaagaggaggacaagccaagaaaggagcccgataagaaagagggcaagaaggaggttgaaagtaaaaggaaaaacctggccaagacaggggtgacttctactagcgacagtgaagaagaaggcgatgaccaggaaggcgagaagaagcggaaaggcggtcgaaactttcagacagcacaccgcaggaacatgttgaagggacagcatgaaaaagaagccgctgaccgaaagagaaaacaggaggagcagatggaaaccgagcatcagactacctgtaacctccaatag

SEQ ID NO: 234188 - DNA, 1362 bp, synthetic construct
  misc_feature 1..1362: note = Description of Artificial Sequence: Synthetic coding sequence
  source 1..1362: mol_type = other DNA
atggcccacattacaatcaaccaatatctccagcaagtttacgaggctatcgatagcagggatggcgctagctgcgcagagctggtttcatttaaacatcctcatgtcgctaacccacgtctgcagatggcgagtcccgaagaaaagtgtcagcaggtgctagagcccccttacgacgagatgtttgccgctcatttaagatgtacatacgctgtgggtaatcatgactttattgaagcctacaaatgtcagactgtgattgtgcagtatccgttgagtttcatggctgccgtcccccacagaactcacgcagtggactatcttgggttagaaactcgaaagcactgggcgtcctgtagctttctacagctggaacgcaacgatagcgtactcgagcagaaactcgtttctgctctctcgctcggaacctctttcttaagggcatttcaagctcacaaagaggagaactgggctctgccggtgatgtatgctgttgccctggacctgagggtgtttgctaacaacgcggaccagcagcttgttaaaaaagggaaatctaaagtgggcgatatgctagagaaggctgcagaacttctgatgtcctgcttcagggtgtgtgcgtccgacacaagggctgggatagaggattcgaaaaaatggggaatgctcttcctggtgaaccagctgttcaagatttatttcaaaatcaacaagctccacctgtgcaaacccttgatccgagccatcgattcgtccaacctgaaagatgactattcaacggcccagcgtgtgacctacaagtattacgtaggaaggaaagccatgttcgactcagattttaagcaggccgaagaatatctgtccttcgcgttcgagcattgtcatcggtcttcacagaaaaataagcgcatgattctgatttacctgctgcccgtcaaaatgctgttggggcatatgccaaccgtggagctgcttaaaaaatatcacctgatgcagtttgctgaagtgacaagggctgtctccgaaggtaacctgttgcttctgcacgaggcccttgcaaagcatgaagcatttttcataaggtgtggcatcttcctgatcttagagaaacttaaaataattacatacagaaacctttttaaaaaagtttacctgctgcttaaaacccaccagttgagcttagatgcattcttagttgctttgaagtttatgcaggttgaagacgtggatattgatgaggtgcagtgtattctggcgaacctcatctacatgggacacgtgaagggctacatctcacaccagcatcagaagctggtggtttccaaacaaaatcctttcccccctttgtcaactgtttgttag

SEQ ID NO: 234189 - DNA, 1200 bp, synthetic construct
  misc_feature 1..1200: note = Description of Artificial Sequence: Synthetic coding sequence
  source 1..1200: mol_type = other DNA
atgcgcttaacagatgtagttcagcaattggtgtatgaagccattgacagtcgggacggggcaagttgcgcagaacttgtatcattcaagcaccctcacgtcgctaacccccgactgcagatggcttcgccagaagagaagtgccagcaggtgctcgaacccccttacgacgagatgtttgccgctcacctccggtgtacctatgccgtcgggaatcatgacttcattgaggcttacaagtgccagactgtgatcgtgcagtacaccagcttccttagggcatttcaagctcacaaggaagagaattgggcactaccggtcatgtacgctgtcgctctagaccttcgagtttttgcaaataacgctgatcagcagctcgttaagaaaggtaaaagcaaggtcggagatatgctggaaaaagccgctgaattgctgatgtcatgtttcagggtgtgcgccagcgatacaagggctggcattgaggatagtaagaagtggggcatgctttttctcgtgaatcagctgttcaaaatttattttaaaatcaacaagctgcatctatgcaagcccctcattagggctattgactcctcgaacctgaaggatgattacagcaccgcacagagggtgacatataagtattacgtaggccgaaaggcgatgttcgactccgactttaaacaggcagaagagtatctaagctttgcttttgaacattgccacaggagcagccagaagaacaaacgtatgattttgatttacttgttgcctgtcaagatgctgctggggcatatgcccacagttgaattactaaagaaataccatctgatgcaattcgcagaggtcaccagggctgtcagcgagggtaatctgttactgttgcatgaggccctggccaagcacgaggcattcttcatcagatgtggcatattcctgatcctcgaaaagctcaaaataattacttatcggaatctgtttaagaaggtttacctcttactcaaaacacaccagctgtcactggacgcatttctggtagccttaaagtttatgcaagtcgaggatgttgatatcgacgaggttcagtgtatcctcgctaatctcatctatatgggtcacgtgaaaggatacatatcccatcaacaccagaaactggtcgtatctaagcagaacccattccccccattgtctaccgtgtgctag

SEQ ID NO: 234190 - DNA, 1200 bp, synthetic construct
  misc_feature 1..1200: note = Description of Artificial Sequence: Synthetic coding sequence
  source 1..1200: mol_type = other DNA
atggcacacatcacaatcaatcagtacctgcagcaggtatacgaagctatcgatagccgtgacggagcaagttgtgccgaactagtttcttttaaacatcctcacgttgcaaatcctcggctgcagatggcatccccagaagagaaatgtcagcaagtccttgagccaccctatgatgaaatgttcgccgctcatctgcggtgcacatacgcagtcgggaaccatgacttcatcgaggcatacaaatgtcaaaccgtaattgtgcaaagctttctccgggcatttcaggcccacaaagaagagaattgggctctgcctgtgatgtatgcagtagccctggacctaagggtgtttgccaacaatgccgatcagcagttagtgaagaaaggcaagagcaaggtgggcgacatgctcgagaaggcagcagagctcctcatgtcatgttttagagtatgtgctagtgacactcgggcaggcatcgaagacagcaaaaagtgggggatgctgttcctggttaatcaattattcaagatttatttcaagatcaataaactacacctatgtaagcccctcatccgagccatagatagttcaaacctgaaagacgactatagtaccgcacagcgagtgacctacaagtattacgtcggcagaaaggcaatgttcgatagcgattttaaacaggcagaggagtacctatccttcgcgttcgagcattgccatcgcagctcccagaagaataagcgtatgatcctaatttatctgctccccgtgaagatgctattgggccatatgcctacagtggagctgctcaagaagtatcatctgatgcagtttgctgaagtcacacgagcggtaagtgaaggcaacttactgcttcttcacgaagccttagctaagcacgaggccttcttcatacgctgcggtatcttcttaattcttgagaaattgaaaatcattacatataggaatctgttcaaaaaggtatacctgctcctgaagacgcatcagttgtcgctggacgcctttcttgtagccctcaagttcatgcaggttgaggacgtggacatcgatgaagttcaatgcatcctcgccaacctgatctatatggggcatgtcaagggctacattagtcatcaacaccaaaaacttgtcgtgagcaagcaaaatccattcccacccctatccacggtgtgttag

SEQ ID NO: 234191 - DNA, 1131 bp, synthetic construct
  misc_feature 1..1131: note = Description of Artificial Sequence: Synthetic coding sequence
  source 1..1131: mol_type = other DNA
atggcccatatcacgattaaccagtacttacagcaggtgtatgaagccatagatagtcgagacggagcgtcttgtgccgagctcgtaagttttaaacatccccacgtggccaatcctagactacagatggcgtcacctgaggaaaagtgtcaacaggtactggagcccccttatgatgagatgtttgcggcacacctcaggtgtacctacgctgtaggcaaccacgactttatcgaagcctataagtgtcagaccgttattgtgcaatatcccttgagcttcatggctgccgtcgcagatcagcagttggtgaagaaggggaagagtaaggtgggcgatatgctcgaaaaggccgctgaactgctgatgtcctgcttcagggtatgtgcttcagacacaagggctggcattgaggactccaaaaagtgggggatgttgttcctagtcaatcaactcttcaaaatctattttaagattaacaaactccacctttgcaagccgctcatccgcgcaattgactcctctaacctgaaggatgattatagcactgctcagcgggtgacatacaagtactacgtcgggagaaaagcgatgtttgacagcgactttaagcaggccgaagaatacctgtccttcgcgtttgagcactgtcacaggtcttcccagaagaacaagaggatgattctgatctacttgctgcccgtgaagatgttgttaggtcacatgccaaccgtcgagctcctgaaaaaataccatctgatgcaatttgccgaggtgacacgtgcagtgtccgagggcaacctgttgctgctccacgaggcgctcgcaaaacacgaggcatttttcattcgttgtggcatcttcttaatcctggagaagctcaagattatcacatataggaatctgttcaaaaaagtatacttactcctgaagacacaccagttaagcctagacgcctttctggtcgcgctgaagttcatgcaggtcgaagacgttgacattgatgaggtgcaatgcatcctcgccaacctcatatatatgggccatgttaaaggatacatcagccaccagcaccagaagctcgtggtgtcaaaacaaaatccttttcccccactctccacagtctgctag

SEQ ID NO: 234192 - DNA, 1200 bp, synthetic construct
  misc_feature 1..1200: note = Description of Artificial Sequence: Synthetic coding sequence
  source 1..1200: mol_type = other DNA
atggctcatatcactatcaatcagtatcttcagcaggtgtacgaagccatcgacagcagagatggtgcatcctgcgccgaattggtctccttcaagcaccctcacgtggcaaatccacggctgcaaatggctagccctgaggagaaatgtcaacaggttctcgagccaccttacgatgagatgtttgctgcccacttgcggtgcacttatgcagtgggcaaccatgacttcattgaggcatacaaatgtcagacagttatcgtgcagtcattcttgcgtgcatttcaagcgcataaagaggaaaactgggcattgcctgtcatgtatgccgtcgccctcgacctgcgggtttttgctaataacgccgatcaacaactagttaaaaagggcaagagcaaagtgggggatatgctcgagaaggctgctgaactgttaatgagctgctttagagtctgcgccagtgatacccgagcaggaattgaagattctaagaagtgggggatgctcttcttggtaaaccaactgttcaagatttatttcaagataaataaattacacctgtgtaagcccctgattagagctatcgactcttctaacctcaaagacgactactctacagcccaacgcgtcacctataaatattacgtagggaggaaggctatgttcgacagcgatttcaagcaagccgaggaatatctgtcgttcgcctttgaacactgccatcggtcatctcagaaaaataaacggatgattttgatatacctgcttcctgtgaaaatgctgctgggccacatgcccacagtcgagctgctcaaaaagtaccacttaatgcagttcgccgaagtgactagagcagtgtcggaaggaaaccttctattgctacatgaagcactggctaagcacgaggctttttttattcgatgcggaattttcttgatcctcgaaaaactcaaaataattacatatcggaatctctttaaaaaggtgtacctcctgttaaagacccaccagctctctttggatgcattcctggtagccctgaagttcatgcaggttgaggacgttgacattgacgaggtgcaatgtattctggctaatcttatttatatggggcatgtgaaaggctatattagtcatcagcaccagaaattagtggtatccaagcaaaacccattccccccactgagtaccgtgtgctag

SEQ ID NO: 234193 - DNA, 1200 bp, synthetic construct
  misc_feature 1..1200: note = Description of Artificial Sequence: Synthetic coding sequence
  source 1..1200: mol_type = other DNA
atggcacatatcactattaaccagtacctgcagcaggtgtacgaagctattgatagcagagacggtgcaagttgtgcagagctcgtgtcctttaagcatcctcacgtggcaaacccccgtctgcagatggcatcccccgaagaaaagtgccaacaggtcctggagcctccctatgacgagatgtttgccgcacacttgagatgcacctatgctgtgggtaatcatgactttatcgaggcttataaatgccaaacggttatcgtgcagtcatttctgagagcttttcaggcgcacaaggaggaaaattgggctttacctgttatgtacgctgtggctctagatctgcgggtgttcgccaataatgctgatcagcagttggtcaaaaagggcaaaagcaaggttggagacatgctggaaaaggccgcagagctgctcatgagttgctttcgtgtgtgtgcatcagataccagagccggaatcgaggacagcaaaaaatgggggatgttattcctggtgaaccaactttttaagatttatttcaaaatcaacaagctgcacctatgcaagccactcattagggccatcgacagctctaacctgaaggacgactacagcaccgctcaaagagttacatataagtactatgtcggcaggaaggcaatgttcgattcagattttaagcaggctgaggagtacctctcattcgcttttgagcactgccacaggagttcacagaaaaacaagcgaatgattttaatatacctgttacctgtgaagatgttattgggccacatgcccacagtggagcttcttaagaagtatcatctgatgcaattcgccgaggttacccgggcagtctctgaaggaaatctgctactgctacatgaagcactcgcgaaacatgaggcgtttttcataagatgcggtatttttcttattttggaaaaattgaaaatcatcacctaccggaacctttttaagaaagtgtacctcctgctgaaaacgcaccagctcagtctggacgcctttttggtggcattgaaatttatgcaagtggaggacgtggatatcgacgaggtccaatgtatcctcgccaatcttatttatatgggccatgttaagggctatatttcacaccagcatcaaaaactcgtagtgagtaaacagaacccgtttccacctctatccactgtttgctag

SEQ ID NO: 234194 - DNA, 1194 bp, synthetic construct
  misc_feature 1..1194: note = Description of Artificial Sequence: Synthetic coding sequence
  source 1..1194: mol_type = other DNA
atgagattaaccgacgttgtccaacagctggtctatgaggccattgactctcgcgatggggcttcttgcgctgaactcgtctccttcaaacatccccatgtggctaatccaaggttacagatggcctcaccagaggagaagtgccagcaagtcctggagcctccatacgacgaaatgttcgctgctcacctccgttgtacttacgctgtgggtaaccacgacttcattgaggcttacaagtgccaaaccgtcatagtccagtccttcttgcgcgctttccaggcccacaaagaggaaaattgggctctgcccgtgatgtacgcggtggccctcgacttgagagtgtttgcgaacaacgcggatcagcagttggtcaaaaaaggcaagtccaaagttggtgacatgctggagaaggctgcagagttattgatgtcgtgttttagagtctgtgcctctgacacccgggcaggcattgaggactcaaaaaagtggggcatgttgtttctggtgaatcagctgttcaaaatatatttcaagatcaacaaattgcacctgtgtaagcctctcattagagcgatcgattcgtccaacctgaaggacgattactccacggctcagagggtcacatacaagtattacgttggcagaaaagccatgttcgattctgattttaagcaggcggaagaatacttatcattcgcctttgagcactgccaccgcagctcccagaagaataaacgaatgatcctgatttatctactgccggtaaaaatgctcctagggcacatgccaacagtggagcttctcaagaagtaccaccttatgcagttcgccgaagtgacgagagcagtaagtgaagggaatctgcttcttctgcacgaggcccttgccaagcacgaggcattttttatccggtgcgggattttcctgattctggaaaagctgaaaatcatcacctaccgaaacctgtttaaaaaagtttatctcctgctgaagacccaccagctgtcactcgatgcctttctcgtggccttgaaatttatgcaggttgaggacgtggacatcgacgaggtgcagtgtatcttagccaatctcatatacatgggtcacgtgaaagggtatatcagccaccagcaccagaagttagtcgtttccaaacagaacccctttcctccactctccacggtgtgttag

SEQ ID NO: 234195 - DNA, 546 bp, synthetic construct
  misc_feature 1..546: note = Description of Artificial Sequence: Synthetic coding sequence
  source 1..546: mol_type = other DNA
atgcctaagggcggtagaaaaggcggtcacaaggggagagctaggcagtacacctcaccggaagagatagatgctcaattacaagcagagaaacagaaggctcgcgaggaggaagaacagaaggaaggaggtgacggggcagcaggcgatccgaagaaagagaagaagagtttggactccgatgaatccgaggacgaggaagatgattaccagcagaaaagaaagggggtggaagggctcattgacattgagaacccaaacagggtggcccagaccactaaaaaggtcacgcagctcgacctggacgggcctaaggagctgagcagacgcgagagagaggaaatcgaaaaacagaaggcgaaggaaaggtatatgaaaatgcatctggcaggcaagacagagcaggctaaggcagatttggccaggttagcaattatcagaaagcaacgggaagaggccgcacgtaaaaaagaagaagagcgaaaggccaaagacgatgcaaccctgtcaggaaagcggatgcagtcactatccctgaacaaatag

SEQ ID NO: 234196 - DNA, 1026 bp, synthetic construct
  misc_feature 1..1026: note = Description of Artificial Sequence: Synthetic coding sequence
  source 1..1026: mol_type = other DNA
atggtgtccagccagccgaagtacgatctaattcgagaggtgggtcgcggaagctacggcgtagtttacgaggccgtgattcgaaaaactagcgcacgcgtcgccgttaaaaagattcgctgccatgcgccagaaaacgtagaactggctctgcgagaattttgggcccttagctccatcaaatcccagcatcccaacgtgatccatctcgaggagtgcatactacagaaagatggcatggtgcagaaaatgtctcatggcagtaactcgagcttgtatctccagctggtggagactagcctgaagggtgaaatcgccttcgacccacgatccgcgtactatctgtggtttgtgatggacttctgtgacggaggggacatgaacgagtacttgctgtcaagaaaacccaatagaaagaccaatacaagcttcatgttgcagctatcttccgccttggctttcctgcataagaaccaaatcatacaccgcgatctgaagccggacaatatactgatctctcagacccgcctggatacctctgacttagagccgacccttaaggtggctgacttcggtctgagcaaagtctgctcagcctccggccaaaacccagaggagcctgttagcgtaaataagtgtttcctaagcactgcatgcgggaccgacttctacatggcacccgaagtgtgggagggccactatacagcaaaggcggacattttcgcactaggcatcattatctgggccatgttggaaagaataacatttattgacaccgaaacaaagaaagaactccttggctcctatgtgaaacaaggtactgagattgtcccggtgggtgaggccttgctagaaaaccccaagatggagctccttattccggtgaagaaaaaaagcatgaacggcaggatgaagcaactgattaaagaaatgcttgccgcaaacccacaggaccgacctgacgcatttgagctcgaattacgcctagtccagatcgctttcaaggactcctcctgggaaacatag

SEQ ID NO: 234197 - DNA, 1026 bp, synthetic construct
  misc_feature 1..1026: note = Description of Artificial Sequence: Synthetic coding sequence
  source 1..1026: mol_type = other DNA
atggtgtccagtcagcccaagtacgatttgatcagagaagtgggcaggggttcgtacggtgtggtctacgaggccgtcattcgcaaaacctccgcacgagtggctgtgaagaagattcggtgtcacgctcctgagaatgtcgagttagccctcagagaattttgggccctttcttctatcaagtcccagcaccccaacgttatccacctggaggagtgcatcctgcagaaggacggaatggtgcaaaagatgagtcacggatccaactcatctctctatctccagctggtagaaaccagcttaaaaggagaaatagctttcgatcctcgctctgcctattatctttggtttgtgatggacttctgcgatggtggtgacatgaatgagtacttactttcacgtaaaccaaaccgcaagacaaatacctccttcatgcttcaattgtcatctgcacttgccttcctacataaaaaccagattattcatcgagatctcaagccagacaatattcttattagccagacccgactggatacgtcggatctagaaccaacattaaaagtcgctgattttggactatctaaagtgtgctctgcttctggtcagaatcctgaggaacctgtcagcgtcaacaaatgtttcctttctaccgcctgtggtacagacttctatatggcaccggaggtctgggagggtcactacaccgccaaagccgacatcttcgcgctgggcattattatttgggcaatgcttgagaggatcacctttattgacaccgagaccaagaaagagttgctgggtagctacgtgaagcaagggactgagatagtgcccgtcggagaggccttgctggaaaacccaaagatggaactcctgatacccgttaagaaaaaaagcatgaacggaagaatgaagcaacttatcaaggagatgcttgcagcaaatcctcaagaccggcctgatgcctttgagctggagctgagacttgtccagatagctttcaaagatagttcatgggaaacatag

SEQ ID NO: 234198 - DNA, 576 bp, synthetic construct
  misc_feature 1..576: note = Description of Artificial Sequence: Synthetic coding sequence
  source 1..576: mol_type = other DNA
atggtctcttcgcagccaaagtacgacctaatccgagaggtaggacgcggttcctacggcgtggtgtacgaagctgtgattcgcaagacatcggctcgagtggccgtgaaaaaaattcggtgtcacgccccagaaaatgtggaactggccttaagggaattttgggccctgagctccatcaagagccaacaccccaatgtgatccatttggaggagtgcatactgcagaaagatggtatggtgcagaagatgtcgcatggctctaattcatccctatatctacagttggttgaaactagcctcaagggcgaaattgcgtttgaccctaggtccgcgtattacttgtggttcgtcatggatttctgcgacggaggagacatgaacgagtacctcctgtctagaaaaccaaatagaaagactaacacaagttttatgctccaactctcctccgctcttgccttcctgcacaagaatcagataattcaccgagacctcaagcctgacaacattttgatttcgcagacacgattggacactagtgatctggaacccaccctcaaagtggcggatttttag

SEQ ID NO: 234199 - DNA, 4014 bp, synthetic construct
  misc_feature 1..4014: note = Description of Artificial Sequence: Synthetic coding sequence
  source 1..4014: mol_type = other DNA
atggattttaccgctcagcccaaaccagctacagcattgtgtggggtcgtcagcgccgacgggaagatcgcatatcctcccggagtcaaggagatcacagataagatcaccaccgatgagatgattaagagattaaaaatggtagtcaagacgttcatggacatggatcaagactctgaggacgagaaacagcagtacctgcctcttgcgctgcatctcgcaagcgaattcttcttgagaaacccaaataaggacgtccgattgctggttgcttgctgtctcgcggatatattccgtatctacgcccctgaagccccttacaccagtcacgacaaactcaaagacatattcttgttcatcaccaggcagctgaaagggttggaagatactaaaagcccccaattcaaccgatatttctatctcctagagaacctggcatgggtgaagtcctataacatttgcttcgagttggaggactgcaatgaaatcttcattcagctgttccgcactcttttcagtgtcatcaacaattctcataacaagaaggtgcagatgcacatgttggacctgatgagcagtatcatcatggagggcgatggcgtgacacaggagttgctggactcaatactgattaacctgattcctgcccacaaaaacctcaataaacagtctttcgacttggctaaggtgttgttaaaaagaaccgtacagactatcgaggcttgcattgccaattttttcaatcaggtactcgtcttaggccgatcaagtgtgagcgatctgagcgagcacgttttcgacttgatccaggaactgtttgcaattgacccccacctgctcctttccgttatgccacaattggagttcaaactcaaatcgaatgacggagaagagaggctggctgttgtgaggctcctagcaaaacttttcggtagcaaggactcggacctggcaacccagaatagaccactttggcagtgttttctgggaagattcaacgatattcacgtcccagtgcgactagaatcagtgaaattcgcgtcccattgccttatgaatcaccccgatctggccaaggatctaacagagtacctgaaggtgagatcccatgacccggaggaggctatccgacatgacgttatcgttactatcattacagcggctaagcgggacctcgccctggtgaatgaccaactgttaggattcgtccgtgagagaacactggataaacggtggagggtgcgtaaggaagccatgatgggcctcgctcagttgtacaagaagtactgcctgcatggagaagccggtaaggaggctgccgagaaggtgagctggattaaagacaagctgctgcacatttattatcagaatagcatcgatgacaagttgctggtggagaaaatcttcgctcagtacctggtgccccacaacctagaaacagaggagcgaatgaagtgtctgtactatttgtacgctagccttgacccaaacgcggtcaaagccctgaatgagatgtggaaatgccagaacatgcttagatcccacgtgagggagctcctggacctgcataaacaacccacatctgaggcaaactgctcagccatgtttggtaagctgatgacgatcgcaaagaatttgcccgatccgggtaaagctcaagactttgtgaagaagtttaatcaagtgttaggggatgacgagaagcttagatcccagctagaacttcttatcagccctacatgctcttgtaagcaggcagacatctgcgtgcgcgagatcgcaagaaaactggccaaccctaagcagcctaccaatcctttcctggagatggtcaaatttctgttagagcggatcgcccctgtgcatatcgattcagaggcgatctcagctctagttaagctcatgaacaagtccattgaaggcactgcagacgacgaggaggagggcgtcagtcctgacaccgccatcagaagtggcctcgaactgctcaaggtgcttagcttcactcacccgacaagttttcactcagctgaaacatacgagagcctcttacagtgtttgcgaatggaggacgataaagttgcagaagctgccatccagatatttcggaataccggacataaaatcgagaccgacctgccgcaaatccgatccactctcattccaattctacatcaaaaggcaaagagaggcacgcctcatcaggctaaacaagcagtccactgcatccacgcgatttttaccaacaaagaggttcagctcgcccagattttcgaacctctctcacgaagtcttaacgccgacgtacccgaacaactgattacccctctggtttcgttgggacatatctctatgctggcccctgatcagtttgcttctccaatgaaatccgtggtcgccaacttcatagtcaaggatcttttgatgaacgacagaagcacaggggaaaaaaacggcaaactgtggtcaccagacgaggaggtcagcccagaggtgctggccaaagtacaggctatcaagctgcttgtgcggtggcttcttgggatgaagaacaaccagtcaaaaagcgccaattcaacactgagacttctctcggcaatgctggtgtcagagggagacctcactgagcagaagcgaatctcgaaaagcgatatgtctcggctgcgccttgctgccggaagcgcgatcatgaagctggcacaagagccttgctatcatgaaatcattaccccagagcagttccagctgtgcgcgctggtgatcaacgacgaatgctatcaggtgaggcagatctttgctcagaaactgcacaaggctctcgtgaagctgctcttgccactggaatatatggcaattttcgctttgtgcgcaaaagaccccgtcaaagaaaggagggcccacgcgcgtcagtgcctgttgaaaaatatttctatacgaagggagtatattaagcagaaccctatggcaaccgagaagctattgtcacttctccctgagtacgtagtgccctacatgattcacctgctggcgcatgatccagacttcaccaggtctcaggacgtcgaccagcttcgggacattaaggagtgcctatggttcatgctggaggttttgatgaccaagaacgagaacaatagccatgcttttatgaagaaaatggctgaaaacattaaattgaccagagacgctcagtcccccgacgagagcaagacgaatgagaagctgtacacagtgtgcgacgttgctctgtgcgtgattaacagcaagagtgcactctgcaatgccgactccccaaaggatccggttctcccaatgaaattttttacccagccagagaaagacttctgtaacgacaagagctacatctccgaagagacgagggtgctcctcttgacgggcaagcctaagcccgctggagttctgggagctgttaacaagcccctctccgcgacaggcaggaagccgtacgtccggagcacaggaaccgagactggcagcaacatcaatgtcaattccgagctcaacccctctactggaaacaggtccagagagcagagtagtgaggccgctgaaactggggtgagcgaaaatgaggagaacccagtccggatcataagtgtgaccccagtgaaaaatattgatcccgttaaaaataaggagataaacagtgaccaggcaacacaggggaatatctcctctgaccgtgggaaaaaacgcacagttacagccgctggggcagagaatattcagcagaagactgacgaaaaagtggatgagagcgggccacccgctccctccaaaccacgcaggggaagaagacccaaatcggaaagccagggaaatgcgacaaaaaacgatgatctgaacaagcctataaacaaaggtcgtaagagagcagccgtggggcaagagtcacctgggggattggaagctggtaatgccaaagcccctaaacttcaggatctggccaagaaggccgctccagccgagcggcaaattgacctgcagaggtag

SEQ ID NO: 234200 - DNA, 1803 bp, synthetic construct
  misc_feature 1..1803: note = Description of Artificial Sequence: Synthetic coding sequence
  source 1..1803: mol_type = other DNA
atggactttacagctcaacctaaacccgctaccgctttgtgcggagtcgtgagtgctgacggaaagatagcataccctcctggggtcaaggagattaccgacaaaataactacagacgagatgattaaacggcttaagatggtcgttaagacttttatggacatggaccaagactcagaggatgagaagcagcaatatctgcccctggcgcttcatctggcttcagagttttttctgcgcaacccaaacaaggacgtgcggctgttagtggcctgctgtcttgcagacatttttaggatctacgcccctgaggctccctacacttctcatgacaagctgaaggacatcttcctgttcatcacacggcagctgaaaggcctcgaggatactaaatctccccagttcaacagatatttctatttattggaaaacttagcctgggtgaaaagctataacatctgctttgaactggaggattgcaacgaaatattcattcagctattccggaccctctttagcgttatcaataattcacataataagaaggtacagatgcacatgttggacctgatgtccagtatcataatggagggtgacggggtaacccaggaactgctcgactccattttgattaacttgatcccggctcacaaaaacctaaataaacagagcttcgatctggctaaagtcttgctgaagagaaccgtacaaacaattgaagcctgtatagcaaactttttcaaccaagtgcttgtgctgggaaggagtagtgtgagcgacttaagtgaacacgtcttcgacctgatacaggagctgttcgccattgatcctcacctgcttctttccgtcatgccacagctggagtttaaactcaagagtaatgacggcgaggagcgcctagccgtggtcagactgctggctaagctatttggatccaaggactcagatctagccacacaaaatcgccctctgtggcagtgtttccttggcagattcaatgacattcatgtccccgtgagactcgaaagtgtcaaattcgctagtcactgcttgatgaaccatcctgatctcgctaaagatttgaccgagtatttgaaagttagaagccacgacccagaagaagctattcggcacgatgtgattgtgactattattaccgccgcaaagcgagacctggccctggtgaacgatcagctgctgggctttgtgcgagaacgtactctggacaaacggtggcgtgtgaggaaggaggctatgatgggtttggctcagctctataagaaatactgtctgcatggagaggctggaaaggaggctgcggaaaaggtgtcatggatcaaagataagctcctgcacatatattatcagaatagcattgacgataaactgttggtggagaaaattttcgcgcagtatcttgtccctcataatctcgaaacagaggaaagaatgaagtgtctgtattacctctacgcttcccttgacccgaatgcagtgaaagcactgaatgaaatgtggaagtgtcagaacatgctcagatctcatgttagggagctgctcgacttacataaacagcccacatccgaagctaattgttccgccatgtttgggaagctgatgactatcgccaaaaacctgcctgatccaggaaaggcccaggatttcgttaaaaagtttaatcaagtactcggagacgacgaaaaactccggtcacagctcgaactgctgatcagtccaacttgttcttgtaaacaggcagacatctgcgtagtgtcaaagagttactttactctgttcctgtag

SEQ ID NO: 234201 - DNA, 990 bp, synthetic construct
  misc_feature 1..990: note = Description of Artificial Sequence: Synthetic coding sequence
  source 1..990: mol_type = other DNA
atgacaacacagcagattgatctccagggccctggcccatggggtttcagactggttgggggaaaggactttgagcagccactggctatttctcgcgtcacaccagggtccaaagctgcactcgccaacctctgcattggcgatgtcatcaccgccatagacggggagaatacatccaatatgacccatctggaagcgcaaaacaggattaaagggtgtactgataacctgaccttaacagtggcaaggagtgagcacaaggtgtggtctcctctggtgactgaggaggggaaaaggcatccttacaagatgaatcttgcctctgagcctcaggaagtgctacatatcgggtccgcgcataatagatcggctatgccttttacggccagtcccgcatccagcactacagccagagtaattacgaaccagtacaataatcctgccggactttatagctcagagaatatctcaaacttcaacaatgcactggaatcaaagactgctgcgtccggtgtcgaggccaatagtaggcccctggaccatgctcagcctccttcgtcactcgttatcgataaggagtcagaggtatacaagatgctgcaagagaagcaggaacttaacgagcctccaaagcaaagtaccagctttctggtactgcaggaaattctggaatctgaggagaagggggaccccaacaagccctccgggtttcgaagtgtcaaggcacccgtgacgaaggttgcagcttctatcgggaatgctcagaagctcccaatgtgcgacaagtgcgggacagggattgtgggtgtgtttgtgaagctgagagaccgccacagacacccggagtgctacgtgtgtacagattgcggcaccaatttgaagcaaaaaggccacttttttgtcgaggaccagatctactgtgaaaagcacgcgagagagagagtcacccctcccgagggctatgaggtcgtcaccgtatttccaaaatag

SEQ ID NO: 234202 - DNA, 1101 bp, synthetic construct
  misc_feature 1..1101: note = Description of Artificial Sequence: Synthetic coding sequence
  source 1..1101: mol_type = other DNA
atggcactcactgtagacgtagccggtcctgcaccctgggggtttaggattacaggcggacgcgactttcatactccaatcatggtgactaaggtggcagagcgagggaaagccaaggacgcagacctgaggccaggcgacattatcgtggcgatcaacggcgagtcagccgagggcatgttgcacgcagaagcccagtctaagattcgccaatcacccagccctctcaggctgcagctcgataggagccaggccacctctcctggccagacaaacggcgactcaagtctggaggtcctggcgacccgctttcagggctctgttcgcacatacacagaaagtcagtctagcctccggagttcctactcctcacctacttccttgtcacccagggctggatctccattcagcccacccccaagcagttctagcctcacaggtgaagccgcaatctctcgatcttttcagagcttggcttgttcccctgggctgcctgcagcagatcggctctcttattctggtcgcccaggcagcaggcaggctggtctgggccgtgccggagattcagctgtgttggtgttgcctccctctcccggacctcggtctagccgcccttctatggatagtgaaggcggatcgttgctgttggacgaggactccgaggtgtttaagatgctccaagaaaaccgggagggacgcgcagcacccaggcagtcttcttcgttcagactgctgcaagaagccctggaagcagaagagagaggaggaactcctgcgttcctcccatcttcattatctcctcagtcctccctgccagcgtctcgcgcactcgccacaccgcctaaattacatacgtgtgagaagtgcagcacatccatcgctaatcaggccgtcaggattcaagaaggaaggtatcgtcacccgggatgttacacatgcgctgactgcggattgaatctcaaaatgcggggacacttttgggaggacgcttgcgctatggaaggcatgcggctgtcacttgaggcactggaaggcatggtagagggcgctaaacgccgagataggaggaaaacaagacgaccgatccagccttcatggtag

SEQ ID NO: 234203 - DNA, 1809 bp, synthetic construct
  misc_feature 1..1809: note = Description of Artificial Sequence: Synthetic coding sequence
  source 1..1809: mol_type = other DNA
atgcgaggcggtcgggctcgccctgcttgggagagctttatgggcctgccccctcgctcatccgccaagtggggggctggccaatcgctagatcgcctatgttgtgcaccagggtcccgaggcttagcgggtgctccagggagaatgcgcgcaccacccgctggacgctcacagccggctgggggaccgggagattccttgcctcatccaccgggtgggctcgggccagggggaagtgcttgggccagacgggcagaagccgctgcgtccagggctagaggagggggtcggggtgggccaggtattacttgggcagaagcgggacctggcgcacccggaggtctgtcgccagagtccgggaggcgccaaagagaaaggtggcgcctgccagcttttcccccatctcgagcctgggctccaagcaggacgggagagcgccaaccgggtgagcgcgcacacctgagactgtctgcaagaccggctctgcccggagccggactgctcagcgccccattgtctgctcgtaatcccggactggtacggggacccgctccctggtccttggccagtgctggcgctccccctagagctgccctgtcccccgctggagcacttcttctccagcccccagcccgtcgtgtcttgtgccccaggagtgaaggagggtcgagaacaggccgagccggtccatcagggtgggctccgccacgaggagctcgctccgccgagtccactgatagactgaagggaatggccttaacagtggacgtggcagggccagctccttgggggttcaggattacaggcggacgcgactttcacaccccaatcatggtgaccaaggtggctgagcggggaaaagcaaaggatgctgacctgaggccaggagacatcatagtggcgataaatggtgagagcgccgaaggcatgctacatgcagaagcccagagtaagattcggcagtccccctcacctctgcggttgcagctggacagatcacaagccacttctcccggacagactaatggggattcgagcctagaagtacttgctaccaggttccaaggaagcgtccgaacttacaccgagtcccagagcagcttgcggagcagttacagctcccccacctccctgtctcctcgcgctggttcaccttttagtcctccacccagctccagttctttgaccggcgaggcggctattagtcggagctttcagtccctagcctgcagtccgggactgcccgcagccgaccggctctcttactctgggcgaccgggttccagacaagccggactcgggagagctggtgacagtgctgtgctcgtgctgccaccctctcccggacccaggtcctcccggccaagcatggactcagagggaggttctctcctgttggatgaggatagtgaagtctttaaaatgctgcaggagaaccgcgaaggcagggccgcacctcggcagagttcatctttcagattgctccaagaggcgctggaggccgaggagagggggggaaccccggcatttttgccttccagcctgtccccacagtcttccctgcctgctagcagagctctggccactccaccaaagctgcacacctgtgaaaaatgttctacttcaatcgccaatcaggcagttcggatccaggagggtaggtaccgacaccctggctgttatacatgtgctgactgcggcttgaacttgaaaatgagagggcatttctgggtgggggatgagctttactgcgaaaagcacgcaagacaacgctattctgcacccgctacactcagcagccgggcttag

SEQ ID NO: 234204 - DNA, 837 bp, synthetic construct
  misc_feature 1..837: note = Description of Artificial Sequence: Synthetic coding sequence
  source 1..837: mol_type = other DNA
atggcactcactgtggatgtagctgggccagccccatggggcttccgtattaccggtggcagggatttccacaccccgatcatggtgaccaaagttgcagagagggggaaggcaaaagatgctgatttaagacccggagacatcatcgtggctattaacggtgaaagtgctgaagggatgcttcacgcagaagcgcaatcaaagattaggcaaagccctagcccactgcgcctccagctcgatagatcccaggcgaccagtccgggacagacaaacggtgacagcagcctcgaagtcttagccacaaggttccaaggcagcgtcagaacctacaccgaaagccagagctccctgcgttcaagttattccagccctacatctctgtcccccagagccggaagccccttctccccccctccttcaagtagctccttaacaggagaggccgctatttcgcggtccttccaaagtctcgcctgttcgcctggtctgcccgctgcggaccggctcagctacagcggccgacctggctcaagacaagccggacttggtcgagcaggggactccgctgtgctggtgttacccccaagtcccggacccagatctagtcgcccatccatggactctgaaggaggcagccttctgctggatgaggattcggaggtcttcaagatgctacaggagaatcgggagggtagggctgccccacggcagtcctcatcatttaggcttttacaggaagcattagaggcggaagagagagggaccagactttgtgcttccagacgagccggaacagctacccccgctgccacaccggttcccacagtggggtag

SEQ ID NO: 234205 - DNA, 675 bp, synthetic construct
  misc_feature 1..675: note = Description of Artificial Sequence: Synthetic coding sequence
  source 1..675: mol_type = other DNA
atggcgctgacagtagacgtggctgggccagccccatggggatttagaataacagggggtagagactttcatacccctatcatggtgactaaggtcgctgagcgcggaaaggcaaaggatgctgatctgcgccctggcgacattatcgtagccattaacggggagagtgccgagggcatgctacatgcagaggcacagtccaagattcggcagtctcctagccctctgcgtctccagctcgaccggagccaggccaccagccctggacagaccaatggagactcctcactcgaagtcttagctacgagattccaaggatcggtccggacctatacagagtctcagagttcgttgcggagctcgtactctagccctactagcctgtcccccagagccggtagtccctttagcccaccaccctcctcatctagtcttaccggggaggccgctatttctaggtcgcgcccacgcccacgttggcgattgggcggagccggagccgctgccttccctggaccatcgtttcttcaagctcagcacgggcttggtagaggaaagcctccccctggacgaggtcttggtagcctccaagatgctgccggaaagtctcggggaactggtgggccacccaccgtgcagctgttaagcgccctggccggatcgcccggaggctag

SEQ ID NO: 234206 - DNA, 1059 bp, synthetic construct
  misc_feature 1..1059: note = Description of Artificial Sequence: Synthetic coding sequence
  source 1..1059: mol_type = other DNA
atggctctcactgtagacgtagctgggcctgcaccatgggggtttcgaatcactgggggtcgcgattttcatactccaataatggtgaccaaagtggctgagagagggaaggccaaggatgcggacctgcggccaggagatatcatcgtggccatcaacggtgaatccgccgaaggcatgctccacgctgaggctcagtccaagattcgtcaatcacccagcccattaaggctccagctagatagatcgcaggctactagccccggacagactaatggagactcaagcttagaagtccttgcaacacgctttcaggggagcgtccgaacatacaccgaatcccagtcttcactgagatcctcttactccagccctacgagtctttcaccccgagccggttcccccttttcacctcctccatcttcctcttcccttactggtgaggcagctatcagtcgatcattccagtcgcttgcatgctcaccaggactccctgccgcagacagactgtcatactctggacggccaggatcaagacaggctgggctgggccgagcaggcgactccgccgtgttagtactcccccctagcccaggcccacgttcatctaggcccagcatggatagcgaagggggatctctgctgctagacgaagactcagaggtctttaaaatgctccaagaaaatcgagagggcagagcagccccacgacagagttcctcctttcgcctgctgcaggaagctctggaggcggaggaacgcggtggaacacccgcttttctcccctccagtctcagcccccagtccagccttccagcttctcgcgctctggccactccgccaaagctgcatacttgtgaaaagtgttctacgtcaattgcaaatcaggccgtaaggattcaggaggggaggtataggcatcccggatgctacacatgcgccgactgtggcctcaatctgaagatgaggggacacttctgggtgggagacgagctttactgtgagaagcacgctcgtcagcgatactccgcccctgcaaccctctcttcgagagcttag

SEQ ID NO: 234207 - DNA, 1059 bp, synthetic construct
  misc_feature 1..1059: note = Description of Artificial Sequence: Synthetic coding sequence
  source 1..1059: mol_type = other DNA
atggccctgacagtcgatgtcgcgggaccagcaccgtggggcttccggattactggtggtagggactttcacacacccataatggtgactaaagtggccgagcggggaaaggctaaggacgctgatctgaggcccggagatatcatcgtggcaatcaacggggaaagcgctgagggaatgcttcatgccgaagcgcagtccaagatcagacaatcgccctcacccctcagactgcagctagatcgcagccaggcgaccagcccaggtcagacaaatggagacagttctctcgaagtgctggccactcggtttcaagggtcagtccgaacctacacagaaagccagtcctcattgcggagtagctactcttcccctacatccctttcacccagggcgggtagtccgttctctccccctcctagcagcagcagcttgactggtgaggctgccatctctaggagcttccagtcactggcttgttcacccggtctgcccgctgcagaccgcttgtcctattctggcaggccaggatcccgccaggccggtctgggtcgggctggcgacagcgctgtcttggtgttacctccatctcctggtccaaggagcagccggccatcaatggactcagaaggcggttcattacttctggacgaagatagcgaggtgttcaaaatgttgcaggagaacagagaaggcagggcagccccacggcagtcatcctccttcagattactccaggaagcgttggaggccgaggagcgcggtggtacgcccgcatttctcccaagctccctgagccctcaaagctccctccctgccagtagagcactggctacccctcccaagctgcacacctgcgaaaaatgtagtactagtatagccaaccaggccgtccggattcaggagggaagatatcgacatcccggatgctatacttgtgccgactgcgggctgaacctcaagatgaggggccacttttgggtaggcgatgagttgtactgtgagaaacatgccagacaacgatacagcgcacccgcaactctttccagccgcgcttag

SEQ ID NO: 234208 - DNA, 837 bp, synthetic construct
  misc_feature 1..837: note = Description of Artificial Sequence: Synthetic coding sequence
  source 1..837: mol_type = other DNA
atggccctcaccgtggatgtagcaggacctgccccatggggatttagaataacaggcggacgggactttcatacaccaatcatggtgaccaaggtggcagaacggggtaaagcaaaagatgcagacctcagacctggagacatcatcgtggctatcaacggtgaatccgccgagggtatgttgcatgcagaggcccagtccaagattcgacagtcaccttcgcccctccgactgcagcttgatcgctcacaagccacctcgcccggtcagacaaacggagactcttcccttgaggtgctggccaccaggttccaggggtctgtaaggacctataccgagtcacagtcttcactgaggtcctcatattctagccccacttctttatcccctagagctggctcccccttctctccaccaccatcttcctcatcgctgactggggaggccgcaattagcaggtccttccaatctcttgcttgctctcctggcctgcctgctgcggaccgcctgtcctattctgggagacctggttctaggcaggccggtttgggtcgggctggcgacagcgctgtcctagttctgccaccttccccaggacctcgttcatcaaggccaagcatggatagcgagggaggaagcctgcttttggatgaagattccgaagtgttcaaaatgctccaggagaaccgagaaggccgagctgccccacgacagtctagtagcttcaggcttctacaggaggcactggaggccgaagagagaggcacccgcctttgcgctagtaggcgcgcagggactgccacacccgcagccacccccgtgccgacagtggggtag

SEQ ID NO: 234209 - DNA, 1059 bp, synthetic construct
  misc_feature 1..1059: note = Description of Artificial Sequence: Synthetic coding sequence
  source 1..1059: mol_type = other DNA
atggctctgacggtcgacgtcgctggcccagctccttggggcttccgaattaccggcggtagggactttcacaccccaatcatggtgaccaaggtggccgagagagggaaggccaaggacgccgatctgcgcccaggggacatcattgtggctattaacggcgagtcagcagaaggcatgcttcatgcagaagctcagtccaagatccgccagtcaccatcaccacttcgcctgcagctggaccgatcccaggccactagtccagggcaaactaacggggatagctctctagaggttttggccacccgtttccagggtagtgtacgaacttacacagaaagtcagtcgtccctccgatcctcctatagctctccaacgtctctgagtcctcgcgctggatccccgttcagcccaccacccagcagttcttcacttacaggcgaagccgctatttcaaggtcctttcagagcttggcatgttcacccggactccccgctgcagatcggctctcctacagcggcagacctggaagccgacaggcaggccttgggagagctggagacagtgctgtgcttgtgctacccccatcccctggacctcgttccagcaggccatccatggattctgagggcggtagcctgcttctcgacgaggactccgaggtgttcaagatgctgcaagagaatagggaaggaagagccgcacccagacagtcctcctctttcagactgctccaggaggcgctggaggcagaggaaaggggaggcacaccagcttttctgccatcttcactgtctccccagtccagcctccccgcatcacgggctttggcgactccacctaagctccatacttgtgaaaaatgtagtacatcaatcgcaaaccaagcagttcggattcaagaggggaggtacaggcaccctggatgttatacctgcgcggactgtgggctgaatctgaaaatgagggggcacttctgggtgggtgatgagctgtactgcgagaaacacgcacgacagaggtactctgccccagctactctgagctcaagggcctag

SEQ ID NO: 234210 - DNA, 1560 bp, synthetic construct
  misc_feature 1..1560: note = Description of Artificial Sequence: Synthetic coding sequence
  source 1..1560: mol_type = other DNA
atgacttccaccttcaaccctagagagtgcaagcttagcaaacaagaggggcagaactacggcttctttttaagaatcgagaaggatacggagggacacctggtccgggtggtcgagaaatgtagccctgccgagaaggcagggctgcaggacggggatcgcgtgctcagaattaacggcgtcttcgtggataaggaggagcacatgcaggtcgttgacctcgtcagaaagtctggaaattctgtcactttgctcgtcttggacggcgactcctacgagaaggccgtgaaaacacgcgtcgacctgaaagaactcggccaatctcaaaaagagcaggggctgagtgataatattctgagtcccgtgatgaacggcggagtgcagacttggacccagcccaggctgtgttacctcgtgaaggaggggggatcatacggctttagcttgaaaactgttcagggcaagaaaggagtttacatgactgatatcacccctcagggtgttgcaatgcgggctggggtgttggccgacgaccacctcattgaggtaaacggggagaatgtggaagatgcctctcacgaagaagtggtcgagaaggttaaaaaatccgggtcacgggtgatgttcctgctggtagacaaggaaaccgataaacgccatgttgagcagaagattcagtttaagcgggaaaccgcctcactcaagttactaccacaccagccacgcatcgttgagatgaaaaaggggtcgaatggatacggattctacctccgggctggctcagagcagaagggtcaaatcatcaaagacattgattcaggatcaccagcagaggaggcaggtctgaagaacaacgacttggtagtcgccgttaatggcgagtcagtcgagacactggaccatgattcagtagtcgaaatgatcagaaaaggaggagatcaaacttctcttctcgttgtggacaaagaaacagacaatatgtaccgactggcccactttagcccttttctgtattatcaaagccaggaactccctaacggcagcgtgaaggaggctcccgcaccaacccctacttcgctagaagtgtcatcaccccctgacacaaccgaagaggttgaccacaagccaaagctctgcagactcgctaaaggcgagaatggatatggctttcatctgaacgctattaggggcttgccaggaagttttattaaagaagtccagaaggggggtcctgccgacctggctggattggaggatgaggacgtcattatagaagtcaatggagttaacgttctcgacgagccctacgaaaaggtcgtcgacagaatccagagtagcgggaagaatgtgacgctgctggtttgcggaaagaaggcttacgactacttccaggccaagaaaatccctatagtgtcctctctggccgatccactggatacgcccccagattctaaagaggggatcgtggtcgagtcaaatcacgattcacacatggctaaggaaagggctcactctactgcaagtcactctagcagcaactctgaggacacagagatgtag

SEQ ID NO: 234211 - DNA, 1560 bp, synthetic construct
  misc_feature 1..1560: note = Description of Artificial Sequence: Synthetic coding sequence
  source 1..1560: mol_type = other DNA
atgacttcaactttcaaccctagagaatgtaagctgtccaagcaggaaggtcaaaactacgggttctttctccgcatcgagaaagataccgagggccatcttgtgcgcgtcgtggaaaagtgttcccccgctgaaaaggccggacttcaagatggagaccgtgtgttgaggattaacggggtgttcgtggacaaggaagagcacatgcaggtcgtggatcttgtgcgaaaatccggcaactccgtcacactcctggtcctcgacggagattcctatgagaaggcagtgaaaacgagggtcgatcttaaagagctggggcagtctcagaaggaacagggtctaagtgacaacattctgagccccgtgatgaatggtggggtgcagacgtggactcaaccacggctttgctaccttgtaaaggaaggaggttcttatggctttagcctgaagaccgttcagggtaaaaagggcgtgtatatgacagacattacccctcagggagttgccatgagagccggtgtgctcgctgacgaccatctgatagaagtgaatggggaaaacgtggaggacgcttcccatgaggaagtggttgaaaaagtcaagaaatctgggagtagggtcatgttcctgttggtggacaaggaaaccgacaagagacatgtcgagcagaagattcagttcaaacgggagactgcctccctcaagctactgccgcatcagccacggatcgtggagatgaagaagggtagcaacggatacgggttctacttacgtgcaggcagcgagcagaaaggccagattattaaagatattgactcaggaagccccgctgaggaagctggcctcaagaataacgacctggtggtcgctgttaacggggagtccgtggagacattggaccacgattctgtagtcgagatgatcagaaagggtggtgatcagacctccctgttggtggtcgataaagagactgataatatgtaccgtctcgcccatttcagcccatttctgtactatcagagtcaggagctgccaaatgggagcgtgaaagaagcaccagcacctacaccaactagcctggaagtctcttctcctccagatacgacagaggaggtggatcataagcccaaactgtgtcggctggccaagggcgagaacgggtacggtttccatttgaacgccatcagggggcttcctgggtcatttatcaaagaagtccagaagggcggacccgcagatctggcaggacttgaggatgaagacgtaattattgaggttaacggagtcaacgttctggatgaaccctacgaaaaagtggtagacaggattcaaagctcggggaagaatgtcacacttctagtgtgcggaaagaaggcctacgattactttcaggccaaaaagataccaatcgtgtcatctctggccgacccattagacactccccctgactccaaggagggtatagtcgtagaatctaatcacgacagtcacatggccaaggagcgggctcactcaacagcaagccattcctcaagcaactccgaggatacagagatgtag

SEQ ID NO: 234212 - DNA, 795 bp, synthetic construct
  misc_feature 1..795: note = Description of Artificial Sequence: Synthetic coding sequence
  source 1..795: mol_type = other DNA
atgacctcaacttttaacccaagggagtgtaagctcagcaaacaggagggccagaattatggcttctttctgcggatcgagaaagataccgagggccacctggtgcgtgtcgtcgagaaatgctcaccagctgagaaggccggactccaagacggcgatcgtgttttgcgcattaacggagtttttgttgacaaggaggaacacatgcaggttgtagacttagtgcgcaagtccggaaacagtgtcaccctgctcgttctggatggagactcttatgagaaagctgtcaagactcgtgtggatctgaaggagctgggccagtctcaaaaagaacagggtctctccgataatattctgagtccggtcatgaatggaggggttcaaacgtggacccaaccgcgtttgtgctacctagtaaaggagggaggttcatacggatttagtttaaaaaccgtgcaagggaagaaaggcgtttacatgactgacatcacgccccagggcgttgccatgcgcgctggcgttctcgccgatgaccatctcatcgaagtgaacggggaaaatgtcgaggacgcatctcacgaggaagtcgtggagaaggtgaaaaagtccggatcacgtgtaatgttcttgctcgttgataaagagaccgataagaggcacgttgaacagaaaatccagttcaagcgcgaaaccgcctccctcaaactccttccccatcagcctcggattgtggagatgaagaagggatcaaacggttatggcttttatctcagagccggaagtgagcagaaatag

SEQ ID NO: 234213 - DNA, 1227 bp, synthetic construct
  misc_feature 1..1227: note = Description of Artificial Sequence: Synthetic coding sequence
  source 1..1227: mol_type = other DNA
atgacatcaaccttcaaccctagagaatgcaaactctcgaaacaggaagggcagaactacggatttttcctgaggattgaaaaggacacggaagggcacctggtgagagtggtagagaaatgctccccagccgagaaggcaggcctacaggacggcgatcgtgtgttgcgcattaacggagtgtttgtcgacaaagaggaacatatgcaggtggttgacttagttaggaagtccggcaattcagtgaccctcctggtcttggatggcgactcatacgagaaagcagtcaagaccagggtagacctgaaagagcttggacaaagccaaaaagaacagggactgtctgacaacattctgtcccccgtgatgaatggcggagtgcaaacttggactcaaccaagactttgctacctggttaaagagggagggtcttatggtttcagcctaaagacagtgcaggggcagattatcaaggacatcgacagtggttctcctgccgaggaggctggactcaagaataacgacctggttgttgctgtgaacggcgaaagtgtagaaacactggatcacgacagcgtggttgagatgattaggaaggggggagatcaaaccagtttgctcgtcgtggacaaagaaactgacaacatgtatagactcgctcatttcagtccctttttgtattatcagtctcaggaactccccaacggttcagttaaggaagcccctgctccaacccctacatctttagaggtcagctctcctcctgataccacagaagaggtcgaccataagcccaagctatgtcgcctggctaagggcgaaaacggttacggtttccacctgaacgccataagagggctgcctggtagtttcattaaggaggttcaaaaggggggacccgctgatttagccggattggaggatgaggacgtaataatcgaagtaaatggcgtcaatgtattggacgagccctatgagaaagtcgttgataggatccagtcaagcggaaagaacgtgaccctgctagtgtgcgggaaaaaggcctatgattatttccaggctaagaagatcccgatagtgtcatcactggccgaccccctcgatacgcctcctgatagcaaggaaggcatcgtggtggaaagcaaccatgattctcatatggctaaggagcgagctcactcaactgcttcgcatagttcctcaaactccgaggatacagagatgtag

SEQ ID NO: 234214 - DNA, 423 bp, synthetic construct
  misc_feature 1..423: note = Description of Artificial Sequence: Synthetic coding sequence
  source 1..423: mol_type = other DNA
atggacagcagaattccttacgacgactatccagtggtgttcctcccagcctacgaaaatcctccagcatggatcccccctcatgaaagagtgcaccaccctgattataacaatgaattaacccagttccttccacgcacaattacattgaagaagcctcctggcgctcagctcggcttcaacattcggggtggaaaagcaagccagttaggcatcttcatcagcaaggttattccagacagcgacgcacatagggccggactgcaggagggcgatcaagtcttggccgttaatgatgtggacttccaggatattgagcactctaaggccgtggagattttgaagaccgccagagaaattagcatgcgggtgcggttttttccctataattatcaccgtcagaaggaaagaaccgtacactag

SEQ ID NO: 234215 - DNA, 423 bp, synthetic construct
  misc_feature 1..423: note = Description of Artificial Sequence: Synthetic coding sequence
  source 1..423: mol_type = other DNA
atggatagcagaattccatacgacgactaccctgtcgttttccttcctgcatacgagaacccccctgcttggatacctcctcacgaacgagtccaccaccccgactataacaatgagttgacacagtttctccccagaaccattacactgaagaaaccacccggagcccaactgggctttaatattaggggcggaaaggcctcacaattgggcatcttcatatctaaggtgataccggactccgatgctcatcgggctggactgcaggaaggcgaccaggttctggcggtaaatgacgttgattttcaagatattgaacactccaaggctgttgagatactcaagacagcacgcgaaatctcaatgagagtccgatttttcccctataactatcataggcagaaggaacgcacggtgcattag

SEQ ID NO: 234216 - DNA, 8520 bp, synthetic construct
  misc_feature 1..8520: note = Description of Artificial Sequence: Synthetic coding sequence
  source 1..8520: mol_type = other DNA
atgcctattacacaggacaatgctgttctgcaccttccacttctgtaccagtggctgcaaaatagcctgcaggaggggggagacggcccagagcagagactgtgtcaggcggctatccagaaactgcaggagtatatccagttaaatttcgccgttgacgagagcacagtgcctccagaccacagcccccctgagatggagatttgtaccgtctatctgacaaaggaacttggagatacggagaccgtggggctgtctttcgggaatatccccgtcttcggggattacggagaaaaaaggagagggggaaaaaagaggaaaacgcaccagggaccagtgctggacgtcggctgcatttgggtcacggagctgaggaagaattctccggctggtaagtcagggaaggttcgtctgagggacgaaatcctgtctttgaacggccaactgatggtgggggtggacgtgagtggggcaagttatctcgccgagcagtgctggaacggtggttttatttatcttataatgctgaggcggttcaagcacaaggcccacagtacttacaatggcaacagctccaacagctccgaacctggcgagactcctacactggagttaggagatagaactgctaagaagggtaaaagaacgaggaagtttggggtcatcagccgccctccagcaaacaaagcgccagaggagtccaagggcagcgctgggtgtgaggtgagctctgacccgtcaacggaactcgaaaatgggccagacccagagctgggtaatgggcacgtatttcagttggaaaacggaccagactcccttaaagaggttgccggtcctcatctggaaagatcggaggtggatcggggaactgaacaccggatccccaagaccgacgcaccactaactacttccaacgacaagcggaggtttagtaaaggcggaaaaaccgactttcagtccagtgattgtctggccagagaggaagtcggaaggatctggaagatggaactattgaaggaaagcgatgggttgggtatccaagtgagtggaggtaggggttcgaaaaggtctccacacgcaatcgttgtcacgcaggtgaaagaagggggtgccgctcatagagatggacgtctgtcactgggtgacgaactattagtcattaatggccatctgttagtaggactttctcacgaagaagccgtcgctattctgagaagtgcaactggcatggtccagctcgtcgtcgcatccaaagagaacagtgctgaagatctcttacgacttacctccaaatcactacccgacctcaccagtagcgttgaagacgtaagctcctggacggacaatgaggatcaggaggcggatggagaggaggatgagggtacctcctccagtgtgcagcgggcaatgcccggaacggatgaaccccaggatgtgtgcggcgcagaggagtccaagggaaacctggaaagccccaagcagggatcgaacaagataaaacttaaatcacgtctcagcggaggcgtccatagacttgagtctgtcgaagagtacaacgaactgatggtcaggaatggcgaccctcgaattcgtatgttagaagtatctagggatgggagaaaacattccctgccccagttgctggactctagctcagccagccaggagtaccacattgtcaagaaatctactaggtcgctatccaccacacaagttgaatctccatggcggcttatcagaccctcggtgattagcatcattggactctacaaagagaaaggaaaaggactgggattttctatcgctgggggaagagactgtatccgaggtcagatggggattttcgtgaaaaccatcttcccgaacgggagtgcagcagaggacggcagactaaaagagggcgacgagatactggatgtgaatgggataccaatcaaggggctgacgttccaggaagcaatccacaccttcaagcaaattcggtctggcttattcgttttgacagtgaggacaaaactagtgagcccctcccttacaccatgctcgacccccactcatatgtccaggagcgcctcacccaattttaacacaagcggtggggctagcgcgggagggagcgacgaagggtcgagtagctcactcggcagaaaaacacctggacctaaggataggatcgtcatggaggtgacgctgaacaaggagccacgcgtcggacttggaatcggggcttgctgccttgcactggaaaactcacccccagggatctacatacattccctcgcaccaggatccgttgcaaagatggagagcaacctgtctcgaggtgaccaaatcctagaggtgaactccgtgaacgtgcgccacgctgccctctctaaagtgcacgccattctgagtaagtgtccgccaggaccagtcaggctggttattgggaggcacccaaaccccaaggtctccgaacaggaaatggatgaagtaatcgctcgatcaacttaccaagagtcaaaggaagccaacagcagcccagggttaggcacccctctgaagagcccaagcctcgcgaaaaaggatagcctgatcagtgagtcggaactgtcacagtactttgctcacgatgttccaggaccactttccgattttatggtcgccggttccgaagacgaagatcaccccggaagcggatgtagtacaagtgaggaagggtcgctccctccctcgacctctactcacaaagagccagggaaacctcgcgctaactcgctggttactttggggtcccacagagcctcgggcctcttccacaagcaggtcactgtagctcggcaggctagcttacccggttcacctcaagccctcagaaatccattgctgaggcagcggaaggtgggctgctacgatgccaatgatgcatccgacgaagaagaatttgatagagagggagattgcatcagcctgcccggagccttgcctggtcctatcaggcccctgagcgaagatgaccctcgacgagtgtctatctccagttctaagggaatggacgtccacaaccaagaggagaggccacgcaagaccctggtgagcaaagcgataagtgccccactcctcggctcctctgttgatctggaagagtctatacccgaaggcatggttgacgccgcaagttacgctgcaaacctgaccgacagtgctgaagctccaaagggtagtcctgggtcatggtggaagaaagagctcagcgggtcgtccagcgcaccaaagctggagtataccgtaaggaccgacacacagagccctaccaacaccggctcaccctcatccccacagcagaaaagcgagggactgggatcccggcatcgtccggtcgctcgggtgagtcctcactgcaaacggtccgaagcggaggctaagccatctggaagtcagaccgtaaacctcactggcagggctaatgatccctgtgacttagattccagagtgcaggccacttccgttaaagtgacagtggccggatttcagcccggaggggctgtggagaaagaatctctgggcaaattaactaccggggacgcctgcgtgagcaccagttgtgaactggcttcagccctttcacacctagatgcctcacatctgacggaaaatcttcctaaagctgccagcgaactcggccagcaacctatgactgaactcgacagctctagtgatcttatcagctctccgggtaaaaagggggctgcccatccggatcctagcaagaccagcgtcgacacaggccaagtatcgcgtccggagaatccatcccaaccggcatcgcccagagtcacgaagtgcaaggcaaggagtcccgtaaggctaccccacgagggtagcccgagcccgggagaaaaggccgctgcccctccagattacagtaaaacaaggtctgcttcagagacaagcacacctcacaacacaaggcgcgttgcggctcttagaggtgcagggccaggcgctgaagggatgacccccgcaggcgctgtccttcccggtgatcccctgacaagtcaggagcagcgccagggagcccctggcaaccacagtaaagcgctcgaaatgacaggaatccacgcacccgagagctcgcaggagccaagcctcctggagggcgctgactctgtgtcatccagagcccctcaagctagtttgagcatgctgcctagcactgacaacaccaaagaagcttgtggtcatgtctctggtcactgctgtcctggtggctcaagggaaagccctgttactgatattgactcctttattaaagagttggacgcttcagctgcccgatctccgtccagccagaccggagactccggttcacaggaaggctccgctcaaggacacccacctgctggggctggaggcggatcgtcatgtagggccgagccagtcccagggggacagacgtcaagccccaggagggcgtgggccgcaggcgctcccgcttatcctcagtgggcctctcagccatccgtgctggacagtataaatcctgataagcattttacagtcaataagaatttcctcagcaattactcgagaaactttagcagtttccatgaggatagcacatctctctccgggttgggggactccacagagccttctctttcaagcatgtatggagacgcagaagatagctcatctgatcctgagtccctcacagaggcgccaagagcatcagccagagacggctggtctcctcccagaagccgcgtgtcgttacataaggaggatccatcagaaagtgaggaagagcagattgagatttgttccacccggggatgccccaatcctccaagctctccagcgcacctgccaacccaagccgctatctgtcccgcaagcgcaaaagtgctctcactgaaatactccactcctagagagagcgtagcctcgccccgagagaaggcagcatgtcttcccggtagttacaccagcggacctgattccagccagccttcatccctcctagagatgagctctcaggagcatgaaacacatgccgatatatctacatcccagaatcatcgtccctcatgcgccgaggaaaccacggaggtgacctccgccagcagcgcaatggagaattctccactctcaaaggtggctcgtcacttccactcacccccaatcatccttagtagtcctaacatggtaaatgggctggaacatgatcttcttgatgatgagacccttaaccagtacgagacatccattaacgctgcagcctctctgtcttctttctccgtggacgtgccaaagaacggcgaatcagttttagaaaatctgcacatttcagagtcccaagacctggatgatcttcttcagaaaccaaagatgatagcccgtagaccaattatggcctggtttaaagaaatcaacaaacacaaccagggcacacatctgcgttcaaaaactgaaaaggagcagccccttatgccggctcgcagccctgacagtaagatacaaatggtttcatctagccagaagaagggcgtgacggtgccacattcccctcctcaacctaaaacaaaccttgaaaataaggatctgagcaagaagtcaccggctgagatgctcctaaccaatggacagaaagccaagtgtggccctaagttgaagcgcctgagcctcaagggaaaagcaaaggtgaacagcgaggcccctgcggctaacgcagtgaaagcaggcggaactgatcacaggaaaccacttattagcccacagacgagtcataaaacactcagtaaagctgtaagtcagaggttgcacgtggcagatcacgaagatcctgacaggaatactaccgcggctccccgatccccacagtgcgttctggagtccaagccacctctcgctacatccggacccctcaaacctagcgtgagtgatacctccatccgcacctttgtgagccccttaacaagcccaaagcccgtccctgagcaggggatgtggtccagattccatatggctgtgctgagcgaacctgatcgaggatgtcctacaacaccaaagagcccaaagtgtcgagctgagggcagggctcccagagccgattcaggtcctgtgtctcctgcagcttctcgcaatggcatgagtgttgccggtaaccgccaaagcgagccacgtctggcgagtcacgtagctgcagataccgctcagcccagacccacgggagagaagggagggaacattatggcatcggacagactcgagcggactaaccagctgaagatagtggagatcagtgcagaggccgtcagcgagactgtgtgcgggaacaaacccgcagagagcgaccgtcggggaggctgtctagcgcagggcaactgtcaagagaagtccgaaattaggctgtatagacaggtcgcggaatcttccactagtcacccttccagtctgccctctcacgccagtcaagccgagcaagagatgtctcggtctttttcgatggccaagctggcatcctcaagttctagcttacagaccgctatccggaaagccgaatactctcaggggaagtcttccctcatgtcagacagccggggtgtccctcggaatagcatcccgggaggaccaagtggagaagaccacttgtacttcactccacggcctgctacccgcacatatagtatgcctgctcagttctcttctcactttggacgagagggtcatccgcctcactctctcggcaggtcccgggatagtcaggtgccagttacttcaagtgtcgtgcctgaggcaaaggcatctcgtggagggcttcctagcttagccaacggacaaggcatttatagcgtgaaacctttgctcgatactagcaggaacctaccagcaaccgatgaaggtgacatcatttcagtacaggagaccagctgccttgtgaccgataaaattaaggtgacaaggaggcattattgctacgaacagaactggcctcacgagtctacaagctttttttccgtgaagcaacgcatcaagtctttcgaaaatttagccaatgccgaccggcctgtggccaaatctggagctagtccttttttatctgtgagcagcaaacctcctatcggccgtaggtcaagtggcagcatcgtttctggaagtttaggacatcccggagatgctgcagctaggctgctccgcaggtccctgtccagttgttcagaaaaccaaagcgaggcagggacgttgttgcctcagatggccaagagcccctccattatgaccctgactatcagccggcaaaatcctccagagacgtcttctaaaggttccgactcagagttgaaaaaaagcctgggtcctctaggcatccctacaccaaccatgactctagcctcacccgtgaaaagaaataagtcctctgtgcgacacacacagcctagcccagtgtctcgctcgaaactacaggaactgagagcgctcagtatgccagatctagacaagctctgtagcgaggattacagcgccggaccaagcgccgtgttatttaagacggagctcgaaatcacacctcgtcgcagtccaggtccacctgcgggaggtgtatcttgccctgaaaaggggggaaaccgggcttgtcccggtggttctgggccaaagacctctgcagccgagaccccttcatcagcgtctgatactggagaagcagcccaggacctgccctttcgcagaagctggtcggtgaacctcgaccagctgctcgtgagcgcgggagaccaacaaagattgcagagcgtgctgtcttcagtggggtccaagtcaactatactgacccttatccaggaagccaaagcccagtcagaaaatgaggaggacgtgtgctttattgtgttaaaccggaaagaggggtcaggcctgggcttttctgttgctggcggaacggatgtcgaacccaagagtattaccgtccaccgcgtgttttcccagggtgccgcaagtcaggaaggaacaatgaacagaggcgacttcttactctcagtgaatggggcttcgttggccggactggcccatggtaatgtactgaaggttcttcaccaagcacagctgcacaaggacgccctggtggtcatcaagaagggaatggatcagcctcgcccatctgctcggcaagaacctccaacagcaaacgggaagggactgctcagtagaaaaactattccccttgagccgggaatcgggaggtccgtggcagttcacgacgcgctctgtgtcgaggtgttgaaaacgtcggccggtctcggcctcagcctcgacggcggaaaatcttcggttacaggagatggccctcttgtgattaagagggtctacaagggtggggcagctgaacaggccggtattatcgaggctggggacgagattctggccatcaacggaaagcccctggttggtctgatgcactttgatgcgtggaacatcatgaagtccgtgccagagggaccagttcagttgcttatccgaaaacatcgcaacagcagctac

SEQ ID NO: 234217 - DNA, 7922 bp, synthetic construct
  misc_feature 1..7922: note = Description of Artificial Sequence: Synthetic coding sequence
  source 1..7922: mol_type = other DNA
atgcctattacacaggataatgcggtgctgcacttgcctctgctataccagtggctccagaattctctgcaggaaggaggggacggacccgagcagaggctgtgtcaggccgcaatacagaagctgcaggaatacatccagctgaacttcgcagtggacgagagtaccgttccacctgatcattctccacccgaaatggaaatttgtaccgtgtatctgacaaaggagctgggagacaccgaaacagtgggcttgagttttggaaacattccagtgtttggggattacggagagaaaagacggggaggcaagaagagaaagacccatcagggcccagtgcttgatgtgggatgtatctgggtgaccgaattacggaagaactcccctgccggtaagagcgggaaagtgcgactgagagatgagattctttccctgaacgggcagttgatggtaggagtggatgtatctggcgcttcttacctggccgaacagtgttggaatgggggatttatttacttgatcatgctcagaaggttcaaacataaggctcactccacatacaacggaaatagttctaactcaagcgagcccggtgagacaccgactctcgaactgggcgatcggactgctaaaaaaggtaaacggactaggaagtttggggtgatttctcgcccacctgctaataaagcgccagaagagtcgaagggctccgcaggatgtgaagtgagttccgatccttccaccgaactggagaacggcccagacccggaattaggcaatggccatgtcttccagctggagaacggcccagattcccttaaggaggtcgctggaccccacctggagcgttccgaggtggaccggggtacagagcatcggattccgaaaactgacgctcctctcacaacatcaaatgacaagagaagattttccaaaggtggcaaaaccgactttcagagctctgattgtcttgcacgggaggaagtgggcaggatctggaaaatggaactattaaaagaatccgatgggcttggtattcaggtttctggcggacgcggttcgaagcgatcaccgcatgccatagtagtaacgcaggttaaggagggtggagccgctcatagggagtatcacattgtgaagaagagcacaaggtctctctctaccactcaagtggagtccccgtggcgtttgatacgcccatcggtgatcagcattattgggctctataaggagaagggtaagggcctgggttttagcatagctggcggaagggattgcattagagggcagatggggatttttgtgaagaccatcttcccaaatggctctgcagccgaagacggaagattgaaagagggtgatgagatcttggatgtcaatggcattcctatcaaagggttaacttttcaagaagcgatccacacattcaagcagataaggtcaggcctatttgttctaacagtccgaacaaaacttgtaagcccaagcctcactccttgttcaacacctactcatatgagtagatctgcatctcccaattttaatacctccgggggagccagcgctggtggttcggatgagggctccagcagctcccttggacggaaaacaccaggacccaaggaccggatcgtcatggaggtgacactgaataaggagcccagggtagggctggggataggggcatgctgtttggctctcgaaaattcccccccagggatctatattcacagcctagcacctggatccgttgccaagatggagtccaatctgtctaggggagaccaaatactggaagtcaatagcgttaacgtacgccacgccgctctctcaaaggttcatgcaatcctgtcaaaatgtccagtctctgagcaggagatggatgaagtcattgcgcgatcaacgtatcaggagtccaaggaggcaaacagcagccctgggctgggcacacccctcaagtcacccagtctggccaaaaaagatagtctgatctctgaatcagagctcagccaatatttcgctcatgatgtgcccggaccattgagcgactttatggtggcaggatctgaggacgaagaccaccccggatctggctgtagtactagcgaagagggcagtctccctccgtccacctctaaagagcccggaaaacctagggctaacagtttagtaacactgggctcgcaccgcgcatccggattgtttcataagcaggtaacggtggccagacaggccagccttccaggctccccccaggctctgaggaatcctcttctcagacagagaaaagtgggctgttacgatgcaaatgacgctagcgatgaggaggagttcgatcgtgagggggactgcatcagtctgcccggagctctgccaggcccaatcagaccactgtctgaagatgacccccgacgggtcagcatttcaagcagcaagggaatggatgtccataatcaggaggaacgccctcgaaaaaccctggtcagcaaagccatctccgcacctctcctaggcagcagcgtggatctggaggaatcaattcccgaaggcatggtggacgccgctagttatgcagcaaacctgaccgatagcgccgaagcgcctaagggctctcccggaagctggtggaagaaagaactaagtggatcctcctcagcgcctaaacttgagtataccgtgcgtaccgatacacagtctccaacgaatactgggtcgccctcctctccccagcagaaatccgagggccttggctcaagacaccgccctgttgctagggtatctccccactgcaagaggagcgaggcggaagctaagcctagcgggtcacaaacagtcaatttgacaggacgagcgaacgatccatgtgacctcgatagccgcgtgcaagcaacttccgtcaaggttactgtcgccggttttcaacccggtggcgcagtcgagaagctctgtcaggagtcacttggaaaacttaccacaggagacgcctgcgtctctactagctgtgagttggcctccgccctgtctcacttggatgctagtcacctgactgagaaccttcctaaagcagctagcgaattagggcagcaacccatgaccgctagtgaccttataagctctcccggaaagaaaggcgctgctcacccagaccctagtaaaacctccgttgacactggacaggtgtcccggcctgagaatcccagccagccggcatcgccaagagtcaccaagtgtaaggcaaggtctccggtgcggctgcctcacgagggtagtccctcacccggtgaaaaggcagcagcccctcccgactactctaagacacggagtgcgtccgagacctcaacccctcacaatacaagaagggtcgctgcgcttagaggagcaggccctggcgctgaaggcatgacacctgccggagccgtcttacctggcgatcctctgacctcacaagagcaaagacagggtgctcctggaaaccattctaaagccctggaaatgacaggcattcacgctcctgaatcttcacaggaaccatcgctccttgagggggctgactcggtctccagccgcgctccacaggctagcctgtcaatgctccccagcactgataacacaaaagaggcttgcggccacgtgagcggccattgttgccccggtggctctcgggagtccccagtgacagatattgactcattcatcaaggaattggacgcttctgctgccagatcaccatccagccaaacgggagattctggaagtcaggaaggctccgctcagggtcacccacctgcgggtgccggtggcggttctagctgcagagccgaacccgtccctggaggccagacatcgtccccacgtcgggcttgggctgccggagcgccagcctatccgcagtgggcctcacagccttccgtgctggactctatcaatccggataagcatttcactgttaataagaatttcttatccaactacagccgcaacttctcgagttttcatgaagactccacttccctgagcggactgggagacagtaccgagccaagcttgtcttccatgtacggcgatgctgaagactctagctctgaccccgaatccctcacagaggcacccagagcaagcgccagagacggctggagccctcccaggtcacgggtgagtttgcataaggaggacccgagcgaatctgaggaggagcagattgagatctgttcgacgcggggttgtcctaacccaccatcttcccccgctcacttgcctacccaagccgctatctgtcctgccagcgctaaggttcttagccttaaatattccactcctcgcgaatcagtcgcttcaccgagggaaaaggccgcatgtctgcccggttcttacacctccggtccggattcaagccagccttcttccctgcttgagatgagtagtcaagaacacgagactcatgccgacatcagtactagccagaaccataggccctcttgtgctgaggaaactacagaagtgactagtgccagttctgccatggaaaacagccctctcagcaaggtcgcccgtcactttcactccccgccaattatcttgagttctccaaacatggtcaacggactggagcacgatctgcttgatgacgagacattaaatcagtatgaaaccagcatcaatgccgctgcctctctctcctcgttctccgtcgacgtccccaaaaacggagagtccgtcctagagaatttgcacatatcagagtctcaggacctggacgatctgctgcagaaacctaagatgatcgcccgacgccctattatggcatggtttaaggaaataaacaaacacaaccaagggacccacctgaggtcgaaaaccgaaaaggagcagcctctgatgcccgcaagatctccagattcaaaaatccaaatggtcagttcctcccaaaaaaaaggagtaaccgtccctcattctccgcctcagcccaaaacgaatctggaaaataaggacttgagcaaaaaatctcctgccgaaatgctgcttacaaacgggcaaaaagcaaagtgcggccctaaattgaaacgcttgagcctgaaaggaaaggccaaagttaatagtgaagcacccgctgccaatgccgtgaaggcaggtgggaccgaccatcgtaagccgctgataagcccccagacgtcgcacaagacacttagcaaggcagtatcacaacgactacatgtcgccgaccatgaggaccccgataggaatacgacagccgctcctcgtagcccacagtgtgtgctggaatctaagcctcccctagccacttccgggccactcaaaccaagtgtttcagatacaagtataagaacattcgtttcacccttgacatcaccaaagcccgtgcccgagcagggaatgtggtccaggttccatatggccgtactgagcgaacccgaccgcggatgcccaaccactcctaagagcccgaaatgtcgtgcagaaggaagagccccaagggccgactcaggtccagtctcacctgctgcctccagaaacggcatgagcgtagctggcaaccgccaatctgagcccagactggcctcgcacgtggctgctgatactgcccagccacggcctactggggagaaaggaggtaatattatggcctccgaccgtctggagagaaccaatcagctcaaaattgtcgagatttcggcggaggcggtcagcgaaaccgtttgcgggaacaaaccggcagagagcgataggaggggcggatgtctggctcagggcaactgccaggagaagagcgaaattcgcctctacagacaggtggctgagtcttccacgtctcatccaagctccttacccagccatgcgtcgcaggccgaacaggagatgtcccggagtttttctatggctaagctggctagctcttcctctagtcttcaaaccgctattagaaaagccgagtattcacagggcaaatcaagtctgatgtcagattcacgaggcgttcctaggaacagcataccgggaggcccatcaggggaagaccacctctactttaccccgcgtcccgcaactcgtacctatagcatgccagcgcagttctcgtcccatttcggacgcgagggacacccccctcacagcctcggccgtagcagggactcacaggtgcctgtcaccagcagtgtcgtgccagaggcaaaggcctccaggggtgggctacccagtctggctaatgggcagggaatttactccgtgaagccactgctggatacctctcgaaatctgcctgccaccgatgaaggggacattataagcgtgcaggaaaccagctgtttggtgaccgacaagattaaggtgacgcgccgtcactactgctacgaacaaaactggccacatgagtcaacctccttcttttctgtgaaacaaaggatcaagtctttcgaaaatctggccaacgccgaccgaccagtggccaaaagcggcgcttcccctttcctatcagtaagctccaagcccccaatcggaagacgaagcagtggctccatcgtcagcggctccctgggccatcccggagacgctgcagcgcgactgctgaggaggtctctgtcctcctgctcggagaaccagtctgaagcaggtaccctgttgcctcagatggccaagtccccatccatcatgacgctgaccatttctaggcagaacccacctgaaacttccagcaagggaagtgattccgagttgaagaaaagcctcggccctctcggaatcccaactccaaccatgacccttgcctctcccgtaaagcggaacaaatccagtgttcgccatacccaaccatcccccgtcagccggtccaagctgcaggaattaagggcactctccatgcctgaccttgacaagttgtgctctgaggactatagtgcagggccatcggccgtgttgttcaagactgagcttgagatcaccccaaggcggagcccaggtcctcctgctgggggagtgtcttgtcctgagaaggggggtaatcgcgcttgtcccggtggctcaggcccaaagactagcgccgcagagactccgtcgagcgcttcagatacaggggaagccgctcaagatctgccctttcgtcggtcctggtctgtgaacctggatcagctgcttgtgtctgccggagaccagcagcgccttcagagtgtgctaagcagcgtggggtctaaatccactattctgaccctcattcaagaggctaaagcccagtcagaaaatgaagaagatgtgtgcttcatcgttcttaacagaaaagaagggagcgggctcggattcagcgtcgccggtggcaccgacgtagagcccaagtctatcaccgttcaccgcgtgttttctcaaggcgctgcctcacaggaaggcaccatgaacagaggtgactttctattatccgtcaatggtgcttccctcgctggactggctcacgggaatgtgctgaaggtcctgcaccaggcacagctgcataaagatgctctggtcgttatcaaaaaaggcatggaccagcctcgcccttctgccagacaggagcccccaaccgctaatgggaaaggcctgctttctaggaagacgatcccactcgagccaggcataggtcgcagcgtggccgtccacgatgccctgtgtgtcgaagtactgaaaacctcagcaggtctgggactctccctggacggcggaaaatccagtgttactggggatggtccgctggttataaagcgcgtgtataaaggaggcgcagccgaacaggccggtataatagaggccggtgatgagattcttgctattaacggaaagccactcgtagggcttatgcactttgatgcctggaacataatgaagtccgtccccgagggaccagtacagctgctgatccgcaaacataggaattctagtta

SEQ ID NO: 234218 - DNA, 8519 bp, synthetic construct
  misc_feature 1..8519: note = Description of Artificial Sequence: Synthetic coding sequence
  source 1..8519: mol_type = other DNA
atgcccattacgcaagataatgcggtactgcatcttccacttctctatcagtggctgcagaactctttacaagagggcggagatgggcctgagcaaaggctttgccaggccgctattcagaaactgcaggagtacatccagctgaactttgcagtggatgaatcaacagtgccgcctgatcattctccaccagaaatggagatttgtacagtgtacctgaccaaagagctgggggacaccgagacagttgggctgagttttggcaatatacctgtgtttggtgattacggcgagaaacggagagggggaaaaaagaggaagacccatcaggggccagtgctcgacgtgggatgtatctgggtcactgagttgcggaagaattctcccgctgggaaaagtggaaaggttcgcctgagagacgagattctgtccctgaatggtcagctcatggtgggagtcgacgtctccggcgcttcctacttggctgagcaatgctggaacggcggttttatttaccttattatgctccgcaggttcaagcataaagcccatagtacctacaatggcaactcatccaactccagtgagcccggagagactccaacgctcgagctcggtgaccgcaccgctaaaaaaggcaagaggactcgcaaattcggagtgatctctagaccacccgctaacaaagccccagaggaatccaaaggaagcgctgggtgcgaggttagttccgacccttccaccgagctagagaacggcccagacccagagctgggtaatggccatgtgttccagttggagaacggccctgacagtctgaaagaggtcgccggaccacacctggagcggtccgaagtggaccgcggtacggagcaccgcatccctaaaaccgatgccccacttacgacttctaacgacaagagaaggttcagcaaggggggaaaaacagacttccagtcgagtgattgtctggctcgggaagaggtgggcagaatttggaagatggagctgcttaaggaatctgatggtctgggcatccaggtatctggaggtaggggttctaagcggagcccgcacgcaatcgttgtcacccaggttaaggaaggaggagctgctcatcgggatggccgactgagcttgggcgatgagctgttagtgataaatgggcacctattagtggggctgtctcacgaggaggctgtggcaatactgagatcagccacaggtatggtccagcttgtggtcgcatctaaagaaaattccgctgaggatttgttacgactcacgagcaagtccctcccagatctgacctcatcagtcgaagacgtcagcagctggactgataacgaagatcaggaagccgacggtgaggaagacgagggcacatcctcttctgtccagcgagccatgcccggtacagatgaaccccaggatgtttgtggggcagaggaaagcaagggaaatctcgaatctcccaagcagggatcaaacaagatcaagctgaagagccggctgtctggcggagtgcaccggctagaatcagtggaggaatacaacgagctgatggtgagaaacggagaccccaggattagaatgctggaggtcagtcgtgacggacgcaagcacagcctcccacaactgctggatagctcttctgcctctcaagaataccacatcgtgaagaagagcactcgttcactgtctaccacgcaggtggagagcccttggcgactgattcggccatcagtaatcagcatcattggtctgtacaaggaaaaggggaaggggcttggctttagcatcgcgggaggcagggactgcatcagaggccaaatgggaatattcgtgaaaactatctttcccaacggctccgccgctgaagacggccgtttaaaagaaggtgacgagatactcgacgtgaatggcatccccattaagggactcacctttcaagaagcgatccacaccttcaagcagatccggagcggcttatttgtgctgaccgtgcgaacaaagctggtgagcccttcattgacgccatgttcaacccccacacacatgtctcgctcagcttccccgaactttaacacttcaggcggtgcgtcggccggagggagcgatgaaggcagtagttcaagccttggacggaaaactccgggtcccaaggataggattgtgatggaggtcacactgaacaaggagccccgtgtcgggctaggtattggcgcttgttgcctcgcgctcgagaatagtcccccagggatttatattcacagtcttgcacccggttctgtggctaaaatggagagcaatctgtcccgtggggaccagatcctggaggttaattctgtgaatgttaggcatgccgctctgagcaaggtgcacgccatcctgtcaaaatgtccgccaggtcccgtgcgcctggtgataggccgtcacccaaaccccaaggtctccgagcaggaaatggacgaagtcatcgcaaggagcacctatcaggagtccaaggaggcaaactcttcacccggtctggggacccccctcaagtccccttctctggctaagaaggatagcctgatctccgaaagtgaattgtctcagtattttgcacacgatgtccctggccctctgagtgatttcatggtcgccggttccgaggatgaagaccaccccggaagcgggtgctccacatctgaagagggcagcttacccccatcgacaagcacacacaaagagcccggtaaacctcgcgctaactccctcgtgaccctcggcagccaccgagcatccggtctctttcataagcaggtcacagtggccagacaggccagcctgccgggatctccgcaagccctgcggaacccactgcttagacagcgcaaggtgggttgctatgatgccaacgacgcttccgatgaagaagaattcgatcgtgagggcgactgtatcagtctccctggggctctgcccggacccatcaggcctctttcagaggatgacccgaggagagtgagcatctccagcagtaaaggaatggatgtgcacaaccaagaggaacgtcccagaaagacgttggtttccaaagccatttccgcaccactgctcggcagtagtgtcgatctggaggagtctatcccagaaggcatggtggacgccgctagctacgctgcaaatttaaccgattctgctgaagcacctaagggaagcccgggttcttggtggaagaaagagctgtctggttccagttccgcacccaaattagagtatacggtgaggacagacacacagtctccaacaaatactggctcaccttctagtccccagcagaaaagcgaggggctggggtctcgccatcggccagtagctcgtgtgtctcctcattgcaaacggtccgaggccgaggccaagcccagcgggagtcagacagtgaacctgactgggagagctaatgacccttgcgatttggatagtcgggttcaagcaacatcagttaaagttacagtggccggtttccagccaggcggtgcggtagaaaaagagagccttgggaaactcacgacaggggatgcttgtgtgtccacttcttgcgagttggcctcagctctgagtcacctggacgcctctcatctaaccgaaaatctgcctaaggctgcatccgagctcggtcagcagcccatgacggagcttgattccagcagcgaccttatctcctctcccggtaagaagggcgctgcccaccctgacccttctaaaacctccgtggatactgggcaggtgtcccggccagagaatccctcccagcccgcatctccacgagtgactaagtgcaaagcgcgttcgccagtccggctgcctcacgagggaagtccctccccaggtgagaaggctgcagcccctcctgattattccaaaacgaggtctgcatctgagactagcactccgcacaacaccagaagagtggcagctttaagaggagctggcccaggggctgaaggcatgaccccagctggcgcagtgcttccaggggatccccttacgtcacaggaacagcgacaaggtgcccctggtaatcactccaaggcacttgagatgaccggaattcatgccccagagagttcacaagagccgtctctcttggaaggtgcagactccgtctcatcgagagctcctcaagcctccttgagtatgctgcccagcactgataatacaaaagaggcctgtggtcatgtctcgggacactgctgccccggaggatcacgcgaatctcccgtcaccgacattgacagtttcatcaaagaattggacgcctccgcagccaggtctcccagctctcagaccggagactcaggaagtcaggagggaagcgcccaggggcacccaccggcaggcgctgggggaggaagcagctgcagagccgagcccgtccccggagggcagacaagctctcctaggcgcgcttgggccgcaggcgctcctgcttatccccagtgggcctctcagccatctgtgctggacagcattaacccagataaacactttaccgtgaataaaaatttcctttcgaattacagccgcaactttagcagttttcatgaggattctacaagtctgtcaggcctcggagactctactgagcccagcctctctagcatgtatggtgacgctgaagactcttcttcggacccagaaagtcttaccgaggcaccgagggcttcagcgagagatgggtggagccctccgcgtagtagggtttctttgcacaaggaagatcctagtgagtcagaagaagagcagattgagatctgctcaactagaggttgtccgaaccccccaagctcccccgcacatttaccaacgcaagccgcaatttgtcctgcttctgcaaaggttcttagtcttaagtatagcacgcctagggagtccgtggcaagtccccgtgagaaagccgcatgtctccctggtagctacacttctggccctgattcaagtcagcctagcagcctgctagaaatgtcatcccaggaacacgagacacacgctgacatttccacttctcaaaaccaccgcccatcatgcgctgaggagacgaccgaggtcacaagtgcctcatctgcaatggagaattcacctctaagcaaagtggctcgtcacttccactctcctcccattattttatcaagccccaacatggtcaatggcctcgaacacgatctgctggatgatgaaaccctgaatcagtacgaaacgtcgataaatgctgccgctagcctaagtagcttcagcgtagatgttcccaagaatggcgagtctgtcctcgagaacctgcacataagtgaatcacaggatcttgatgatctgctacaaaaacctaagatgatcgcgagaagacctatcatggcctggttcaaagagattaataaacacaatcaaggcacccacttacgtagcaagacggagaaggagcaacctttaatgcctgcacgctcgcccgactcaaagattcaaatggtcagttcctcccagaaaaagggagtcaccgttccccattctccgcctcagccaaagacaaacctcgagaataaagacctgtctaagaagagccccgcagagatgctcctcaccaacgggcagaaagccaagtgcggccctaagctcaagaggctaagtctcaagggcaaggcgaaagtcaactcagaggcaccagcggctaatgctgtgaaagctggtggaacagatcacagaaagccgctgatcagcccacagacgagccataaaaccctgtccaaggcagtgagtcaacgcctgcatgttgccgatcacgaggatcctgataggaataccacagcggcacccaggtcccctcaatgcgttttggaatccaaacctcccctcgccaccagtggtccccttaaaccaagcgtgagcgacacctccatacggaccttcgtcagtccgctcacttcccccaagcctgtcccggagcagggtatgtggtctaggtttcatatggccgtactgtccgagcccgaccgaggatgtccaactactccaaagtctccgaaatgtcgcgctgaaggacgcgcacctagagccgacagcggacctgtaagcccggcagcatcacgtaacggaatgtccgtcgccggaaaccgtcaatctgaacccagactcgcgtcacatgtggctgcagacactgctcagcctcgtcccaccggagagaaggggggaaatataatggccagcgacaggctggagaggaccaaccagctaaaaattgtggagatctccgctgaagcagtctcagagacggtgtgtgggaataaaccagcagaatccgatcggcgaggcggttgcctagcacagggcaattgccaggaaaagagcgaaattcgattgtataggcaggtggctgaaagctccacctcacatccatcaagcctgccaagccacgcttctcaagcagagcaggagatgagccggtccttcagcatggctaagctggcatccagctcaagctcgttacagacagccattcggaaagcggagtacagccaggggaagtctagcctcatgtccgatagcaggggagtgcctcgtaactccatcccaggcggtccgtccggagaagaccacctgtacttcactcctaggccagcaacaagaacgtattcgatgcctgctcagtttagcagccacttcggcagagaaggccaccctccacacagtctggggcgaagtcgggacagccaggtgcccgtcacaagctccgtggtacccgaggcgaaagcatctcggggaggcctgccctcacttgcaaatggtcaggggatctactcagtcaagccactactggacacgtccagaaacctccccgcaaccgacgaaggagacataatttccgtgcaggaaacaagctgcctggttaccgataagatcaaagtgacgcgtagacactattgctacgagcaaaactggccgcatgaaagcaccagtttctttagcgtcaaacagcgaatcaaatcatttgaaaacttagctaacgccgacagaccagtcgcaaagagcggcgctagcccttttctttccgtgtcatctaagccaccaatcgggagaagaagttcaggatctatagtgtccggctctcttggccatcccggtgatgccgctgccaggctgctgcgcagaagtctttcttcttgcagcgaaaatcaaagcgaggcgggaactctgcttccccagatggctaaatccccctctatcatgacgctgactatctcccgccaaaaccctcctgaaacatcaagtaaaggatccgactcggagcttaaaaaatcgctcgggccactgggcattcccacacccaccatgaccctggccagtcctgtcaagagaaacaagagcagtgtgcggcatacacagccctcccccgtaagtcgctccaaactccaggagctccgcgcactgtctatgccagatctggacaagctgtgttccgaggattattccgcaggcccttctgctgtcttgtttaaaacagaattggagatcactccaagaagatctccaggccctccggcagggggtgtctcatgtccagaaaaaggagggaaccgtgcttgtcccggaggatctggcccaaagacatctgctgcagagactccctcctccgcttctgatacgggggaggccgctcaagatctgccattcagacggagctggtcggtgaatctggaccagctcctggtaagtgcaggggaccaacagagactccaatccgtgctatcgtctgttggaagcaaaagtacaatcctcacccttatacaggaagctaaagcccaatctgaaaatgaggaggatgtgtgctttatagtgctcaaccggaaagagggtagtggcctgggcttctctgtggccggtggcaccgatgtggagcccaagtcgatcaccgtccatcgagtgttttcacaaggagcagctagtcaggagggaaccatgaacagaggcgattttctgctttcagtaaatggggcttccctggctggactggcgcatggcaacgtcctaaaggtactgcaccaggcacagcttcacaaagatgcattggtggtgatcaagaaggggatggatcagccaaggcccagcgctagacaggagccacctacggctaatggaaaaggcctactctccagaaagacaattcctctcgagcctggcatcggacgcagcgttgccgtccacgatgccctctgcgttgaagtcttgaaaacctcggccggactgggcctgtctttggatggcggaaaatcctccgtcacaggggacggcccacttgtcattaagagagtttacaaggggggtgctgctgagcaggcagggatcatcgaggccggagacgagatcctcgcaataaatggcaaaccactcgttggactgatgcactttgacgcgtggaacatcatgaaaagcgtgccagagggtccagttcagttgctcattcgtaaacatcggaatagttctta

SEQ ID NO: 234219 - DNA, 45 bp, synthetic construct
  misc_feature 1..45: note = Description of Artificial Sequence: Synthetic coding sequence
  source 1..45: mol_type = other DNA
atgccaatcacccaagacaacgccgttctgcacttgccactgtag

SEQ ID NO: 234220 - DNA, 1476 bp, synthetic construct
  misc_feature 1..1476: note = Description of Artificial Sequence: Synthetic coding sequence
  source 1..1476: mol_type = other DNA
atggaaaaagccgctgatttacaggacacagccagtcttactttaaagttcaagtttaatccaaagctcggtattgataaccccgttttaagcctcgctgaagatcacgatccctatgatccatggtctctggagcgcccacggttttgtttgctttcaaaggaggagggcaagtccttcggattccacctgcaacaggaacttggacgcgcaggccacgtggtgtgcagagtggaccctgggacgtccgcacagagacaaggactgcaagagggagataggattcttgccgtgaataatgacgtggtggagcacgaagactatgctgtggtcgtgcgcaggatccgagcaagtagtccacgagtgttgcttacagtgctggctcgacacgctcatgacgtggcgagagctcaattgggggaagacgcccatctttgtcccaccttggggccaggggtgcgcccacgcctgtgccatatagttaaggacgaaggaggattcggattcagcgtgacacacggaaaccagggccctttctggctggtcctttcaaccggcggagcggctgaacgcgcaggtgtgccgccaggagcccgtctgctcgaggtgaacgggttgtggcagagtggccagcaggtgacgctgctcgtcgccggaccagaagtcgaggaacaatgcaggcagctgggcctgccgttagctgccccactagcagaaggctgggcgttgccaactaaacctaggtgtttacacttagaaaagggtccacaggggtttggattcctcctcagagaggaaaaaggccttgacggtcgacccggacaattcctttgggaggtcgatcccggactccccgctaagaaggcagggatgcaggcaggcgacagactggttgccgttgccggagaaagtgttgagggtctcggccacgaagagaccgtgagccggatccagggacagggtagctgcgtgtccttaacggtggtcgatcctgaagcagaccggtttttcagtatggtccgactgagccccctgctgttcctggagaatactgaggcccctgcatctccgcgtggctcttcgtccgccagtctggttgaaaccgaggaccctagcctcgaggatacaagtgtgcctagcgttccgctgggcagtcgccagtgcttcctgtatcccggtcctggtgggtcatatggcttccgcctcagctgtgttgcgtcaggacctcggctgtttattagccaagtgactccaggaggcagcgccgctagggcaggcctacaagtgggcgatgttatccttgaggtgaatgggtaccctgtgggtgggcaaaacgacctggagcgactccagcaactccccgaagcagaacctccgctttgtctgaagctggccgctagatccttgcgtggactcgaggcgtggattccaccaggagccgctgaggactgggcactggcctccgatctcttgtag

SEQ ID NO: 234221 - DNA, 1518 bp, synthetic construct
  misc_feature 1..1518: note = Description of Artificial Sequence: Synthetic coding sequence
  source 1..1518: mol_type = other DNA
atggaaaaagctgctgatctgcaagacaccgctagtttaaccttaaagttcaaatttaatccgaagctggggatcgataatcctgtgctgagtcttgccgaagaccacgacccctacgatccttggtcattggaaagaccaagattttgccttttatcaaaggaggaagggaagtccttcggattccatctgcaacaggaacttgggcgtgccggacatgtagtgtgtagagttgatcctggaacctcggcccagcggcagggtctgcaggaaggagataggatactggctgtaaataacgatgtggttgagcacgaggactatgcagtcgtcgttcgcagaattcgtgcttcgtcacctcgggttctgctcacagttttggctagacacgcacacgacgtggctcgagctcagctgggagaggatgcacatctgtgtcccacccttggacccggagtacggcctaggttgtgccatatagttaaagacgagggagggtttgggttctcagtaacacacggtaaccaaggtccgttctggcttgtgctgtccaccggcggagccgctgaacgagccggagtgccacctggcgcacggcttctggaagtgaacggcgtttccgtcgaaaagtttacacataatcagctgacccggaagctttggcaaagcggccagcaggtgacacttctcgtcgccggtccagaggtggaggagcaatgtaggcagctaggactccccctcgctgcacccctcgcggagggatgggccctcccgactaagccccgatgtcttcatttagaaaaggggcctcagggtttcggctttcttctgcgggaggaaaagggactggatggcaggcccggacagttcctgtgggaggtagaccctggcctgccagccaaaaaggccggaatgcaggcaggtgaccggctcgtggccgtggctggggagtcggtcgagggactcgggcatgaagagacagtgagccgcatccaaggccagggatcttgtgtatccttaaccgtggtggatcccgaagccgaccggttcttctccatggtcaggttatcaccgctgttgttccttgagaatacagaggctccagctagccccagaggaagcagcagcgccagtttggtggagacggaggatcctagcttggaagacacatcggtgccaagcgtcccactggggtcacggcagtgtttcctatacccgggaccagggggatcttatggcttcagactatcctgcgtcgcttccggacccaggctgtttatcagccaggttacccccggtggtagcgctgcgagagccggtttacaggttggcgatgtgattttggaggtgaatggctaccccgtcgggggacaaaacgaccttgagaggttgcaacaattgcccgaagctgaacctccactctgtctcaagttggctgctaggtccctccggggactggaggcatggattcccccaggggcagctgaggattgggctttagcatccgatctgttatag

SEQ ID NO: 234222 - DNA, 1716 bp, synthetic construct
  misc_feature 1..1716: note = Description of Artificial Sequence: Synthetic coding sequence
  source 1..1716: mol_type = other DNA
atggttacgccatctcctcctggcaatcatagcctttccctcgaagcgcctcgtcttcatacagcaagcgacctgctagggaaccactctctggggctgcctctcattactgccttagtcggatccagagaccgccgaggcagagtcttcagccccgtaccagttcccttaccaacaaacccaacaacccagcaccccactcgccaaaaactgccctcaaccctttccggtcacagggtttgccaggctcacggagaacccgtgctaggactgtgtcccctcctccccttattctgctgtccaccgcatcctcctgacccctggtccctcgaacgccctagattttgcctgctgtctaaggaagagggaaagtccttcggtttccacttacagcaggagctagggagggctggacacgtggtgtgtcgagttgaccccggtacctccgcacagcgacaaggactgcaggagggcgataggattctcgctgtgaacaacgatgtcgtggagcacgaagactacgcagttgtcgtcagaaggattagagcttcaagcccaagggtactcttgacagtgctggctcggcacgcccatgatgtcgcacgtgcccagctcggtgaggacgcccatctgtgcccaacccttgggcctggcgtcagaccacgcttgtgccacatcgtaaaagatgaggggggatttggatttagcgtgactcacggtaatcagggacctttttggctggtgctgagtaccggcggtgcggctgagcgagcaggcgtcccccctggtgctcgccttctggaggttaatggcgtgtctgtcgaaaagttcactcacaaccagctgacccgcaaactgtggcagtctgggcagcaggtaaccctgctcgtcgcgggaccagaagtggaggaacagtgcagacagctgggcctgccgctggcagctccactggccgaagggtgggctctgcccactaaacccaggtgtttgcacttggaaaagggcccacagggattcggttttctcttgagggaggagaagggcctggacgggagaccgggacagttcctttgggaggtagatcccggactgcccgctaaaaaggcgggtatgcaggcaggagacaggcttgtcgcggttgcaggagaatccgtggaaggtcttgggcatgaagagaccgtgtcacgcattcaaggacagggcagctgtgtctcgctcaccgtggtagacccggaagcagacaggttcttttccatggtgaggttatctcccctactttttttggaaaacacggaggctcccgcatctccgagagggtcatctagcgcatccctggttgaaaccgaagacccttccctcgaggatacaagtgtcccatctgtaccactgggatctcgacagtgctttctatacccaggccctggtggcagctacggtttccgcctgagctgcgtagcatccggacctcggctgtttattagccaggtgacccctgggggaagtgcagcacgcgcaggcctgcaggtgggggacgtgatcctggaagtgaacgggtaccccgtcgggggacagaacgatctggagagactccaacagctgcccgaggccgagccgccactctgcctcaagctggctgcgagatcgctgcggggactagaggcctggatccctcccggagccgctgaagactgggccttggcatccgatcttctgtag

SEQ ID NO: 234223 - DNA, 1518 bp, synthetic construct
  misc_feature 1..1518: note = Description of Artificial Sequence: Synthetic coding sequence
  source 1..1518: mol_type = other DNA
atggaggaggccctagatcttcaagataccgctagcctcaccctcaaattcaaattcaaccctaagcttggcatagataaccctgttctgtcactggccgaagatcacgacccctacgatccctggtctctggagcggccacgcttttgcctgctgtccaaggaggagggtaagtctttcggattccaccttcagcaggaattaggtcgcgcaggacacgtggtttgtcgggtggacccaggcacgtctgcacagcggcagggattacaagaaggcgacagaattctcgccgtaaacaatgatgtcgttgaacatgaagactatgccgtagttgtgcgcagaatcagggccagctcgccaagagtgcttctcactgtgctcgcccgacatgcccatgacgtagcacgtgcacagcttggtgaggacgcgcacctgtgtcccactttgggcccaggcgtcaggccgagactgtgccatatagttaaagatgaagggggtttcggtttctctgtaacgcacgggaatcagggtccattttggctcgtcctgagcactggaggagcggcagaaagagctggagtgccacccggagccagactcctcgaagtgaatggcgtttcagtggagaaatttacccacaatcaattaactcgaaagctgtggcagagtggccagcaggtgacactcctggtggccggtcccgaggtggaggaacagtgccggcagttaggcctgcccctcgcggcacccttggcggagggatgggcactgcccactaagccaagatgtttacacctagaaaagggccctcaggggttcggttttctcctccgcgaagaaaaaggcctggatggccgacccggacagtttttgtgggaggtggaccccggtctgcccgcaaagaaggcaggcatgcaggccggtgaccgccttgtcgcagtggccggagagtcagtggagggtctaggtcacgaggagaccgtttctagaattcagggtcaaggctcctgtgttagcctgacggtggtggacccagaagcggaccgcttcttcagcatggttcgcctctccccactactgtttctggagaacacggaagcccctgcgtcgccgcgagggagttcctccgcatcgctggtagagacggaggaccccagcctggaggacacctcagtgcctagtgtcccactgggcagtcgtcagtgtttcctatacccaggaccaggaggatcatacggtttcagactaagctgtgtggcaagcgggcctcggttgttcatctcacaggttactcccggagggtctgctgcccgagccggattgcaggtgggcgatgtcatccttgaagtcaatgggtaccccgttggaggccagaacgacctggaaaggttacagcagctgccggaggcagagccccctttgtgcctgaagctcgcggctcgctccttgagagggctggaggcttggatcccccctggagccgcagaagattgggcgttggcgtcggacctcttgtag

SEQ ID NO: 234224 - DNA, 1716 bp, synthetic construct
  misc_feature 1..1716: note = Description of Artificial Sequence: Synthetic coding sequence
  source 1..1716: mol_type = other DNA
atggtgacaccatcaccccctggcaatcatagtctaagcctcgaggcacccaggctccacactgcaagcgaccttttgggcaaccactctctcggtcttcccctgattactgcgctggtcggatcgcgtgacaggaggggccgagtgtttagcccggtcccagtacccctccccactaaccccactacccagcatccgacacggcagaagttaccctctacgctgtctgggcaccgggtgtgccaggcccatggagaaccggtgttaggtctgtgcccattgctgcctctgttttgctgcccccctcaccctcctgacccttggagtttggaaagacctcgcttttgcttgctatcgaaggaagagggcaaatcttttggctttcacctgcaacaggagctgggtcgggctggccatgtggtgtgccgcgtggatcctggtacatccgctcagcgacagggcctgcaggagggagaccgcatccttgctgtgaacaacgatgtcgtggagcacgaagattacgcggttgtagttcggaggataagggcgtcctctcccagggtgctgctaactgtgttagccaggcatgctcacgacgttgcccgagcccaattgggagaggatgcccatctctgcccaaccctagggcctggcgtgcgaccccgtttatgtcatatagtgaaggacgagggcggatttggtttctcagtcacccacggtaatcagggcccattctggttggtcctgtctactggtggagctgcggagagggcaggtgtgcccccaggtgccagactcttagaggtaaacggggtcagtgtagagaaatttacccataatcagctgacccgaaagctctggcagtccggtcagcaggttaccctcctggtggccggaccggaagtagaggagcaatgtcgccagctcggcctcccgcttgccgctccgttggctgagggatgggcattacccactaagcctcgctgtctacacttggaaaaggggcctcagggcttcgggttcctcctaagggaagagaagggactcgatgggagaccgggacaattcctctgggaggttgatcccggtctgcccgctaaaaaagcaggtatgcaagccggtgatcgtttagtggcggttgcgggtgaatccgtcgaggggttgggtcatgaggagaccgtgtcgcggatccagggacaggggtcctgcgtgtccctcacagttgttgaccctgaagcagatagattttttagtatggtacgcctctctcccttgttatttctggagaacaccgaggcacccgcttctcccaggggatcttctagcgcctccctggtcgagactgaagatccttctctggaggatactagcgttccatcagtcccactcggcagcagacagtgctttctctacccaggtcccggagggagttatggcttccggctgagctgcgtcgcttccgggcctcgcctctttatctcacaagtgacccccggaggtagcgcggcacgtgccggacttcaagtgggggatgtgattctggaggtcaatggctaccccgtagggggacagaacgacttagaaaggctgcagcagttgcctgaggccgaaccccctctttgcctgaaattagctgctcgttcactgcgcggactggaggcttggatcccgccaggcgctgccgaggattgggccctggctagtgatctgctgtag

SEQ ID NO: 234225 - DNA, 2310 bp, synthetic construct
  misc_feature 1..2310: note = Description of Artificial Sequence: Synthetic coding sequence
  source 1..2310: mol_type = other DNA
atgggctgcaacatgtgtgtggttcaaaaacctgaggagcaatacaaagttatgctacaggttaatggaaaagaactaagcaagttgagccaggaacagacgctacaggcattgaggtcctctaaggagccactggttattcaggtgctgcgcaggagcccccgacttcggggagacagcagctgccatgatctgcagttggtggatagcggtacgcagaccgacatcactttcgagcacatcatggcgctggggaagcttaggccacccacccctccaatggtgatactcgaaccccctcccatcagtcacgagtactacgatcctgcagaatttatggagggagggccacaagaggccgaccggcttgacgagctggagtacgaggaggtcgaactgtacaagtcttctcacagggataaactgggcctgatggtgtgctacaggactgacgacgaagaagacctgggcatttatgtgggggaggtcaatccaaactccatagcggctaaggatggcagaatcagagagggagaccggatcattcagatcaacggtgtcgacgtccaaaacagagaggaggcagtcgccatcttaagccaggaggagaataccaatatcagcctcctggttgcacgcccagagagccagctcgcaaaaagatggaaggactcagatcgcgatgacttcctggatgactttgggtccgaaaacgagggggaactgagggcgcgtaaacttaaaagtccccctgcccagcaaccgggaaatgaagaggaaaaaggagcccctgacgcagggcctggcctttcaaacagccaggagttggactctggggtgggcaggaccgatgagagcactcgaaatgaggaatcgtccgaacacgacctcctgggagacgagcctccatcctccaccaacaccccaggcagtttgcggaagtttggcctgcaaggcgatgccctgcaatctcgtgatttccacttttcaatggacagcctgctggccgagggcgctggcctgggaggaggtgatgtacctggactcactgacgaagagtatgagcgctaccgtgagctcctggaaataaaatgtcatcttgagaatggcaaccaattaggactcctatttcctcgtgcaagcggcggtaacagtgcactagatgtgaaccgaaatgaatcactgggacacgagatggccatgctggaggaggagctgcggcatttagaatttaaatgccggaatatcctccgggctcagaagatgcagcagctgcgggagcgctgcatgaaagcgtggctgttagaggaggagtccctgtacgacctcgccgcttcagagcctaaaaagcatgaactatcagatatatctgaactccctgaaaaaagtgataaagattccacgtcggcctataacactggagagtcatgtcgcagtactcccctcctcgtggagccgttgcccgaaagccccctgcggcgtgctatggccggaaactccaatctcaatcgcacccccccaggtcctgccgtggcgaccccagccaaggccgctcctccacccggttcccctgccaagttccgttcccttagcagagaccccgaagccggacggagacagcatgcagaggagagaggccgaagaaacccaaaaacaggactgacactggaacgcgttgggcctgaaagcagtccttatctgagccgcagacaccgcggacaagggcaggaaggggagcattaccacagctgcgtgcagttggctcccacgagaggactcgaagagctggggcacggacccctgagcctggccggaggtccgagggtggggggtgtcgcggctgccgctaccgaagccccacggatggaatggaaggtgaaagtgcggagtgatgggacacggtatgtggccaagagacctgtaagggatagactgctgaaggcacgcgctctcaaaatcagagaagagagatcaggcatgaccaccgacgatgacgccgtttctgagatgaagatggggagatactggtcaaaggaagagcgtaagcagcacctgatccgtgccagggagcagagaaaaaggagggaattcatgatgcagtcaagattagaatgcctgcgtgaacagcagaacggcgattccaagccagaacttaatattatcgccttgtctcatagaaagacaatgaaaaagcgcaataagaagattctggacaattggatcacaattcaggagatgctcgcccacggcgcacggagcgcagatgggaagcgggtctacaacccactcctcagtgttactaccgtgtag

SEQ ID NO: 234226 - DNA, 2085 bp, synthetic construct
  misc_feature 1..2085: note = Description of Artificial Sequence: Synthetic coding sequence
  source 1..2085: mol_type = other DNA
atggctcttggtaagcttaggccccctacacctccgatggttatcctcgagccctatgtcctgtctgaactgccaccaattagtcacgagtactacgaccccgctgaattcatggaaggaggcccacaggaggcagacagactcgacgaactggaatacgaggaagtggaactctataagtcttcccaccgggataaactgggcctcatggtatgctacagaacagacgacgaagaagatctcgggatttacgtcggagaagtgaatccgaactctatcgctgctaaggatggcaggatccgagaaggagatcgcatcattcagattaacggcgtggacgtccagaatcgggaagaggccgtggccatcctcagccaagaggagaacacaaatatttctctactggtggccagacctgagagtcagcttgccaagaggtggaaggacagtgatcgagatgattttctcgacgacttcgggagcgagaacgagggagaactaagagctcgtaaacttaaatctccccctgcccagcagcccggtaacgaggaagaaaagggggcaccagacgccggaccaggtctgagtaacagccaagagctagatagcggcgtgggcaggacagatgagtcaacccgcaatgaagagtcctcagagcatgacctgctaggcgacgagcctccttctagtacgaacacgccgggttctctgcgaaagttcggtctgcagggagatgccctgcagagcagagacttccatttttctatggattctctgctagctgaaggggcaggattgggcggaggggacgtcccagggctgaccgatgaggagtacgagaggtatcgagaattgctcgaaattaagtgtcatctggagaatggaaaccagctggggctgctcttcccgagggcttccggtggtaattccgcccttgatgtgaaccggaacgagagtttagggcatgagatggctatgctggaggaggaattgcgtcatttagaatttaagtgtcggaacatcctgagggcccaaaaaatgcagcagctgagggaaaggtgtatgaaagcttggctgctcgaagaagagtctctgtacgatctcgctgctagtgagccaaagaaacacgagttatccgacatcagtgaattgcctgaaaagtcggataaggattcaacatctgcttataacaccggtgaaagctgccggtctacaccgctgctcgtagagcctttgccggaaagccccctcaggcgcgctatggccggaaattccaacctcaaccgaacacctcccggaccagcggtagccacccccgctaaggctgcacctcctccaggcagccccgctaaattccgctcacttagtcgtgatccagaagcagggaggagacagcacgcagaggagcgaggtcgtcgcaacccaaaaaccgggctcactttagagcgggtgggacctgaatcctcaccctacctatcgagacgtcatcgcggacagggacaagagggagaacactatcacagctgtgtccaattagcacctacacggggtttagaggaactggggcatggccctctgtctttggccggtggccctagggttgggggtgtggccgcagccgcaacagaggctccccgaatggagtggaaggtgaaggtcaggtcagacggcacacgctacgtcgctaagcggcctgtccgggatcggttgctcaaggccagggctctgaaaatccgagaagagcggagcggcatgacaaccgacgacgatgccgtgtcggagatgaaaatgggacggtattggtccaaagaggagcgaaagcagcatctgatccgggcacgcgaacagcgcaagaggagggagttcatgatgcagtctcgcctggaatgtcttcgggagcagcaaaacggagattccaaaccagagctgaacatcatcgcactaagccatcgtaaaacgatgaagaagcgtaacaaaaagattttagataactggattaccatacaggagatgctcgcccacggagccaggtccgctgatggcaaacgggtgtacaaccctctgctctccgttacaacagtgtag

SEQ ID NO: 234227 - DNA, 2022 bp, synthetic construct
  misc_feature 1..2022: note = Description of Artificial Sequence: Synthetic coding sequence
  source 1..2022: mol_type = other DNA
atgactgcgccacctatcagtcacgagtactatgatccagccgaattcatggagggaggtccccaggaagcggacagactcgatgagctggaatacgaggaagttgaattatataagtcaagtcatcgtgacaaactaggcctcatggtatgttacaggaccgatgatgaagaggacctgggcatatatgtcggcgaagtgaatccaaactcaatcgccgctaaagacggcaggatccgggagggagacaggattatccaaattaacggggtggatgtgcagaatcgcgaagaagcagtcgcaattctgagtcaggaagaaaataccaatatctcattgttggtggcacgccctgagagtcaattggcgaaacggtggaaagactccgacagggacgactttctggacgattttggcagcgagaatgagggcgaactgagggccaggaagctgaagagcccacccgcacagcagcccggtaatgaagaagagaaaggcgcacccgatgccggaccgggactctcgaattctcaggagcttgactccggggtgggcagaactgatgagtcgacacggaatgaggagtcctctgagcacgatctgttgggtgatgagcctcctagcagtacaaatacacccggttcattaagaaagtttggactgcagggggacgcactccagagtcgggattttcactttagtatggattcactgctcgcagagggtgccggacttggcggaggtgatgttcctggcctgactgacgaggaatacgaaagatacagggagctgctggagatcaagtgccatttggagaatggaaatcagcttggtcttttgttcccccgagcctccgggggtaacagcgctctggacgtcaatcggaatgaaagcctgggacacgagatggccatgttagaggaggagctcagacacctggaattcaagtgccgaaacatcctccgggctcaaaagatgcaacaactcagagagcgctgtatgaaggcatggctcttggaggaagaaagcctttacgaccttgcagcctctgagcctaagaaacatgaactcagcgatataagcgaacttcccgaaaagtcggacaaggattcaacctctgcctataacacgggggaatcctgcaggtcaacacctttgcttgtggaacctctgcctgaaagccccctccggagggcgatggccggtaacagtaatttgaacagaacgccacctggtccagcagtggctacgcctgccaaggcagcaccaccacccggttcccctgctaaattccgatctctaagcagagatcccgaggccggtcgaagacagcacgcagaggagagaggcagacgcaatcctaagacgggactgaccctggagagggtcggtcccgaatcctccccctatctgtcaaggcgccatcgcggacagggacaggagggcgaacattatcacagttgtgtccaactggcaccaacaaggggactggaggagcttggccatggccctctgtctcttgccggaggcccacgggtaggcggtgtcgcagctgccgctactgaagcacctagaatggagtggaaggtgaaggttcggtcagatggtacccgctacgtggctaagagaccagtgagagacaggttactgaaagccagagccctcaaaattcgtgaggagcgcagcggaatgacaacagatgatgatgccgtgagcgaaatgaagatgggtagatactggagcaaggaggaaaggaaacagcatctgattagggctcgtgagcagagaaagcggagagaatttatgatgcaaagccgtctagagtgtctgcgcgaacagcagaacggcgattctaagccagagcttaatattatcgctctctcacacagaaagacgatgaagaagcgaaataaaaagatattagacaattggatcactatccaggagatgctcgctcacggggcaagatccgctgacggcaagagagtgtataaccctttactgtcagtcaccactgtctag

SEQ ID NO: 234228 - DNA, 1983 bp, synthetic construct
  misc_feature 1..1983: note = Description of Artificial Sequence: Synthetic coding sequence
  source 1..1983: mol_type = other DNA
atgggctgcaatatgtgcgtagtgcaaaagccagaggagcaatataaagtaatgctgcaggaagtggagctctataagagctcccacagggataaactcgggctcatggtgtgctacaggacggacgacgaagaggatctcggtatctacgtgggagaagtgaatcctaactcaatcgccgctaaagacggtcgtatcagagagggtgaccggattatccagatcaacggagttgatgtgcagaatcgcgaggaagcagtggctatcctgtcccaggaagaaaacactaatatttctctgctcgtggcccgaccggaatcccagctggcaaagagatggaaggacagcgatagggatgacttccttgatgatttcggaagtgagaatgagggagaactgcgcgctcggaagctgaagagccctcctgctcagcaacccggaaacgaggaggaaaaaggggcacccgatgcaggacccggactttccaactcacaggagcttgactcaggagtgggacggactgacgagtcaactcgcaacgaggagtcaagcgagcacgatctcttgggcgacgaaccaccttctagcacaaacactccaggaagtctgcgcaagttcggccttcagggcgacgctctccagtctcgcgacttccatttttctatggattccttgctggccgagggcgctggcctgggcggaggagatgtacccggtctgacggacgaggaatacgagaggtaccgggaactgcttgaaataaagtgccatctggaaaatggaaaccagctgggtctccttttccccagggcttcaggtggcaattccgctctagatgtcaatcgaaacgagtctctggggcacgagatggcgatgcttgaggaggagctgcgtcacttagagttcaaatgcagaaacatcctgcgcgctcagaaaatgcagcagctgagagagaggtgtatgaaggcctggctgctggaggaggaaagtctgtatgacttggctgccagtgaacctaagaaacacgaactttccgatatcagcgaactgccagaaaagagtgacaaggactctacgtccgcatacaataccggtgaatcctgtaggtcaacacccctgcttgttgaacccctccctgaatcacccctgaggagagcaatggcgggaaactccaatctgaatcggacacctcccggaccagcagtggcaacccccgctaaggctgcgcctcctccgggaagccccgcaaaatttcggtccctctcgcgggaccccgaggcagggagaagacagcacgcagaggagcggggtagaagaaatcccaagactgggctgacattggaacgggtgggccctgaaagttcgccatacctctctcgacgtcaccgcggtcagggacaggaaggagagcattatcattcctgtgtccagctggccccaaccagaggtctcgaggagttaggtcacggaccgttgtccctggcgggagggcctcgcgtcggaggggtagcagcagcagctaccgaagcacctcgtatggagtggaaagttaaggtgcgctctgacgggactagatacgtagcgaagcgccctgtgcgcgaccgactgctaaaagctcgcgcactgaagatcagggaggagcgaagcggtatgaccaccgatgacgacgcagtctccgaaatgaagatgggccgatattggtctaaagaggagcgtaagcagcatcttatcagggcaagagagcagcggaaaaggagggaattcatgatgcaatcccgtctggaatgtctccgggaacaacagaacggagattcgaaacccgagctgaacattattgctctcagccacaggaagacaatgaagaagcggaacaaaaaaatccttgacaactggattacaattcaggagatgctagctcatggagcgcgatctgcagatggtaaacgcgtgtacaatccactcctttccgttaccactgtctag

SEQ ID NO: 234229 - DNA, 1554 bp, synthetic construct
  misc_feature 1..1554: note = Description of Artificial Sequence: Synthetic coding sequence
  source 1..1554: mol_type = other DNA
atggcccagggcttcgccgtcggctttgatcctctgggactaggagacctctccagtggctctctgtccagcctgagtagtcgagggcatcttgggtctgactcaggaagcactgccacacgctatttgttacggaaacagcagaggctgctcaatggacctcctcgaggcatccgggcatcgagccccatgggtcgtgttatactgataaattcccctatcgaagccaactcagatgaatcagatatcattcattctgtgcgtgtggagaaatccccagccggtcgtctgggcttctccgttcgcggagggtctgagcacggcctaggtattttcgtgagtaaggtcgaggagggctccagcgcagaacgggctggcttgtgcgttggagataagataacagaagtgaatgggctcagtctggagtcaactacgatgggtagcgccgtcaaagtcctgacctcttcaagtcgcttgcatatgatggttaggaggatgggaagggttcccggaattaaattctccaaggagaagaccacctgggttgatgtggtcaatcgcagacttgtggtggagaagtgtgggtcaactccctctgatacgagctctgaagacggcgttcgtcgcatcgtgcacctgtacaccacgagcgacgatttttgtctgggattcaacattcggggtggcaaagaatttgggctcgggatctacgtgagtaaagtggatcacgggggactcgcagaggagaacggcattaaggtgggcgatcaggtgctggctgctaatggcgtgcggttcgacgacatatcccacagtcaagcagtggaggtcttgaaaggccaaactcacatcatgctgacaattaaggagaccggccgatacccagcttacaaagaaatggtgtctgagtattgctggctggatcgactgtctaatggcgtgcttcagcagctgtcgccagcttccgagagttctagctctgtcagctcttgtgccagcagcgccccatactcttctggctcgctaccatcagatcggatggacatttgcttgggtcaggaagagcccggaagtagaggacctggttgggggagggcagatacggcaatgcaaacggaaccagatgccggtggcagggtagaaacttggtgttctgtccgcccaaccgtaattctgagggacactgctatcaggtctgacggtcctcaccccggtcggagactggatagcgcgctgagcgagtccccgaaaacagcactgctgctagccctgtcccgtcctcgccctcccattacaagaagccaatcttatttgacactttgggaggagaagcaacagagaaagaaagaaaagtccggctctcctggcgagaaaggcgcattacagagaagcaagaccctgatgaacctcttcttcaagggtgggaggcagggcagactggcccgtgatggacggcgagaagcctggactcttgattctggatcacttgccaaaacctacccacgcctggatattgagaaggagatgggagttagcccctgctgtccaggctag

SEQ ID NO: 234230 - DNA, 3102 bp, synthetic construct
  misc_feature 1..3102: note = Description of Artificial Sequence: Synthetic coding sequence
  source 1..3102: mol_type = other DNA
atggctcaaggcttcgccgttggattcgatcccttaggcctgggagatctaagctctggcagcctgtcttctctgtcctcccgaggccacctgggttctgactcagggagcaccgcaacccgttatctgctccggaagcaacaacgcttgctgaacggacctccccgaggcataagagccagcagtcccatgggacgtgtaatcctgattaacagccctattgaggccaactcagatgagtccgacataattcattccgtacgcgtggaaaagagccccgctggacgacttggattttctgtccggggtggatcggaacacggccttggcattttcgtgtctaaggtggaggaaggcagctccgcagaacgcgctgggctgtgtgtgggggacaaaatcacggaggtaaatgggctgagtcttgaatcaaccaccatgggatctgcagtgaaagtgctcacgtcttcttctcgcctgcacatgatggtgaggagaatgggtcgggtgcctggtattaagttttctaaggaaaagacaacctgggtcgacgtggtaaatcggcgtttagtggttgaaaaatgcggatccacaccaagcgatacaagctccgaagacggagtacgacgcatagtccatttatacaccacaagcgacgacttttgtttggggttcaacattagaggagggaaggaattcggactgggaatctatgttagcaaggtcgatcacgggggactagccgaagaaaacggaatcaaggtcggagaccaagtgttagcggcaaatggtgtccggtttgacgatatttctcactcccaagcagtagaggtgctcaagggccagacccacattatgctgaccataaaggagaccggcaggtatccagcctacaaggaaatggtatcggagtactgctggctggaccgactgtccaatggagtgctccagcagctgagccccgcttcagagtcttcctccagcgtctcaagttgtgctagcagcgccccttattcttctgggtccctgcctagtgacaggatggacatctgcctgggacaggaagaaccagggtcaagaggccctggttggggtcgggctgacaccgcaatgcaaaccgagccagatgctggaggtagagtcgagacctggtgcagcgtgcgtcctacagtcattttgagggatacggcgatacggtccgatggcccacacccaggtagaaggctagacagtgccctgtccgaatctcccaagaccgcccttttgttggctttgagccggccacgcccacccatcacacgatcccagagttatctgaccttatgggaagagaagcagcaaaggaaaaaagagaagtctggaagccccggtgaaaagggggctctccagaggagcaagactcttatgaatttgttctttaaaggagggcgacaggggagactggcccgtgacggacggagagaagcctggactctcgactcaggttcgctggcgaaaacgtaccctcgattggatatcgaaaaagcaggaggcgtgggccctgtgcagaaatttgtgacatggcgattgcgtagggatcaggagcgcggacgcgctcttctctcagccaggagcgggtctccatcttcacaattacccaacgtcgatgaacaagttcaggcatgggagtctcgacgacccctgattcaggatctggctcaacggctcctgaccgacgatgaggtgctggccgtgacccgacattgttccaggtacgtgcatgagggagggatagaagacctggtacggccactcctcgcaattttagatcgtcccgagaagctccttctccttcaggacataaggtccgtcgtggcccctacagacctcggtagattcgattcaatggtcatgctagtggagcttgaggctttcgaggctctaaagagcagggcagtgaggcctccggcattgcggcctgcacggcaggacacgccacccaagcgtcacctcatcactcccgtgcctgactctcgtggaggattctacttgctccccgtcaacggttttcccgaagaagaggataatggcgaactgcgagaacggctgggcgctctaaaagttagtcccagcgcttcggccccacggcaccctcacaaaggcattccgcctctgcaggacgtaccagtcgacgcctttacccctcttaggatagcctgcaccccaccccctcaactaccccctgtcgcaccgagaccactccggccaaattggcttttgacagaacccttgtctcgagagcaccctccgcagtctcagatccgcggtcgcgctcaatccaggtcacggtctcgaagccgatcccgatccaggagttctaggggacagggaaagtcccccggtcggagaagtcccagtcccgttccgacccctgctccctctatgacgaacggaagataccacaaaccgaggaaagctaggccacccttgcctcgccctctggacggagaggcagccaaggtaggtgctaaacagggtccaagcgaatctggcaccgagggcaccgccaaagaagccgcaatgaagaatccatcgggtgaattgaagacggtgaccttgtccaagatgaagcagtcgctcggcatctccataagcggaggtatagaaagcaaagttcaaccgatggtgaagattgagaagatcttccctggcggagcagcctttctttccggggcactacaggctggctttgagctggttgctgtggacggggagaacctggaacaggtgactcaccagcgagccgtagataccattagacgtgcgtataggaataaagccagggaacccatggagctggtggtccgggttcccggtccctccccacggccatcaccaagtgacagcagtgctttaaccgacggcggtctgccagcagaccatctgcctgcccaccagcctttagatgcggctccagttccagcgcactggctgccggaaccaccaacaaatccacagactccccctaccgacgctcgcctgttacagcctactcccagcccggctccaagtcccgctcttcagacccctgactccaagccagcgcctagccctcgaataccttag

SEQ ID NO: 234231 - DNA, 627 bp, synthetic construct
  misc_feature 1..627: note = Description of Artificial Sequence: Synthetic coding sequence
  source 1..627: mol_type = other DNA
tgaccacgaccacctatcacaaggagccagagctacctcaccctgtgggaagagaaacagcagagaaagaaagaaaagagtggatcccccggtgagaaaggagccctacagcggtcaaagaccttgatgaacctgtttttcaaggggggtagacagggcagattggcaagagacggcagaagggaggcctggaccttggatagtggctccctggcaaagacctacccaagacttgatatcgaaaaagctggtggagtgggcccagtacagaaattcgttacttggcgtctgcggagggaccaggagagaggtagggccttgctgagcgcaaggtctggatcaccctcttcccagcttcctaacgtggacgagcaggtgcaagcctgggagtccaggcggcctctgattcaggatctggcacaaaggctgcttacagatgatgaggtgctggctgtcaccaggcactgctcacgctatgttcacgagggtggtatcgaagacctcgtgcgacctctgctcgccatcttggacaggcctgaaaaactcctgctgctgcaggacatccgctcggtagtggcccctacagatcttggacgcttcgatagcatggtgatgctggtcgagtag

SEQ ID NO: 234232 - DNA, 3465 bp, synthetic construct
  misc_feature 1..3465: note = Description of Artificial Sequence: Synthetic coding sequence
  source 1..3465: mol_type = other DNA
atgggactgctcttgatgatcctagcctcagccgtgttggggtcattcctgactctgctggctcagttttttttattatataggcggcagccggagccacctgcagatgaagctgctagggccggagagggattccggtacatcaaacctgtgcccggactgcttttgcgggagtatctgtacggaggcggtcgggatgaggagcccagcggtgccgctccagaaggtggggctacccccaccgccgctcccgagacaccagctccccctactcgcgaaacctgttacttcctgaatgcaaccattctcttcctgtttagagaacttagagacactgctcttactagacggtgggtcactaaaaagattaaggtggagttcgaggaacttctgcagaccaagacggcaggaagacttctcgagggactgagcctccgggacgtgtttttaggggagaccgtgccctttatcaagactatcaggttggtgcggcctgtagtccctagtgcaacgggcgagccggatggaccagagggtgaggccttacccgcagcttgccccgaggagctagcttttgaggccgaggtagagtacaatgggggtttccatctggcaatcgatgttgacttggtgttcggaaagtccgcctacttgttcgtaaaactgtctcgcgtcgtaggacgtttgaggctcgtctttaccagggtcccctttacacactggttcttctcatttgtagaagaccctctgattgacttcgaggtgaggtcacagttcgagggcagaccgatgccacaactgacaagcatcatcgtgaaccagttaaaaaaaattattaagaggaagcacacgctgccgaactataaaatcagatttaagcctttcttcccatatcagaccctgcagggattcgaggaagacgaggagcatattcacatccaacagtgggcgctgacagagggacgattaaaggtaacgctcctggagtgcagtcggctgttaatatttggtagctacgatcgtgaggcaaacgtgcactgcacacttgagctgtcatctagcgtttgggaggagaagcagcgcagcagtatcaaaacagtcgaacttatcaagggcaatttacagtccgtaggtcttaccctacgactggtccagtccactgatggatatgccggtcacgtgattatagaaaccgtcgccccaaactctccggctgccatcgcagatctccagcgaggggataggcttatcgctattggcggtgtgaagattacatccaccttacaagtgctgaagctgataaaacaggcgggtgacagggttctggtgtactatgaaaggccggtggggcagtctaaccagggcgctgtcctgcaggacaattttggccagctcgaggagaatttcctctcatcctcctgccagtccggctacgaggaggaggctgcgggtctgaccgtcgacacagaaagtagagagttggacagtgaatttgaagacctggctagtgatgtgcgcgctcagaatgaatttaaggatgaggctcaaagcctgtctcactcccccaagcgcgtgcctaccacactgagtatcaagcctctgggggctattagtcctgttctgaacagaaaacttgctgtgggcagtcaccccctgccgccaaaaatccagtctaaagacgggaataaaccacctcccctcaaaacatctgagattactgatcccgctcaagtgagcaaacccacacagggttcagccttcaagccccctgtaccgcctcgaccccaagcgaaagtacccctaccatccgccgatgcccctaaccaggcggagcccgacgtcttagtagagaaacccgagaaagttgtgcctccacctctcgtcgataagagcgctgagaagcaggccaaaaacgttgacgccatcgacgacgccgcagctcccaaacaatttctggctaaacaggaagttgcgaaggacgtgacgtcagaaaccagctgccccaccaaagatagctccgacgacaggcaaacatgggaaagcagcgagatcctgtatcgcaataaactaggaaaatggactcggaccagagccagctgtttatttgacatcgaggcttgccaccgctacctgaacatcgcattgtggtgtcgagatccatttaaacttggtgggcttatatgcttgggccacgtgtctttgaagctggaggatgtagctttggggtgtctggcaacttccaacaccgagtatctgtcaaagttaagactggaggcgccatctccaaaagccatagttacaagaacggctctgcgtaatttatctatgcaaaagggcttcaacgacaaattttgttacggcgatatcacaatccattttaagtacctcaaagagggagagtcagatcaccacgtcgttactaatgtggagaaggagaaggaaccacatctggtggaagaggtgtcggtgctcccaaaggaggaacaattcgtgggccagatgggactaactgaaaataagcattcgtttcaggacacccagtttcaaaatcctacctggtgcgactattgtaaaaaaaaagtttggaccaaagcagcctcacagtgtatgttctgtgcctatgtttgccataagaaatgtcaagagaagtgccttgctgagacgagcgtctgcggcgctaccgacagaaggattgacaggaccctgaaaaatctccgcttggagggacaggagacccttctgggtttacctcccagagtggatgccgaagcgtcaaaaagtgtgaacaagaccaccggcctgacccgtcacatcataaacacctcctctcgactgctgaacctcagacaagtttccaaaacccggctaagtgagccaggaactgatctggttgagccctcccctaagcatacacccaatacttcagataacgaaggcagcgatacagaagtgtgcggccctaactctccctccaagcggggaaatagcacgggcattaagctggttcgtaaggaggggggactcgatgactctgtgtttatagctgtgaaggaaatcgggagggacttataccgaggactccctaccgaggagagaatccagaaacttgagttcatgttggacaagttgcaaaacgagatcgatcaagaactcgaacacaataatagcctggtgcgagaagagaaggaaaccaccgacacccgaaagaagagcctcttaagtgcagctctggctaaatcaggcgagaggctgcaggctttaacactgctgatgatccattatagggctggcatcgaggacatcgagaccttagaaagcctttctctggaccagcatagtaagaagattagcaaatatactgacgacaccgaggaggacctggacaatgagatttcccaattgatcgattcccagcccttctcaagtatttctgacgacctttttggcccttcagagtccgtctag

SEQ ID NO: 234233 - DNA, 3201 bp, synthetic construct
  misc_feature 1..3201: note = Description of Artificial Sequence: Synthetic coding sequence
  source 1..3201: mol_type = other DNA
atgggtttcgagctggacaggttcgatggtgatgtggatcccgatttgaagtgtgccctatgccacaaggtgttagaggaccctctgaccaccccgtgcggccacgtgttctgtgccggatgtgtattgccctgggtggtccaggaggggtcatgtccggctagatgccggggtagactgagcgccaaagagctcaaccacgttctgcccctcaagcggttgatattgaagctcgatataaagtgcgcatacgccactcggggatgcggacgggtggttaagttgcagcaacttcccgagcatctggaacggtgcgacttcgcgccagccaggtgcagacatgctggatgcgggcaggtcctgcttcggcgagatgtggaagcccacatgcgcgacgcctgcgacgccagaccagtcggaaggtgccaggagggctgcggtttacccctaactcatggcgaacagcgagcgggaggacattgctgtgctcgcgcactgagagcccacaacggcgctctccaagcaagactaggcgcacttcataaggcactcaaaaaggaagctctgagagccggaaagcgcgaaaagagcctagtcgctcagcttgccgctgctcagcttgaactgcagatgacagcactgaggtatcaaaagaagttcacagagtatagcgccagattagacagcttaagcaggtgcgtcgcagcccctcccggagggaaaggagaagagacgaaaagcctaaccctggtgctgcaccgggactccgggtcactcggattcaacatcattggcggtcgcccaagcgttgataaccacgatggttcctcgagcgaaggaatcttcgtgtctaagatcgtagattctggccctgccgctaaagagggcggactgcagatccacgaccggattattgaggtcaacgggcgagacttgtctcgcgctactcatgatcaggctgttgaggcatttaaaaccgccaaggagccgattgtggtgcaagttcttaggcgcacaccccgaaccaaaatgtttaccccccctagcgagtcacagttggtggatacaggaactcagaccgacatcacttttgaacatatcatggccctcactaagatgtcttcaccgagcccaccagtcttggacccatacctgttgcccgaagagcacccctctgctcatgaatactatgacccaaatgattatatcggagacattcaccaggagatggatcgagaggagttggagcttgaggaggttgatctgtatcggatgaactctcaggataaactcggactgaccgtgtgttatagaacagacgacgaggacgacatagggatttacatctccgagatcgatcctaatagcatcgccgcaaaggatggcagaatcagagagggtgacagaattatccaaataaacggcattgaagtgcagaaccgggaggaagcggtggctttgctcactagtgaggaaaataaaaatttttcccttctgatcgctagaccggaattgcagctggatgagggatggatggacgatgacaggaacgacttcctcgacgacttacatatggacatgttagaagaacagcaccaccaggctatgcagttcacagcctcagtcctgcagcagaaaaaacatgacgaagacgggggtaccacagatacagcaacaatcctctccaatcagcacgagaaggacagtggcgtagggagaaccgacgaaagtactcgtaacgacgaaagtagtgaacaggagaacaacggagacgacgcaaccgcctcctcgaatcccctggccggtcagaggaaattgacctgcagccaagacaccctgggctccggcgacctgccatttagtaatgagtcgttcataagcgccgattgtaccgacgccgactacctgggcatccccgtagacgaatgtgaacgattccgggagcttctggaactcaagtgccaagttaagtctgctacaccgtacgggctgtattacccaagcggcccactggatgcaggcaaatccgatcccgagtctgtcgacaaggaattggagttgctcaacgaagagctgcgctcaatcgaactggagtgtctctcaattgtcagagcccacaaaatgcagcaacttaaggagcaataccgagagtcttggatgctccataactcgggtttccgaaattataacacctcgatcgacgtgcgccgtcacgagctctcagacatcaccgaattgcctgaaaaaagtgacaaagattcatcctctgcatacaacaccggtgagtcttgccggtcgacaccgctgaccctggagatcagtcccgataattccctgaggcgcgcagccgaggggattagttgtccttcttccgagggggctgtgggtacaacggaggcctacggccctgcctccaagaatctgctgtctatcaccgaggatcccgaggtcggaactcccacctacagtcctagcctgaaagagctcgaccctaatcagccccttgaatcaaaagaaaggagagcgagcgatggatctcgcagtccaacaccatcgcagaagctgggatccgcctatctgcccagctatcatcacagcccgtacaaacatgcccacatacctgcccacgctcaacattaccagtcctatatgcaattgattcagcaaaaatcggccgttgaatacgcccagtcgcagatgagcttggtaagtatgtgtaaagacctgtcatcccctactccctccgaacccagaatggaatggaaggtaaaaatccggtcagacggcaccagatatattacaaaacgacccgttcgggatagattactccgtgagcgcgcactgaaaatccgcgaggaaagatcgggcatgactaccgatgacgatgctgtcagcgagatgaagatgggcaggtattggtccaaggaagaaaggaagcaacatcttgtgaaggccaaggagcagcgcaggagacgcgagtttatgatgcagtcacgcttagactgcttaaaagaacaacaggctgcagatgaccgtaaggagatgaacattctggagctctcacacaagaaaatgatgaagaaaagaaataaaaaaatctttgataattggatgaccatacaggaactcttgactcacggaactaagtcacccgacggaacccgcgtgtataattcctttctcagcgttaccacagtgtag

SEQ ID NO: 234234 - DNA, 2190 bp, synthetic construct
  misc_feature 1..2190: note = Description of Artificial Sequence: Synthetic coding sequence
  source 1..2190: mol_type = other DNA
atgggatttgagctggacagatttgatggggatgtggatcccgacttgaagtgtgccctatgtcacaaggtgcttgaagaccctctgactaccccctgtggacatgtgttctgcgctggctgcgtcctaccttgggtcgttcaggaaggttcttgtcctgccagatgccgcggtcggctgtctgctaaggagctgaatcacgtactccccctgaagaggctgatcttgaaattggacatcaagtgtgcatacgctactcgaggctgcggaagggtggtgaaactgcaacagctacctgagcatttggaaaggtgcgacttcgcccctgcgaggtgcagacatgccggatgtggccaggtcttactgagacgcgatgttgaagctcacatgcgcgatgcatgtgatgccaggccggtcggtcggtgccaggagggatgtggccttcctctcacccacggcgagcaaagggctggtggacattgctgcgccagggcactacgcgcacacaacggtgccttacaggctcgcctgggcgcactgcacaaagccctcaagaaagaggctctgagagcgggtaagcgggagaagtccctggtggcacaattagccgcagctcagcttgagctccagatgacagccctgcgctatcaaaaaaaattcacggaatacagcgccagactggactccttatctaggtgtgttgcagcgccaccagggggtaaaggcgaggaaactaagtctctgacactcgtcctacatagggattcggggtcgcttggattcaacatcattggcggaagaccctcggtggacaatcatgacggatcaagtagtgaaggaatttttgtctccaaaatcgtagattccggtccagcagcaaaagaaggtggcctgcagattcatgatagaatcatcgaggtgaatggccgagacctctcgcgagctacccacgaccaggctgtcgaagcatttaagacagccaaagagccgattgtcgttcaggtgttaagaaggacacctcgaactaagatgtttacccctccctccgagagtcagctagtggatactggcacacagactgatattacctttgagcatatcatggcgctgaccaagatgagctctccttcacctccggtgctggacccttatttgctgcctgaggaacatccatctgctcacgagtattatgaccctaacgattacattggcgacatccaccaggaaatggatcgcgaggaactcgagttggaagaggttgacctgtacagaatgaattcccaggataaactgggcctcacggtctgctatcgaaccgacgacgaagatgatattgggatatacatcagtgagattgatccaaattctatcgccgctaaggatgggagaatacgggagggagacagaataatacagatcaacggaatagaagtccaaaaccgggaagaggccgtggccttattaaccagtgaagaaaataaaaatttcagccttctcatcgctaggcccgaactacagctcgatgaaggatggatggacgatgaccgcaatgattttttggatgatttacacatggacatgctcgaggaacagcaccaccaggcgatgcagttcactgcttccgtcctgcaacagaagaagcacgacgaggacggtgggaccaccgacacagccacaatcctgagcaaccagcacgagaaggatagcggcgttggaagaactgacgaaagcacccgtaacgatgaaagcagtgaacaggagaataacggcgatgatgctactgcttccagcaatccacttgctggacaacgtaaactaacatgctctcaggatacactgggctctggagatctgccattttcaaacgaatccttcattagcgcggactgtacggacgccgattacttggggatccccgtggagggcgaagatcctcagcgcagagacgcacttcatcaccaggaggcacgtgcgggaccccctgcagccggagcaaggccagaagatcccggaagagcacagcggcatgatcaccggagaagacgcggagaacgggatgaagatggagcactgctcgagcaaggaggagaggaagccgctcccggagaaggacagggcgctgccgctgccgcacgcgtccatgatgcagagcaagtgggcctgtctcagggtgccgctagcagtcgctag

SEQ ID NO: 234235 - DNA, 2352 bp, synthetic construct
  misc_feature 1..2352: note = Description of Artificial Sequence: Synthetic coding sequence
  source 1..2352: mol_type = other DNA
atgggttgttcactttgctctcttcagaagcaggaggagcaatacaagcttttgtatgaagtctgccaagtaaatggaagagacctgtcaagggcaacccacgaccaagccgtggaggcctttaaaactgctaaggagcctattgtagtgcaggtgctcagaagaaccccgagaaccaaaatgtttacaccgccatccgaaagtcaactggtcgacaccggcacccagactgatataacattcgaacatatcatggccctgaccaaaatgtcatccccttcccccccagtcctggatccatatctgctgcctgaagagcatccttcggctcacgaatattacgacccgaatgattacattggggacattcatcaggagatggaccgggaggaactcgaactagaggaggtagacctgtaccgaatgaactcccaggataagctgggtctcacggtgtgttatagaactgacgacgaagacgatatcggaatttatatatcggagattgaccctaattctatcgcagctaaagacggacgcatcagggagggtgatcgtatcatccagatcaatggtatcgaagttcaaaacagagaggaggcggtggccctactgacttctgaggagaataagaactttagcctgttgattgcacgaccggagctacagcttgatgagggatggatggatgatgatagaaatgacttcttagacgacctacatatggacatgctggaagagcagcatcatcaggcaatgcaatttaccgccagtgtcctgcagcagaagaaacatgacgaagacgggggtaccacagacactgccaccatactcagcaaccaacacgaaaaggactccggagtgggcagaactgatgagtctacgagaaatgacgaatcttcagagcaggagaacaacggtgacgacgcgacagcttcctccaaccctctggccggtcagagaaagctcacatgcagccaggacaccctgggctccggcgatttgcccttctcaaacgagtccttcatctctgccgattgtactgatgccgattatctgggcattccagtggatgagtgcgagagattccgggagctgctagaactgaaatgtcaggtgaaaagcgctactccttacggcctttattacccttctgggccactcgacgccggtaaatctgacccagaaagcgttgacaaagaactggagctgctgaatgaggaacttcgatctattgaactggagtgtctttctattgtgagagcgcacaaaatgcagcaattaaaagagcagtatagggagtcctggatgctgcacaattccgggtttagaaactataacacttctattgacgtaaggaggcacgaattgtctgacattacagagttacccgaaaaaagcgacaaggattctagcagtgcctataacaccggcgaaagttgtcgcagcacccctcttaccttggagatttcacctgataattctctgcgccgagctgcagaaggtatctcctgcccttcaagcgagggggcagttggcaccaccgaagcatatgggcctgcaagcaaaaacctactgagtataaccgaggatccggaggtgggtacgcctacttactcaccatccctgaaagagctcgaccctaaccagccgctggaaagtaaggagaggcgggctagcgatggctcacgctcccctactccaagccagaaattgggctccgcgtacctgcccagctaccaccacagcccttataaacacgcccatatcccggcacacgcgcaacactatcagtcttatatgcagctgatccagcaaaaatccgccgttgaatacgcccaatctcagatgtcactggtgagcatgtgtaaggacttgtcttctcctacaccatctgagcctagaatggagtggaaagtgaagatccgcagtgacggaactcgctacatcaccaagcgccctgttcgcgataggctactgcgcgagcgcgcacttaaaattagagaggaacgctcaggaatgacaacggatgacgatgcagtatctgagatgaaaatgggcaggtactggagtaaggaagagcggaagcagcatttggtcaaggcgaaggagcagcgacggcgtagggagtttatgatgcagtcgagactggattgcctgaaggaacagcaagctgctgacgaccggaaagaaatgaacatcctcgaactaagccacaaaaagatgatgaagaagcgaaacaagaaaatttttgacaactggatgactattcaggaactactgacccacggtacaaaatcccctgatgggacccgggtgtataattctttcctcagcgtgaccaccgtgtag

SEQ ID NO: 234236 - DNA, 2367 bp, synthetic construct
  misc_feature 1..2367: note = Description of Artificial Sequence: Synthetic coding sequence
  source 1..2367: mol_type = other DNA
atgaaaatggagcataagaggatgatccttctgttttccaaattcaccttgatacacaaaccgcacggtgggagatggtatttggtgaatggacgggacctatcccgcgcaactcatgatcaggcggtagaggcctttaaaactgccaaggagccgatagttgtccaggtgctgagacgcacacctcggaccaaaatgttcacccctccaagcgaatcccagctagtggataccgggactcaaacagatattacttttgagcatattatggctcttaccaaaatgagttccccctccccccctgtactggatccctatctgttgccagaggagcacccctccgcccacgagtactacgatcctaacgactatatcggggatatacaccaagagatggacagggaagaactcgaactggaagaggttgatctttatcggatgaatagccaggacaaactggggctgaccgtctgctatagaactgatgacgaggatgatataggtatttacatctcggaaattgatcccaatagtatcgcggcaaaggacggcaggatcagagagggggacaggatcattcagataaatgggatcgaggtacagaaccgcgaggaggctgtcgccctgctcacctccgaagaaaacaaaaatttctctctgctcatagcccgtcccgagctccagcttgatgagggttggatggacgatgacaggaacgacttcctggatgacttgcacatggacatgttagaagagcaacatcatcaggctatgcagtttaccgcctccgtcctgcagcagaagaaacacgatgaggacggtggtactacagacaccgctactatactgagcaatcaacacgaaaaggattctggggtcggccgaactgatgaaagtacccgaaacgatgagtcatcagagcaggaaaacaatggggacgacgcgacagcctcatccaatccgcttgcgggacagcgtaagctgacatgctcacaagataccctcggctcaggagatttaccattcagcaatgagtcctttatcagcgcagactgcactgatgctgactacctcggcatcccggtggatgaatgcgagaggtttagggaattactcgaacttaagtgccaagtcaaatccgcgactccatacggattatactatccgtctggaccattggacgcagggaagagcgatccagagtctgtcgataaagagctggagctgctcaatgaagagttaaggtccattgaacttgagtgcctctccatcgtcagagcccacaaaatgcagcagcttaaagagcagtaccgcgaaagctggatgttacacaattcgggctttcgcaactacaacacatccattgacgtcagaagacacgagctaagcgacataaccgagttgccagaaaaaagcgacaaggactccagttctgcttataataccggggaatcttgccggtccaccccattgaccctggagatctcccccgataactcactacggagagctgctgaaggaattagctgtccctcctccgagggcgcagtgggcaccacagaggcttacggacctgcctcaaaaaatcttctgagtattacagaggatccagaggtaggtactcccacatacagccctagtttaaaggaattggatcctaaccaacccctagagagcaaagaacgcagagctagcgatgggagtcggtcgcccactccatcccagaagctggggagcgcctacttgccgtcctatcatcactcaccctacaagcacgctcacattcccgctcatgcccagcattatcagtcatatatgcagttgattcagcaaaagagtgcagtggaatacgcgcagtcccagatgagcttggtgagtatgtgcaaagatctctcctcaccaacaccgagcgaaccacgcatggaatggaaggtcaaaatcagatctgacggcaccaggtacatcacaaaaagacctgtacgagatagactactgagggagagagccctcaagatcagggaggagcgttcgggcatgaccactgatgatgacgccgtaagcgagatgaagatgggaagatattggagtaaagaagagcgaaagcagcatttggtcaaagcaaaggagcagcgtcgcagaagagagtttatgatgcagtctaggctcgattgcttgaaagagcagcaggctgctgacgaccgaaaagaaatgaacatactcgagctgagccacaagaagatgatgaagaaacgaaataagaaaatctttgataactggatgactatccaggaacttctgacacatggcacaaagtcacctgacgggacgcgcgtctacaattcctttttaagcgtaaccaccgtttag

SEQ ID NO: 234237 - DNA, 2331 bp, synthetic construct
  misc_feature 1..2331: note = Description of Artificial Sequence: Synthetic coding sequence
  source 1..2331: mol_type = other DNA
atgtccggaaagagacagttttttctcaagcctctcgctctgctcacttgttggccttccaccgtgaatggcaaagacctgtcgaaggccacacacgaagaggccgtcgaggcattcaggaatgctaaagagccaattgtggtccaggttctccggagaacccccttgtccaggccggcttatggaatggcatctgaagtgcaactcatgaatgcctccacacagacggacattacctttgagcatatcatggcgcttgccaagttacgccctccaactccccctgttcccgatatttgtccatttctgctcagcgatagctgccactcccttcaccctatggaacacgagttctatgaagataatgagtacatttcctctcttccagccgacgcagaccggaccgaggatttcgagtatgaggaagtcgagctctgccgggtgagctctcaggaaaagctcggtcttaccgtttgctaccgaaccgacgatgaagaagacaccgggatatacgttagtgaagtcgaccccaactcaatcgctgccaaagacggtaggatccgggagggagaccgtattctgcaaatcaatggggaagatgtgcagaatagagaggaggctgtcgcactgctgagcaacgacgaatgcaagaggattgtcctgctggtcgctcgcccagaaatccagctggatgaagggtggcttgaggatgagagaaacgaatttctcgaagagctgaatctggagatgctggaggaagagcacaacgaagccatgcagcctaccgcgaacgaagtcgagcagccaaagaagcaggaagaagaggagggcacaaccgatacagcaaccagcagcagtaataaccacgagaaggactccggggtgggccgtactgatgaatcgctgcgtaatgacgaatctagtgagcaggagaatgcggcagaggatcccaatagcaccagcttgaagagcaagcgggacctgggccagtcgcaggacactctggggtctgtggagctgcagtataacgaatctcttgttagcggagagtacatcgactccgattgcattgggaatcctgacgaggattgtgaaagattccgccaactgctggaacttaagtgcaagattcgcaatcacggagagtatgacctgtactactcatccagcacaatagagtgcaatcagggtgaacaggaaggtgttgagcacgagctgcagttgctgaatgaggagttaagaaatatagagctagaatgtcagaacattatgcaggcccataggctccagaaggtgactgatcagtatggagacatatggacattgcacgacgggggtttccgcaattataatacttctatagacatgcagcgtggaaaactggacgacattatggagcaccccgaaaagagtgataaggatagttcaagcgcctataacactgcagaatcttgccgttcaacgccactgaccgtggataggagcccggattcttcgctccctagagttattaatctcaccaataaaaaaaacctgaggtctacaatggctgcgacccagtcctcgtccgggcaatcctccaaggagtcaacaagtaccaaggctaagactacggagcaaggatgcagtgctgaatcgaaggagaaggtgctggagggtagtaaattgcctgaccaggaaaaggccgtgagcgagcacattccctacctgtccccctatcactcatccagttatcgttacgccaacattcctgcccatgcgaggcattaccagtcttacatgcaactaatccaacaaaaatcagctgtggaatacgctcaatcccagctgtccctagttagcatgtgcaaagaaagtcagaaatgcagcgaacccaaaatggagtggaaagtcaaaatccgctccgacggaacccggtacatcaccaagcgacctgttcgtgataggattcttaaggagagggcgcttaaaataaaagaggagaggtccggcatgacaacagacgacgatactatgtctgagatgaagatgggtcgatattggagtaaagaggaaaggaagcagcatctggtcagggccaaggagcagcggcgaagacgtgaattcatgatgagatcaagactggaatgtctaaaagaatcgccccagagcgggagcgaagggaagaaggagattaacattatcgaattgagtcataagaaaatgatgaagaagcgaaataaaaagatcttggataactggatgacaatacaagagctgatgactcatggcgctaagtcccccgacgggactcgagttcacaacgctttcctttcagtgactaccgtgtag

SEQ ID NO: 234238 - DNA, 3111 bp, synthetic construct
  misc_feature 1..3111: note = Description of Artificial Sequence: Synthetic coding sequence
  source 1..3111: mol_type = other DNA
atgggctttgcccttgaaagattcgccgaggccgttgaccctgcactggaatgcaagctctgcggccaggttctggaggagcccttatgtacaccgtgtggtcacgtgttctgtgcctcatgcttgctcccatgggccgtgcgcagaaggcggtgcccactgcagtgtcaaccactggccccaggcgagctctatagggtgctgccacttaggtctctgatccaaaagctgagagtacaatgtgactatcgcgctcggggttgtgggcactcggtgcgtctgcatgaactagaggcccatgtagagcattgcgacttcggccctgccaggcggctaagatcccgaggtggatgtgctagcgggctaggaggcggtgaagttccagctcggggagggtgtggacccacccctcgtgcgggaagaggtggtggcgctagggggggaccaccgggagggagatggggcagagggagggggcctggcccacgggtcctggcctggcgccgtcgggagaaagcactgcttgcacaactttgggccctgcagggggaggtgcagctgacggccagaagatatcaagaaaagtttacacagtatatggcccatgtccgcaatttcgtcggtgacctcggcggaggtcatcgcagagatggggaacataaaccctttaccattgtgctggagagggaaaatgataccttaggctttaatataatcggcggaaggccaaaccagaacaaccaggagggcacgtctaccgaagggatttacgtctctaaaatcctggagaacgggccagctgatcgtgctgatgggctggagattcatgacaagattatggaagtcaatggtaaagatctgtccaaggctactcacgaagaggccgttgaagctttcagaaatgccaaagagcccattgtggtgcaggttttgcgcaggaccccgctgtcacggccagcctacggaatggcatctgaagtgcaactgatgaatgcttctacccagacggacattacttttgaacatattatggcccttgccaagttgaggccacccacaccccctgttccagacatatgtccattcttgcttagcgatagctgtcactcattacacccaatggagcatgaattttatgaggataacgagtatatttcttctctccctgctgacgcagacagaactgaagatttcgagtatgaggaggtggagctctgtagggtgtcttctcaggagaaactggggttgactgtttgctatcgcaccgacgacgaggaggacactggcatctatgtatctgaggtggatcccaattcaatcgccgcaaaagacggccgaatcagggagggggaccgaatcctgcaaattaatggcgaggatgtccagaaccgagaagaagcagtagcactgcttagtaatgatgagtgtaagagaattgtgctgctggtcgcccgaccagaaatccagctggacgagggatggctcgaagatgaaaggaatgaatttctagaggagttgaatctcgagatgctggaggaagagcacaacgaagccatgcagccaactgcgaatgaggttgagcaacccaaaaagcaggaagaggaggaaggtactacagacacagcgacctctagctcgaacaatcacgagaaagattcgggcgtgggacgaaccgacgaaagtctacgcaatgacgagagttctgaacaggaaaacgctgccgaagaccccaactcaacatcactgaagtcaaaacgcgacctggggcaatctcaagacactcttgggagtgtagaattgcaatataatgagagcctggtgagcggggagtacatcgacagtgattgcataggcaatccagacgaggattgtgaacggtttaggcagctgctcgagcttaaatgtaagatacggaaccacggagagtacgacctctattactcgagttcaacgatagagtgcaatcagggggagcaggagggagtcgagcatgagcttcagctcctaaacgaggagttgagaaacatcgaactcgaatgtcagaatattatgcaggctcaccgactccagaaagttactgaccagtatggtgatatctggaccctgcatgacggcggattcaggaactacaacactagtatcgacatgcaaagaggcaagcttgatgacatcatggaacatccagaaaagtcagacaaagatagctcctctgcctataacaccgccgaatcgtgtagatccacccccctcactgtcgatcgcagtccagattcgagcctacccagggtgatcaacctcacaaacaagaagaaccttcggtccacgatggctgccacccaatctagtagcggacagagcagcaaggagagtacatcaactaaggcaaagaccacagagcagggctgcagcgctgaatcaaaagaaaaggtgctcgagggctccaaattgccagatcaggagaaggctgtgtctgagcatattccttatctgtctccctatcatagcagcagttatagatacgccaatattcctgctcacgccagacattaccagagctatatgcaactgatccagcaaaagtcagctgtggaatatgctcaaagccaactcagtttggtgtcgatgtgcaaggagagccagaagtgttcagagcccaagatggagtggaaggtaaaaatcaggtctgatggaacccggtacatcaccaaacgacctgtgagagatagaatccttaaagaaagagccctcaaaattaaagaagaacgaagcgggatgacaacggacgacgacacaatgtccgaaatgaaaatgggacggtattggagcaaagaggaaagaaaacaacatttggttcgtgcgaaggagcagagaaggaggcgggaatttatgatgagaagccgtctagaatgcctgaaagagagcccccaaagcggttccgaaggcaagaaagaaatcaacatcattgagctgtcccacaagaagatgatgaaaaagcgtaataagaagattctggacaactggatgactattcaggagttaatgacacatggagccaagtcaccggatggaacaagggtccacaacgcgttcctatcagtaacgactgtgtag

SEQ ID NO: 234239 - DNA, 2337 bp, synthetic construct
  misc_feature 1..2337: note = Description of Artificial Sequence: Synthetic coding sequence
  source 1..2337: mol_type = other DNA
atgggatgcaatctgtgtacttttcagaaacgcgaggagcactacaagctgctttatgaggtctctcaggtgaatgggaaagatctcagcaaggccacccatgaggaggccgtcgaggcattcaggaacgccaaggaacctatagtggtgcaggtgctgcgccgtacacccctgagtaggcctgcttacgggatggccagcgaggtgcagttgatgaacgcgtcgacccagactgacattaccttcgagcatatcatggctcttgccaaactgaggcctcctactcccccagtgcccgacatttgtccattcctgttatcagatagctgtcactccctccatccgatggaacatgagttctacgaggataatgagtacatttcaagtctacccgcagatgcagaccgaaccgaggacttcgagtacgaagaagtcgaattgtgccgcgtgtcttcacaggagaaactggggctgaccgtgtgctacagaactgacgacgaggaggacacaggaatatacgtgtctgaggtcgacccaaattccattgcggctaaggacggcaggattagggagggtgatcggatactgcagatcaatggagaagatgtgcagaaccgggaggaggccgtcgcactcctgtcaaatgatgaatgtaaaaggatcgtgctactcgtagctcggccagaaatacaactcgacgagggctggctagaagacgaaaggaatgagttcctggaagaactgaacctggaaatgttagaggaggaacacaatgaggcaatgcagccgaccgctaatgaagtggagcagcctaaaaaacaagaggaagaggagggcactactgacacggccacctctagctcaaacaaccatgaaaaagatagcggggtgggcaggaccgacgaaagtcttcggaacgacgaatcctccgaacaggaaaatgccgctgaggaccccaacagcacgtccctcaagagtaaaagggacctcgggcagagccaggatacgctcggatcagtggagctgcaatataatgaaagcctggtgagtggcgagtacatcgacagtgattgtattgggaatcccgacgaggattgtgagagattcaggcagttactagagttgaagtgtaaaatccggaaccatggcgagtacgatctgtattatagcagttcaactatcgagtgcaatcagggtgagcaggaaggcgtggagcacgagcttcagctgctcaacgaggaactgcgcaacatcgaactcgagtgtcagaacatcatgcaggcccacagattgcaaaaagtgaccgatcagtatggtgacatttggactctccacgacggcggattcagaaactacaatacaagcatcgacatgcagcgtgggaagttggacgatattatggagcatccagaaaagtctgataaagactcctcgagtgcttataatactgcggagtcgtgtcgttcgacaccgctaaccgtggatcggagtcccgactctagtctgcccagggtaataaacctcaccaacaaaaaaaatctgcggagcacgatggcagcaacccaaagttccagtggacaatctagtaaagagtctactagtaccaaagcaaaaactacagagcaaggctgctctgccgagagcaaggagaaagtcttagagggcagtaaactgcccgaccaggaaaaagcagtcagcgagcacatcccttacctctccccttaccatagcagctcctaccgctatgctaacatcccagctcacgcccgtcattaccagagctacatgcagttaattcagcaaaagagcgcagtagaatatgcacagtctcagctgtctttggtgtcaatgtgcaaggaatcacagaagtgcagcgaaccaaaaatggaatggaaggtcaaaatcagaagtgacggaactaggtatataaccaagcgacccgttcgggataggatcctgaaggagcgagcacttaaaattaaggaagaaagatccggcatgactactgacgatgataccatgtcagagatgaaaatgggtcgatattggtctaaggaagaaaggaagcagcacctcgtccgagcaaaggagcagcgcagaagacgtgaatttatgatgagatcccgactggagtgcctgaaggagagcccgcagtcaggctccgagggcaagaaagagatcaatattatagagctgagccataaaaaaatgatgaaaaagcgaaataaaaagattctggacaattggatgacgatccaggagttgatgacgcatggggctaagtcccccgacggcacaagggtacacaacgccttcctgagcgttacaacagtatag

SEQ ID NO: 234240 - DNA, 1158 bp, synthetic construct
  misc_feature 1..1158: note = Description of Artificial Sequence: Synthetic coding sequence
  source 1..1158: mol_type = other DNA
atgaaattagtcagaaaaaacatcgagaaggacaacgcaggacaagtgactctcgtacctgaggaacctgaagacatgtggcatacctacaacctcgtccaggtgggtgatagcctgcgggctagtactatccgcaaggtgcagaccgaaagcagtacaggttccgtgggctctaaccgcgtccgcaccacactgaccctatgtgtggaggctatcgactttgactcccaggcttgtcagctgagagtgaaaggcacgaacatacaggagaacgagtacgtgaagatgggggcttaccatactatagaactagagccaaatcgccaattcaccttagccaagaaacagtgggattccgtcgtgctcgaaagaatcgagcaagcttgcgatccagcatggtcggctgatgtggccgctgtcgtaatgcaggaaggattggctcacatttgtctggtgactccgtccatgaccctgacacgggcaaaagtggaggtgaacatcccgagaaaaagaaaggggaactgttcccagcatgatagagccctcgaaaggttctacgaacaggtggttcaagccatccaaagacacattcacttcgacgtcgtcaagtgtattctcgtcgcttcaccgggttttgtgcgcgaacaattctgtgactacctattccagcaggccgtcaagacagataacaagttgcttctggagaataggtccaagtttctgcaagtgcatgctagttccgggcataagtacagtctgaaagaagcgctctgtgacccaacagttgccagccgactgagcgatacgaaggctgcaggtgaagtgaaagctctggatgatttctacaagatgctccagcatgagccagacagggcgttctacggtttaaaacaggtagagaaagctaatgaggccatggctattgatactctgctcatcagcgatgaactatttcgacaccaggacgtggctaccaggtcacgatatgtgcggctggtggacagtgtgaaggagaatgcgggtaccgttaggatcttctcaagtctacacgtgtccggggagcaattatcacagctcacgggggtggctgcaatcctgagattccctgtgccagaactaagcgaccaggagggagatagtagctccgaagaggattag

SEQ ID NO: 234241 - DNA, 855 bp, synthetic construct
  misc_feature 1..855: note = Description of Artificial Sequence: Synthetic coding sequence
  source 1..855: mol_type = other DNA
atggcaagctacccatacagacaaggatgtccgggagctgccggacaggcgccaggagctccccctggcagttactatcccggtccccctaatagcggtggacagtacggatcagggctccccccaggaggcggatacgggggtcccgcacccggtggtccttacggccctcctgctggcggtggcccttatggccacccgaaccctgggatgtttccttcagggacacccggaggcccttacgggggagctgcccctgggggtccgtatggacagcccccacctagtagttacggcgctcagcagcctggattgtatgggcaaggaggagctcccccaaatgtagaccccgaggcatacagttggtttcaatccgtcgatagcgaccactctggatacatttcaatgaaggagttaaagcaggcgctcgttaactgtaactggtcttcattcaacgatgagacctgcctgatgatgattaacatgtttgataagacaaagagtggcagaattgatgtatacgggtttagtgctctgtggaagttcattcaacagtggaagaatctgttccaacagtatgaccgcgatcggtccgggtctatcagctatactgagttacagcaggccctctcccagatgggatacaacctgtccccccagttcacccagctgctggtgtccagatattgcccaagaagtgcaaacccagccatgcagttagaccgattcatacaagtgtgtactcagcttcaagtgctaacagaagcattcagggagaaagataccgccgtacaaggtaacatacggctttccttcgaggattttgttacaatgaccgcatctcggatgctgtag

SEQ ID NO: 234242 - DNA, 423 bp, synthetic construct
  misc_feature 1..423: note = Description of Artificial Sequence: Synthetic coding sequence
  source 1..423: mol_type = other DNA
atggcttcttacccttatcgccagggatgcccaggagctgcaggtcaagcgccaggggctcccccaggttcttactaccccggacctccaaattccggcggtcagtacggctccgggttacctcccggtggaggatatggaggtcctgccccaggaggcccttacggacctccagcaggaggcggaccctatgggcaccctaatcctggaatgtttccatcgggcacccctgggggaccatacggaggtgccgctcctggtgggccttacggtcagcctccaccttcctcctatggcgcacaacagcccggactttacggccaggggatccacgctgagggagccgctcctgtctgggacatgctgagtctctggcaacgcgagggcgctggcgagcttgcccgtatgcataacgcatcctag

SEQ ID NO: 234243 - DNA, 1146 bp, synthetic construct
  misc_feature 1..1146: note = Description of Artificial Sequence: Synthetic coding sequence
  source 1..1146: mol_type = other DNA
atgcatctcttagccatactgttttgcgcgctctggagtgccgtcctcgctgaaaattccgatgattatgatttaatgtatgtcaatctggataacgagatcgacaacggtctccaccccacggaggacccaactccttgcgcgtgtgggcaagagcacagtgagtgggataagctgttcatcatgcttgagaactcccagatgcgggaaagaatgttgctgcaagcgaccgacgatgtgcttaggggagagctgcagcgactgcgggaggaattggggaggctagctgaaagcttagcccgtccctgcgcgccaggcgcaccagccgaggctaggctaacctctgcacttgacgagcttttacaggctacaagagatgccggtcggcgactggcacggatggagggggcagaggcgcaaaggcctgaggaagctggtcgggctctggcagctgtactggaggagctgcggcagacgagagcagacctccacgctgtccagggatgggccgctaggtcctggctccccgcaggctgcgagaccgctatcctcttccctatgcggtctaagaagatcttcgggtccgtgcaccccgttcggcctatgcgcttagagagtttcagcgcatgcatttgggtaaaggccactgacgtgctcaataagaccatcctgttttcatacggcacgaagcgcaatccatacgaaattcagctgtatctgtcctaccaatcaatcgtctttgtcgtcggaggtgaggagaacaaattggttgcggaggcaatggtgagtctcggcaggtggactcacctgtgtggcacatggaatagcgaagaaggcctgacctccctctgggtcaacggagagctggccgctacaacagtggaaatggccacagggcacattgtaccggagggcggtatcctgcagatcgggcaggaaaagaatggctgctgcgttggtggtggctttgacgagacacttgccttctctggcaggctgactggttttaacatttgggattccgtcctgagcaacgaggaaatcagagaaactgggggagcggagtcctgtcacatcagagggaacattgtgggctggggcgtgaccgagatccagcctcatggtggcgctcaatatgtgtcgtag

SEQ ID NO: 234244 - DNA, 1422 bp, synthetic construct
  misc_feature 1..1422: note = Description of Artificial Sequence: Synthetic coding sequence
  source 1..1422: mol_type = other DNA
atgggttcaggcaattgggaggtcactggcccaccgtgtggatcgcgctgcgagcgtccacccggtcttcctcgcggagtgcacggccaattccggtcagccgtcggcctgtcggggttgcggtggtttagacgcttccaggaagtgacctggacacacctgcagaacatcgccagcaattacaacgtcagctacaatgtggacgtgcggtttaggtccttagctgaagaatcacaggcggtggcccaggcagtgaaccgttcccaagcatccgttcagggagagcttgctcaactaaaggcctgggttcggaagctgcaacggagaggaagaaaagtggacactcgactgagagcgctggatctcactcttggcgaacgctctcagcagcgcgctagggaaaggaaagcacataaagcgcagcgggatgcattacaagactcactcgccaggctggagggcctggtccactctcaaggggcaagattggctgcattagaagggaggctccctgtggctcaccctgggactgcggctctgggcccagccctagtgcccacacctacacaacctgaggaactcggtccaacgagcctaaagctacagagagatcgtcaggagttaagggccgcttcagaacatagaggcccacctcaggattcttctgcgcctctacagggcaggcgcgagcctcccgctagtgggtctcacagggtgttgagtggaactgcccctaaggacccacgacaacaggcttggtcaccacaggtgcccggagagatttgcggtgtggggcctacgctcgtatttccgaacgcctccactaggaacgtcgtattcttaagtcctgggttcgtgactgcactgagggcactctcattttgcagttgggtgcgaacggcttccggacgtttaggcacactgttatcttacgccactgaggataatgacaacaagctggtgttacacggtcgtgatagcctgctacccggatcgatacactttgtgataggggatccggcatttagagaactgcctctgcagctgctgcttgacgggcaatggcaccatatttgcgtgatctggacttccactcaagggaggtattggctgcacgtcgatcggaggctggtcgccaccgggagccgctttagagagggctacgagattccacccggtggatcgttagtgttgggccaggaacaggacagcgttggagggggattcgactctagcgaggccttcgtcggctctatgtccggcctggccatctgggatcgggcattagtccccggagaagtggccaacctggccatcggcaaagaatttccaaccggagccatactgacgctagccaacgctgccctggcgggaggatttgtgcagggcgcaaactgtacttgtcttgaaagatgcccttag

SEQ ID NO: 234245 - DNA, 1437 bp, synthetic construct
  misc_feature 1..1437: note = Description of Artificial Sequence: Synthetic coding sequence
  source 1..1437: mol_type = other DNA
atgggttgcagttggaggaagacactcagtttcttcctcgtgttcgttcctatttatctccacggggcttcaagccaagaagcggctcccgtgggcccacgtaagccattcttcgaacgcctgcgccgtctagaggagcagttcaggcggttccaggaagtcacatggactcacttacagaacattgctagtaattacaacgttagctacaacgtggacgtcaggtttcgcagcctagcagaagagagccaggccgtggcacaagctgtaaatcggagccaggcctcggtgcagggtgagcttgcacagctgaaagcttgggtgcgtaagctgcagcggaggggacgcaaggtagatactaggctgcgggctctcgatttaacccttggggagaggagtcagcaaagggcccgtgagaggaaggctcacaaggcacagcgcgacgcgctccaggactctcttgccagactggaaggattggttcactctcaaggggctcgccttgccgcattggagggtcgtctgcccgtggcacaccctgggacagctgcactcggaccagcattggtaccgacacccactcagcccgaggagctggggcctacctcactgaagctccagcgtgatcgccaggagctgagagctgcaagcgagcatcgcggacccccacaggactcctcggctccactgcagggtcgaagggagcctccagccagtgggtcccatagggtgctgagcgggaccgcccctaaggatcctaggcagcaggcttggagtcctcaagtacctggcgaaatttgcggggtcggacccaccctggtttttcccaacgcatctaccaggaatgtggtgttcttaagcccagggttcgtgaccgctttaagagccctctcattttgcagctgggtacgaaccgcctccggaaggttgggaacactgttgtcttatgccacagaagacaacgacaataaactggttctccacggcagagattctctgcttccaggctccattcactttgtcattggagatccagcgtttcgggaactcccgctccaacttctgctcgacgggcaatggcatcacatatgtgtcatctggacatctacccagggacgttactggttgcatgtggaccggcgactcgtagcaacgggaagtaggttccgggaagggtatgaaattccaccagggggttccctggtactgggccaggaacaagacagcgtgggagggggatttgattcttcagaagctttcgtgggatccatgtcagggctagccatttgggatagagcccttgttcccggagaagttgctaacctggcaatcggtaaggagtttccgaccggcgcaatattaacactcgccaacgctgcattggcaggcggttttgtgcagggtgccaactgcacatgtcttgaaaggtgcccttag

SEQ ID NO: 234246 - DNA, 1167 bp, synthetic construct
  misc_feature 1..1167: note = Description of Artificial Sequence: Synthetic coding sequence
  source 1..1167: mol_type = other DNA
atgaaatggctacttctcctgggtctcgtggccttgagcgaatgtataatgtataaggtgcctctgatacgcaagaaatctctaagacgcaccctgagtgaacgcggtttgcttaaagactttctgaaaaaacacaacctcaatccagccagaaaatatttcccccaatggaaggctccaacactagtggatgagcaaccactagagaattaccttgatatggaatactttggcaccatcgggattggtaccccagcccaagacttcaccgtcgtttttgacaccggctctagcaatttatgggtcccgtctgtttactgttcgtccttagcttgcaccaaccacaatcggttcaatcctgaagattcctctacctatcagagcacaagcgagacagtaagcataacctacggcacagggtccatgacaggaatcctcgggtatgatacagtgcaggtaggaggtataagtgatacaaatcagatcttcgggttatccgagaccgagcccggttcctttctgtactatgcaccatttgatgggatattgggcctggcgtatccctctatctcatcctcgggggcaacacccgtgttcgataatatatggaaccaagggctggtgagccaggatctgttttccgtctacctctctgcagatgaccagtctggatccgtcgtgatattcgggggaatcgacagctcctattacacaggatctctcaattgggtcccggtgactgtggagggttattggcaaattaccgtggatagcattacaatgaacggtgaagccatcgcttgtgcggaaggttgccaagcgattgtcgacacagggacaagtctgctgaccgggccaacatcccctatagccaatattcaatccgacattggggcaagcgagaattctgacggcgatatggttgtgtcatgcagtgccataagctccctgccagatattgtgtttaccatcaacggtgtgcagtacccagtaccaccctctgcctacattctgcaaagcgagggcagctgcatctcggggttccaaggaatgaaccttccgactgaatccggcgaactgtggattctgggagatgtgttcatcagacagtattttaccgtgttcgatagagctaataatcaggtgggactcgcgcctgttgcctag

SEQ ID NO: 234247 - DNA, 849 bp, synthetic construct
  misc_feature 1..849: note = Description of Artificial Sequence: Synthetic coding sequence
  source 1..849: mol_type = other DNA
atgaagtggctacttctgttgggtctggtggcgctgtctgaatgtataatgtacaaagtccctctgataagaaaaaagagcctgagaaggactctctctgaaagagggctgctgaaagacttcttaaagaagcataacctgaatcctgcccgtaaatattttcctcaatggaaagctcccactctcgtggacgagcagcctttggaaaattacttggacatggagtatttcggcactatcggaatcggcacaccagcacaagatttcactgtggtgttcgatacaggaagttccaatttatgggtgccctccgtttactgctccagcctggcatgcacaaatcataaccgctttaaccctgaagactcaagcacttatcagtcaacgtccgagacagtgtctataacctacggcacgggatccatgacaggcatcctcgggtacgatacagtccagacagtggccatctggcgctctgctgctatgggactggtgagccaagacctgttctctgtgtatctgtcagcagatgatcagagtggaagtgtcgttatcttcggaggtatagatagctcttactacacgggatcactcaactgggtgcccgtaacagtggagggctactggcagataaccgtcgattcgataacaatgaacggagaagccattgcgtgtgccgaaggctgccaggcaattgtggatacgggcactagcctgctgactggacctactagtcctatagcaaacattcagtctgacataggcgcaagcgaaaactccgatggcgatatggtcgtgtcctgttctgctatttctagtctgcccgatatcgtgttcactatcaattag

SEQ ID NO: 234248 - DNA, 750 bp, synthetic construct
  misc_feature 1..750: note = Description of Artificial Sequence: Synthetic coding sequence
  source 1..750: mol_type = other DNA
atgaccggcatcctgggatacgatacagttcaggtcggtggtatcagcgacacgaaccagattttcggactctccgaaactgagcctggcagttttctgtattacgcaccattcgacggcattctcggcttagcgtaccccagtatcagctcttctggagcaacaccggtatttgacaatatttggaaccagggactggtgagccaggatctcttctctgtttatctgtccgccgacgatcaatcaggcagtgtggtgatattcggcggtatagattcatcatattacacaggctccctgaactgggtgccagttactgtggagggctactggcagattaccgttgactccataaccatgaatggcgaagcgatagcttgtgccgagggctgccaggccatcgtcgacacggggactagcttgctcactggacccacttcacccatagccaatatccaatctgatattggcgcttctgagaactctgacggcgacatggtcgtgtcttgcagtgccatctcctccctaccggacatcgtctttaccatcaatggggtgcagtatcctgttcctccgtctgcctacatcctgcaattgccttctgagggctcctgcatttcaggctttcagggaatgaacttacccacagaatctggcgagctatggatactcggtgacgtgtttattaggcagtactttacggtcttcgatcgcgcaaacaaccaggttggactcgctcctgtggcctag

SEQ ID NO: 234249 - DNA, 1167 bp, synthetic construct
  misc_feature 1..1167: note = Description of Artificial Sequence: Synthetic coding sequence
  source 1..1167: mol_type = other DNA
atgaagtggctgctgctattgggcctcgtggccctatcagagtgcatcatgtacaaggtgccgctgattagaaagaaatcactgcgtcgcacacttagtgaacggggacttctgaaggacttcctgaagaaacataatttaaatccagctcgcaagtactttcctcagtgggaggccccaacactggtagatgaacaacctttagaaaattacctcgacatggagtatttcgggacaatcggtattggcacacctgcacaggatttcaccgtcgtgttcgacaccggctcttcgaatctatgggtcccctctgtgtattgctcctccctggcctgtactaaccacaatcgctttaatcccgaggactcttctacttaccagagcacctctgagacagtaagcattacctatggaaccggcagcatgaccggcattctcggatacgataccgtgcaggttggcggaatttcagatactaatcaaatttttgggctgtcagaaacagaacctggctcattcctgtattacgcgccttttgatggcatactgggcttggcttatccgagcatttcgtcctctggtgctactccagtctttgataacatctggaaccagggtctggtgtctcaagatctgttcagtgtttatttgtctgctgacgaccagagcgggtctgtggttattttcggcggaatcgactcttcgtactatacaggtagcttaaactgggtacccgtgacagttgaaggatattggcagattaccgtcgattccataacgatgaacggcgaagcaatagcctgcgcagagggttgtcaggccatcgttgacacagggacaagtcttttgacagggcctacctcacctattgctaatatacagtctgatattggcgcttcagaaaatagcgatggggacatggtagtgtcctgctccgccatatcctcactgcccgatatagtgtttactatcaacggggtgcagtaccctgtgcccccttccgcctacatcctgcagagcgagggcagctgcatctccggatttcagggcatgaacttacccaccgagtcgggtgagctgtggattctcggagatgtgtttattaggcaatacttcaccgtgtttgaccgggctaataaccaggtcggactggcgcctgtggcgtag

SEQ ID NO: 234250 - DNA, 1167 bp, synthetic construct
  misc_feature 1..1167: note = Description of Artificial Sequence: Synthetic coding sequence
  source 1..1167: mol_type = other DNA
atgaagtggctgctgctgcttggcttagtggctctcagcgagtgtattatgtacaaagttcccctgatacggaagaagtccctgaggcgaacactgagcgaacgcggtctattaaaagacttcctgaaaaagcacaacttgaatcccgcacgaaagtatttcccgcaatgggaggcaccaacactggtggatgagcagcccctagagaactatctggacatggagtactttggcacaatcggcatcggcacaccagcgcaagatttcaccgtggtgttcgataccggttcctcaaacctctgggttcccagtgtgtactgttcttccctggcctgtactaatcacaaccgcttcaaccccgaggacagttccacctatcagtccacctctgagaccgtttcaattacttacgggaccggatccatgaccggtatcctcggttacgatacggtgcaagtgggcggaatctctgatacaaaccagatctttggtttgagtgagacggagccagggagcttcctgtactacgcacccttcgacggaatcctaggtttagcctacccctcaattagctctagcggtgccactcctgtgttcgataatatctggaaccagggcctggtcagtcaggacctgttctctgtgtacctgagcgcggacgacaagagtgggtccgtggtcatttttgggggaatcgacagctcttattacactggcagtctaaattgggtgcccgtcaccgtcgagggctattggcaaatcaccgtagacagtattaccatgaatggggagaccattgcgtgtgctgaggggtgccaggcaatagtagatactgggaccagcctcttaactggcccaacgagccccattgctaacatccagagcgatattggtgcatctgagaacagcgacggcgatatggtggtgtcatgttccgctattagttccctacccgatattgtcttcacaattaacggggtgcagtacccggtgccaccctcggcttacatcctccagagcgagggcagttgtatctcaggctttcaaggtatgaatgttccaacagaaagtggggagctgtggatcctgggggatgtcttcattagacagtacttcactgtgttcgaccgggcaaacaaccaagtgggtctggctccggtcgcttag

SEQ ID NO: 234251 - DNA, 849 bp, synthetic construct
  misc_feature 1..849: note = Description of Artificial Sequence: Synthetic coding sequence
  source 1..849: mol_type = other DNA
atgaagtggctgctccttttaggccttgtcgccctgagtgaatgtattatgtataaggtgcctctgatccggaaaaagagtctaaggagaaccttgtctgaacggggactgctcaaagatttcctgaaaaagcataacctgaatcctgctcgcaagtactttccacagtgggaagctccaaccttggtagacgagcaaccactggagaattatctggatatggaatattttgggaccataggtattggtactcccgcacaggattttactgtagtctttgacaccggtagcagcaatttgtgggtgccatctgtttactgttcaagccttgcttgtacaaaccacaacagatttaacccagaagactcatccacctaccagagcacctccgagacggtatccatcacctatggaaccggatcaatgacggggatcctcggatacgacaccgtgcagacagtggccatttggcgctctgccgcaatgggccttgtgtcccaggacctgttctccgtttatctaagtgcagatgatcaatctggatctgtggtgatttttgggggaatcgacagcagctactatacaggaagcctcaattgggtgcccgttacagtggagggatattggcagatcacggtcgatagtatcaccatgaatggagaagccattgcctgtgccgaggggtgtcaggctatcgtggatactgggacaagtctgcttacaggcccaacctccccaatagccaacattcagtcagacataggagcatctgagaactccgacggcgacatggtggtttcctgttccgcgattagcagtctgcctgatattgtcttcacaatcaattag

SEQ ID NO: 234252 - DNA, 750 bp, synthetic construct
  misc_feature 1..750: note = Description of Artificial Sequence: Synthetic coding sequence
  source 1..750: mol_type = other DNA
atgaccggaatccttggttatgacacagtgcaggtgggcggaatttctgatacaaaccagatttttgggctgtcagagacagagcccggatcctttctgtattatgctccattcgatggcatcctcggcctggcttaccctagcataagctcgtccggagcaactccagtgttcgacaacatctggaatcagggcctggtttcccaggatcttttcagtgtatacttaagcgccgacgatcagtctggtagcgtggtgatcttcgggggtatagattcatcctattatacagggtccctaaattgggtgccggtgacagtggagggctactggcaaattacggtcgacagtatcacaatgaacggcgaagccatcgcttgcgctgaaggctgccaagcgatcgtcgacacaggtacctctttgcttaccggcccaacatcgcccatcgctaacattcagtctgacattggtgccagcgagaattcagatggggacatggtcgtgagttgctcagccatttcatcacttccggatattgttttcacaattaacggcgtacagtatccagtccccccttctgcttacattttgcagttgccctccgaagggagctgtatctcaggtttccaaggtatgaatttaccaaccgagtcgggcgagctgtggatcctgggagacgtgttcatcaggcagtacttcaccgtgttcgatcgcgctaacaaccaggtgggcttggcccctgttgcatag

SEQ ID NO: 234253 - DNA, 1167 bp, synthetic construct
  misc_feature 1..1167: note = Description of Artificial Sequence: Synthetic coding sequence
  source 1..1167: mol_type = other DNA
atgaaatggctactactgcttgggctcgtggccctctccgagtgtatcatgtacaaggtccccctgatacgaaagaaatctcttagaagaactctttctgaaaggggcttgcttaaggatttcttaaaaaagcacaacctgaaccctgctcgcaaatatttcccccagtgggaggcacctactctggttgacgagcagccactggaaaactacctggacatggaatacttcgggacgattggcattggtactccggctcaagactttacagtggttttcgatacaggtagtagcaatctctgggtgccctccgtgtattgtagctctcttgcatgcaccaaccacaacaggtttaatcccgaagacagctccacctaccagtctacatcagaaacagtgtcaattacatatggcacaggatccatgacagggatactgggatacgacacagtccaggtaggcggtatatccgacaccaaccagatatttggactcagtgagaccgaaccaggtagcttcctttattatgcaccttttgatggcattctaggcctggcctacccatccattagttccagcggggcaacacctgtgttcgataatatttggaaccagggattggtctcacaggacctgttttccgtctacttgagcgccgacgacaaaagcggctcggtcgtgatctttggagggattgactcaagttattacaccggatctctgaactgggtgcctgtgacagtcgaaggatattggcagatcactgtggatagcattaccatgaacggcgaaacaattgcatgcgccgaaggctgccaggccatcgtagacacaggtacctcacttctgaccggccctacctcccctatagccaacatccaaagtgacataggagccagcgagaatagtgatggcgacatggtggtctcatgctctgcaatttctagtctacctgacattgtgttcacgatcaacggagttcagtatcccgtgccccctagcgcctacattctgcaatccgagggatcctgcatcagtggttttcaaggtatgaatgtccctaccgagtctggagagctgtggatactgggcgacgtctttattcggcagtacttcacagtgtttgacagggccaataatcaagtcggactcgctcctgtggcttag

SEQ ID NO: 234254 - DNA, 849 bp, synthetic construct
  misc_feature 1..849: note = Description of Artificial Sequence: Synthetic coding sequence
  source 1..849: mol_type = other DNA
atgaaatggctactgctgctggggctggtggcattgagtgaatgtattatgtacaaagtacccttaatcaggaagaagagcctccgtagaacactatctgagcgcggactgttaaaggatttcctgaagaagcacaatctaaatcctgctcgcaagtattttccgcaatgggaggcacctactctagtcgatgaacagccactggagaactatctcgacatggagtactttgggaccataggcattggaacacccgctcaggatttcacagtagtgtttgataccggttccagcaatctgtgggttccatctgtttactgttccagtcttgcgtgtaccaatcacaaccgctttaacccagaggattcatcaacgtaccagtccacctcagaaactgtgtccatcacatacggcaccggatccatgactggtatactagggtacgacactgtgcagacggttgcaatatggcgttccgctgctatgggactagtcagccaggatttattcagcgtatacttgagcgccgacgataagagtgggagtgttgtcatcttcggaggtatcgactccagttattataccggctctcttaattgggtgcctgtaacggtggaagggtattggcagattactgtcgatagtatcacgatgaacggggagacaatcgcttgcgccgaagggtgccaagctatcgtggatactggaacttctctgctcactggccctacttctccaatagcaaacatccaatcagatatcggcgctagtgagaactcagacggagacatggtagtcagttgcagcgccatttcctctcttccagatatcgtgttcaccatcaattag

SEQ ID NO: 234255 - DNA, 750 bp, synthetic construct
  misc_feature 1..750: note = Description of Artificial Sequence: Synthetic coding sequence
  source 1..750: mol_type = other DNA
atgacaggcattttaggctatgacactgtgcaggtgggagggatttccgatacgaatcaaatcttcggtctctcggaaacagagcctggcagcttcctgtattatgctcccttcgacggcatcctgggccttgcctacccgtcaatatcttccagcggcgctacccccgtgttcgataacatctggaaccagggtctcgtgtctcaggacctgttttctgtctacctgtcagctgatgacaaaagtggcagtgtggttattttcgggggaatagatagttcctattacaccggctctctgaattgggtgccggtcacagtggaggggtactggcagattactgtcgacagcatcactatgaacggagagactatcgcctgtgccgaggggtgtcaggccatcgttgataccggaacatctcttctgacgggacccacaagcccaatagcaaatattcagtcggatattggggcatcagagaatagcgacggcgatatggtggtaagctgttccgccatcagctctttaccggatattgtgtttacaattaacggggttcagtaccccgttcccccatcagcttatatcctgcaattaccaagtgagggcagttgcatcagtggcttccagggtatgaatgtccccacggaatccggcgaactttggatcctgggggacgtctttattcggcagtattttacagtcttcgatagagcaaataaccaagttggcttagctcccgtggcgtag

SEQ ID NO: 234256 - DNA, 1578 bp, synthetic construct
  misc_feature 1..1578: note = Description of Artificial Sequence: Synthetic coding sequence
  source 1..1578: mol_type = other DNA
atggccgcagtggtgttagcagctaccagactcctgagaggatccgggtcctggggatgtagtcggctgcgcttcggtcctccggcatatcggcgtttcagctctggaggcgcttatccgaacatcccgttgtcaagcccgctccccggagtaccaaaacctgtctttgccacagtggatggtcaggaaaagttcgagaccaaagtaacaacgctggacaatggcctgcgggttgcgtcacagaacaaattcggccaattttgcaccgtgggtattttgatcaactccgggagcagatacgaagcaaaatatctaagcggcatcgctcattttcttgagaaactggcattcagctccacagctcggttcgattccaaagacgaaatcctgctgacgcttgaaaaacacggaggaatatgcgactgtcagacaagcagagacactactatgtatgccgtgtccgccgacagtaagggcctcgataccgtcgtggctttgctagcagacgttgtgctgcagcccaggttaacggacgaggaggtggagatgaccaggatggcagtacagtttgaacttgaggatctgaacctcagacctgacccggagcccctgctcaccgaaatgatacatgaggctgcgtatcgcgaaaacacagtgggtctccaccggttctgcccaactgagaacgtggcaaagatcaatagggaagtcttacattcttatctgcgcaactactacacccctgaccggatggtgcttgcaggcgtgggagtagagcacgaacatctggttgattgtgccaggaagtatctgctgggggtccagcctgcttggggatccgccgaggctgtggacatcgacagatctgtcgcacagtacactggagggattgctaaactcgagagggacatgtccaatgttagtctcggccctactcctatccccgagttgacccacatcatggtgggcctggaaagctgcagctttcttgaagaagatttcatccccttcgccgtgctgaacatgatgatggggggaggcggatcctttagcgccggtgggccaggaaagggtatgttcagccggctgtatcttaacgtgctcaatcgccatcattggatgtacaacgcaacctcataccaccattcttacgaggacaccggcttgctgtgtatccacgctagtgcagatccacgccaggtccgagagatggtggaaattattactaaggagtttattctcatgggaggtaccgtagacaccgtagagctggaacgcgcaaaaactcaactcactagcatgctcatgatgaatctggagtcacgcccagtgatcttcgaggacgtgggtcgccaagtcttggcgaccagatcccggaagctgcctcacgagctgtgtaccctcatcaggaatgtgaagcctgaagacgtgaagcgggtagcatctaagatgctgagaggaaaacccgctgtggcagctctgggcgatctgaccgaccttccgacctacgagcacattcagaccgccctgagttccaaggatggccgtctgcctaggacctacagactgtttcggtag

SEQ ID NO: 234257 - DNA, 441 bp, synthetic construct
  misc_feature 1..441: note = Description of Artificial Sequence: Synthetic coding sequence
  source 1..441: mol_type = other DNA
atggctgctgtcgttttggctgcaaccaggctcttacggggtagcggatcatgggggtgctcccggttgagatttggacccccagcatatcgtagattctcatcggggggtgcataccccaatatcccgctgtcaagccccttgccgggagtccctaagccggtcttcgcaacggttgacggacaggaaaagttcgaaaccaaggtgacaacattggacaatggattaagagtcgcatcccaaaataaatttgggcaattctgcacagtgggaatcctcatcaacagtgggagtaggtacgaggcaaagtatctgtccgggattgctcacttcctggaaaaacttgctttctcatcaaccgctcgattcgactccaaggacgaaatcctactgaccctggaaaaacatgggggaatctgcgactgccagaccagcaggtag

SEQ ID NO: 234258 - DNA, 1185 bp, synthetic construct
  misc_feature 1..1185: note = Description of Artificial Sequence: Synthetic coding sequence
  source 1..1185: mol_type = other DNA
atgaaacgaaacactttagtggaacttcttaccttttggaaaaattggcactttcggctgcttctggacctcacagctaaaatgaagttctgcttgcggtggaaaagcatgggcgtttcggtgaccgcccgacaccaggatgaggaagttgaaatgacccgcatggcagtgcagttcgaactggaagaccttaaccttcgtcctgaccccgagcctctgttgactgagatgatacacgaggccgcatatagagagaacacggtcggattgcaccgtttctgccccactgagaacgtagccaaaataaacagagaagttctccattcttatctgcggaactactacacacccgataggatggtgctggccggtgttggagtcgagcatgaacaccttgtcgactgcgccagaaaatacctgctgggcgttcagcctgcttgggggtctgccgaggcagttgacattgaccgcagtgtcgctcagtacaccggtggcatcgcaaaattggagagggacatgtcaaatgtcagtctgggcccaactccaataccggaactgactcatatcatggtgggtctcgagagctgtagttttctcgaagaggatttcatacccttcgctgtattgaacatgatgatgggtggcggaggctcttttagcgcagggggaccaggaaaaggcatgttctctaggttgtacctgaatgttctgaatcgccaccattggatgtataatgctacatcttaccatcattcttacgaagatactggacttctgtgtattcacgcctctgcagacccacgccaggtgcgagaaatggtcgagattatcactaaagagttcattctcatgggaggaactgtggacacagttgagctggagagagcaaagactcagctgactagtatgttgatgatgaacctcgagagcaggcccgttatctttgaggacgtgggacgccaggtactcgctacaaggtctaggaagttgccccacgaattatgtacccttatccggaatgtcaaacccgaggatgtgaagagagtggccagtaaaatgttacgaggcaagccggctgtggccgctctgggcgatctcacagacttgccaacctacgaacatatacagactgccctctcttcgaaagatgggcgtcttcccaggacgtacagacttttccggtag

SEQ ID NO: 234259 - DNA, 816 bp, synthetic construct
  misc_feature 1..816: note = Description of Artificial Sequence: Synthetic coding sequence
  source 1..816: mol_type = other DNA
tacaccggcggaatcgcgaaactggaaagagacatgagtaacgtgagcctaggcccaacgcccatccctgaactgacccacattatggtcgggctcgagagctgcagcttccttgaggaagatttcatcccttttgcagtcctgaatatgatgatgggcggaggtggctcctttagcgcagggggaccaggtaaaggtatgttctcccggttgtatctaaatgtgctgaataggcatcactggatgtacaacgccacttcctaccaccattcttatgaggacacgggcctgctctgtatacatgcctctgcagacccaagacaagttagagaaatggttgagattataacgaaggagttcattctaatgggagggacagtggacactgtggaactcgaaagagctaagacccagctaacttccatgctgatgatgaacctggaatctaggcctgtgattttcgaagacgttggcagacaggtattggcaactcgatcacgcaaattgccacatgagttatgcactctcatccgcgaatatagacggggtagtgagggtctgccacaggcaagtgcccgactgcgcggagggagactggccctgccgcaggccgtggtaggactgtggtatgtgcaccacactcagaacctggggcctagcccagtggtgctttcgaggggtgggcagggacagggccgaggggtcgcagatctcgtgtctttgcccggacccaccatgcacctattgccaccttggcaggtaaccccgccaagcgcaccccttggtggggcagtcacgacagcccagtcatgttag

SEQ ID NO: 234260 - DNA, 1482 bp, synthetic construct
  misc_feature 1..1482: note = Description of Artificial Sequence: Synthetic coding sequence
  source 1..1482: mol_type = other DNA
atggccgctgcaaccgggccatctttttggctcgggaatgagacactgaaggtgccgctcgctttgttcgctcttaaccggcagagactgtgtgagaggctgcgtaaaaaccctgccgtacaggccggttctattgtcgtcctgcagggcggtgaagagacgcaacggtactgtacggatacaggggtactgtttcgacaggagtcctttttccactgggcctttggtgtgacagagcccggatgttacggagtgatagatgttgacaccggtaaaagtacactgttcgtgccgagactacctgctagccacgccacctggatgggaaagatccactctaaagagcatttcaaagagaagtacgctgtggatgatgttcagtatgtggatgaaatcgctagcgtgctgacgtcgcaaaaaccatccgtgctgctaaccctacggggagtaaataccgactccggatcagtctgcagagaagcctcctttgacgggatcagtaagtttgaggtcaataatacaattctgcatcctgaaattgtggagtgtcgcgttttcaagactgatatggaattggaggtattgcgttataccaacaaaatctccagcgaggcacaccgcgaggtcatgaaagccgtcaaagtgggcatgaaagagtacgagctggagtccctatttgaacactactgttacagccgaggcggaatgaggcatagctcttatacttgcatatgcggctccggagaaaattctgccgtactccactacggacacgctggcgcacctaacgataggactatccagaacggggatatgtgcctgtttgatatgggcggtgaatattactgcttcgcttccgatatcacttgttcatttcctgccaacgggaagttcaccgccgaccagaaagccgtgtatgaggccgtgctgagatccagcagggctgtgatgggggctatgaagcccggagtgtggtggcctgatatgcaccggctcgcagaccgcattcacctggaggagcttgcccacatgggcattctctccggcagcgtcgacgccatggtgcaggcacatctcggcgctgtgttcatgccccatggccttggacactttttaggtatcgatgtgcacgatgtgggtgggtaccctgagggcgtggaacgaatcgacgaaccgggactgagaagtttgagaacggcaagacatcttcagcctgggatggtgttgaccgtcgagccgggtatttactttatcgatcacctgctcgatgaggccctggctgatcccgcacgggcttcgttcttgaacagggaggtcctacagagattcagaggttttggcggtgttaggatcgaagaagacgtcgttgtaaccgattccggcatcgagctccttacatgtgtgcccagaactgtcgaagagatcgaagcttgtatggctggctgcgacaaggcctttactcccttttccggtcctaaatag

SEQ ID NO: 234261 - DNA, 1359 bp, synthetic construct
  misc_feature 1..1359: note = Description of Artificial Sequence: Synthetic coding sequence
  source 1..1359: mol_type = other DNA
atggcagctgctacaggaccaagtttttggctcgggaatgaaactcttaaggttcccttggccctgttcgccctgaatcgccagagactgtgcgaacggctccgcaagaaccccgctgttcaggcagggtcaattgttgtgcttcagggtggggaagaaactcagcgctactgcacagatacaggagtcctctttcgtcaagagtccttttttcactgggcctttggcgtcacagaacctggatgctacggagtgattgacgtagatacgggcaagagtactcttttcgtccccagacttcccgcttctcatgccacctggatgggaaagattcactcaaaagagcactttaaggagaagtatgctgtcgatgatgtacagtacgtggacgagattgccagtgtgctcacgagccagaaaccctctgtcctgttgactttgcgaggtgtgaacacagattctggatccgtgtgccgagaagcttccttcgacgggatcagcaagttcgaagtgaacaacactatcctgcacccggagattgtggaatgcttgtttgaacattactgttactcaagaggtggaatgcgtcactcctcatacacctgcatctgcgggagcggcgaaaattcagcggtactgcactacggacacgcaggggctccaaatgatcgcactattcagaatggggacatgtgtctgtttgatatgggcggagagtattactgtttcgccagtgatatcacgtgcagttttcccgctaatggaaaattcacagccgatcagaaagctgtgtacgaagccgtcttgcgcagctcgcgcgcagtcatgggagctatgaagccaggggtctggtggcctgacatgcacagacttgccgatagaatacacctggaggagctggcacatatgggcatcttaagcggatctgtggatgccatggtgcaggcacacttaggtgccgtatttatgccccatggtctaggccacttcctggggatagacgttcacgatgtgggaggctacccagaaggcgtagaaagaatcgacgaacccggactgaggtctcttcgcacagccagacacctacagcctgggatggttctgaccgtagaaccaggaatatactttatagaccacctgctggatgaagccctcgctgatcccgctcgggcttcgttcctgaatagagaagtgttacaacggttccggggattcggaggggtacgaatcgaggaagacgtggtagtcacggattccggaatcgaattgctgacctgcgtgccacggactgttgaagaaattgaggcctgtatggctggctgcgacaaggcattcacccccttttccggacccaagtag

SEQ ID NO: 234262 - DNA, 1290 bp, synthetic construct
  misc_feature 1..1290: note = Description of Artificial Sequence: Synthetic coding sequence
  source 1..1290: mol_type = other DNA
atggccgctgcgacaggtccttcgttttggttgggcaatgaaaccctgaaagtccccttagcactcttcgccttgaaccgccagcgactgtgcgagagacttagaaaaaatcctgcggtgcaggcagggtccatagtggtccttcaaggaggagaggagacgcagaggtactgtactgataccggcgtgttgttccgccagatagcttcagttctcacttctcagaagcctagtgtcctgttgactctgcggggtgttaatacagattcgggatccgtgtgtcgtgaagcctcctttgacggcatcagcaagttcgaggtcaacaacacaattctccaccctgaaatcgttgaatgccgagtgtttaaaacggatatggagctcgaggtcttaagatacactaataagattagctccgaggcacaccgagaagtcatgaaggccgttaaagtggggatgaaggagtatgagctggaatcactgttcgaacattactgctactcacggggaggaatgcgacatagctcatacacgtgtatttgtggcagcggagagaattcggcggtgctgcactatggccatgctggcgcaccaaatgacagaacaatacagaatggggatatgtgcttgttcgacatgggcggagagtactactgttttgccagcgatatcacttgttcattccctgcgaacgggaagtttactgccgatcaaaaagctgtgtacgaagccgtcctgcggtctagcagggccgttatgggcgcaatgaagcctggcgtctggtggcctgacatgcataggctggccgacaggattcatctcgaggagttagctcacatgggtattttatctggctccgtagacgccatggtccaagctcacctcggggcagtgttcatgccacatggtttagggcactttctggggattgatgtgcacgatgtcgggggttacccagagggagtcgagcgtattgatgaacctgggctcaggtcgttgcgcacagcacgacacctgcagcctggaatggtgctgaccgttgagcctggtatatacttcattgaccatctgttagacgaggcgttggccgatccagccagagcttccttccttaacagagaagttctgcagcgattcagaggcttcgggggtgttagaatcgaggaagatgtggtggtgacagattctgggatagagctgcttacctgcgtgcctagaaccgttgaggagatcgaggcatgcatggcgggttgcgataaggcttttactccgttcagcgggccaaaatag

SEQ ID NO: 234263 - DNA, 354 bp, synthetic construct
  misc_feature 1..354: note = Description of Artificial Sequence: Synthetic coding sequence
  source 1..354: mol_type = other DNA
atgcgagccagctccttcctgattgtagttgtatttttgattgctggaacccttgtgctcgaagcggctgtgactggagtccccgtgaaaggacaggataccgttaaaggccgtgtaccattcaatggacaggaccccgtcaagggtcaagtgtctgtgaaaggtcaggataaggtgaaggcgcaggaacccgtcaagggtcccgtgagcaccaagccgggatcatgtcccataattttgattagatgcgctatgcttaaccctcccaataggtgcctcaaagacaccgactgtccaggaatcaaaaaatgttgtgaaggcagttgcgggatggcttgcttcgtccctcagtag

SEQ ID NO: 234264 - DNA, 732 bp, synthetic construct
  misc_feature 1..732: note = Description of Artificial Sequence: Synthetic coding sequence
  source 1..732: mol_type = other DNA
atggcacgcctgtggggtgcgctgtcactatggcccttgtgggctgcagtcccttggggtggtgccgcagccgtgggagtccgtgcctgttccagtacggcagctcccgacggagtcgaagggccagctctgcgacggagctattggcgccatctcaggaggctggttctgggcccacccgagccacccttttcacatgtgtgccaggtcggagatcccgtcctgcgcggagtcgccgcaccagtggagcgtgcccagctgggaggtccagagctgcaaagacttacccaacgccttgttcaggttatgcgcagaaggagatgtgtaggactgtctgctccgcagctaggtgtgccccgtcaggttttagctcttgaactgccagaggccctgtgccgtgaatgcccacccagacaacgggctcttcggcaaatggagccctttcctctgcgggtctttgtcaatccatcactgcgagtgctcgatagccgactcgtcaccttcccggagggatgcgagtccgttgccggatttcttgcttgtgtccctcgctttcaggccgtgcagatttctggactcgatccaaatggagagcaggttgtgtggcaggcgtcaggttgggctgcaagaataatccagcatgaaatggaccacctccaaggttgtctatttattgacaaaatggacagccgaacattcacaaatgtgtattggatgaaggtcaacgattag

SEQ ID NO: 234265 - DNA, 294 bp, synthetic construct
  misc_feature 1..294: note = Description of Artificial Sequence: Synthetic coding sequence
  source 1..294: mol_type = other DNA
atggttttcgtccgacgcccttggccagctctgaccaccgtgcttctcgccctcttggtgtgcttaggggctcttgtggatgcatatcctattaaaccagaagcacccagggaggacgcgagcccagaggagctcaatagatattatgcgagtttgagacactacttaaatctggttacacggcagcgctatgggaagcgcgacggacctgataccctgctgagtaagacgttttttccagacggggaagatcgccctgtcaggagccgcagcgaaggcccagatctatggtag

SEQ ID NO: 234266 - DNA, 1992 bp, synthetic construct
  misc_feature 1..1992: note = Description of Artificial Sequence: Synthetic coding sequence
  source 1..1992: mol_type = other DNA
atggcccctaaaagagtagtccagctgtctctgaagatgcctactcacgctgtgtgtgtggttggagtggaggcgcatgtggacatccactccgatgttcctaaaggtgcaaactctttccgcgttagtggctctagcggagtagaggtgtttatggtgtacaaccgcacacgcgttaaggagccaatcggtaaagctaggtggcccctcgataccgacgctgatatggtggtctccgtggggacagcctctaaggaactcaaggacttcaaggtcagggtgagttatttcggcgagcaggaggaccaggctctgggacggtctgtcctctatctcactggcgtggacatctctctggaggtcgatactggacgcacaggcaaagtgaagcgatctcaaggagataagaaaacatggcgctggggtcccgagggttacggggcaatcctcctggtgaactgcgatcgggataaccatcgcagtgcagagcctgatcttactcactcatggctgatgtcactggccgatctccaggatatgagcccgatgctcctgagctgcaatggtcccgataagctctttgactcacataagctggtcctaaacgtgcccttctctgactctaagcgggtccgtgtgttctgcgcccgaggcggaaattcactgtctgactacaaacaggtcctaggcccacagtgcctctcctacgaagtggaacgccagcctggtgagcaggaaataaagttttatgtcgaaggcctcactttcccagatgcagacttcttggggcttgtttcactgagtgtgtccttggttgacccaggaacgcttcctgaggttacgttgttcaccgatacagtgggattccggatggcgccttggatcatgactccaaacactcagccgccagaggaactgtatgtttgccgcgtcatggacacccacgggtcaaacgaaaaatttctggaagatatgagctaccttacactaaaggcaaactgtaagctgactatttgcccacaggtggaaaatcgaaacgataggtggatccaggacgaaatggagttcgggtatattgaagcccctcacaagtccttcccagtcgtctttgatagccccagaaaccggggactaaaagatttcccctataagcggatcctgggcccagactttggctatgtcaccagagagatccctttgccaggacctagctctttagacagttttggcaatctcgacgtcagtcctcctgttacggtgggcggaaccgagtacccgctggggaggattcttattgggtcgagcttccctaagagcggtggccgacagatggccagggccgttaggaattttttaaaggctcagcaggttcaggcacctgtggaactctatagcgactggctttccgtgggccacgtggatgagttccttacctttgtgcccacgtcagatcagaaaggatttagactgctgctggcctctccctccgcctgccttaaactgttccaagaaaagaaagaagaaggatacggcgaagctgctcagtttgacggtctgaagcatcaggctaagagatcaataaacgaaatgttagctgacaggcacctacaacgagacaaccttcacgcccagaagtgtattgactggaaccggaacgtgctgaagagagagcttggactggctgagagcgatatcgttgacatcccccagctctttttcctgaaaaatttctatgccgaggcttttttccctgatatggttaacatggtggtccttgggaagtacttaggcatccccaaaccatacggccctatcatcaatggcaggtgttgtttggaggagaaagtgcagagcctccttgaacccctaggccttcactgcattttcattgacgattatctctcctaccacgagcttcaaggggagatccattgtggcacaaacgtacggaggaaacccttccccttcaagtggtggaatatggtcccctag

SEQ ID NO: 234267 - DNA, 537 bp, synthetic construct
  misc_feature 1..537: note = Description of Artificial Sequence: Synthetic coding sequence
  source 1..537: mol_type = other DNA
atggccagggctgtgaggaactttctcaaagcccaacaggtgcaggcacccgtcgaactgtatagcgactggttgtcagtgggccacgtggacgagtttctgacgttcgtaccaacgagcgatcagaagggctttagattgctcttggccagcccctcagcttgcctcaagctgttccaggagaagaaggaggagggatacggtgaggcagcccagtttgacggtttaaagcaccaagctaagagatccattaacgagatgttggcagacaggcacttgcagcgcgataatctccacgcccaagttaacatggtggtcctgggtaagtatttgggcatacctaagccgtacggccctatcattaatggaagatgttgcctggaggaaaaagtccagagcttgcttgaaccactggggctgcattgtatattcatcgatgattatctcagttaccatgaactgcaaggtgaaatccattgcggcacgaacgtgcggcgaaagccgttcccttttaagtggtggaatatggtaccatag

SEQ ID NO: 234268 - DNA, 405 bp, synthetic construct
  misc_feature 1..405: note = Description of Artificial Sequence: Synthetic coding sequence
  source 1..405: mol_type = other DNA
atgctggcagatcgacatctccagcgcgacaacttgcatgcccagaaatgtattgattggaaccgcaacgtactaaagcgcgaattaggcctggctgaatcagacattgtggatatcccacagctattcttcctgaaaaacttctatgccgaggcctttttccctgacatggtcaatatggtggttcttggaaagtacctcgggattcccaagccgtacggcccaatcatcaacgggcgatgttgcctcgaggagaaggttcagagcctgctggaaccacttggactgcattgcattttcattgatgattacttgtcctatcacgaactgcagggggaaatccactgcgggaccaatgttaggcggaagccatttcccttcaagtggtggaacatggtgccctag

SEQ ID NO: 234269 - DNA, 663 bp, synthetic construct
  misc_feature 1..663: note = Description of Artificial Sequence: Synthetic coding sequence
  source 1..663: mol_type = other DNA
atggcccgtgccgttcggaacttcctgaaagctcaacaagtgcaggcacccgtggagctctacagcgattggcttagcgttggtcacgtcgacgagtttcttacttttgtccccacatcagatcagaagggcttcaggctgttactggcttcccctagcgcatgtcttaagctgtttcaagagaagaaagaagaaggatatggtgaagccgctcagtttgatggtctaaagcatcaagctaaacgcagtataaatgaaatgctggcggacagacacctccagcgagacaatttgcacgcccaaaaatgtatagactggaaccgaaatgtgctgaagcgcgagttagggctagctgagagtgacattgtggacatcccacagctgttcttcctgaaaaatttctatgccgaggctttcttccctgacatggtaaacatggttgttcttggcaagtatttgggtatccccaaaccttatggtcctatcattaatggcagatgctgtcttgaagaaaaagttcagtcgctgttggagcccctagggctccactgcatcttcatcgatgattatctgtcttaccacgaacttcagggagagatacactgcgggacaaatgtccgcagaaagccatttccgttcaaatggtggaacatggtgccttag

SEQ ID NO: 234270 - DNA, 1314 bp, synthetic construct
  misc_feature 1..1314: note = Description of Artificial Sequence: Synthetic coding sequence
  source 1..1314: mol_type = other DNA
atgttgagggagcggaccgtacgccttcagtatggctcacgggtggaagctgtctacgtcctggggacctatctgtggaccgacgtttactccgcagcccctgctggcgctcagaccttcagtctgaagcattccgaacacgtctgggtggaggtcgtgcgagacggagaggctgaagaagtggcaacaaacggcaagcagaggtggctgttgtccccgtcaaccacactaagagttacaatgtcccaggcctcaaccgaggcgagttccgataaagtcactgttaactactatgatgaggaggggtccatccccatcgaccaagcaggcttgttcctcacagccattgagatttcccttgacgtggacgccgaccgtgacggcgtggtcgagaagaacaaccccaagaaagctagctggacatggggtcctgaagggcagggagccattctactggttaactgcgatcgggagaccccctggttgcccaaggaagactgccgtgatgagaaagtttatagcaaggaggaccttaaagacatgtcacagatgatcttgagaacgaaaggccctgatcgcctgccagcgggttacgaaattgtgctctatataagtatgagcgatagcgacaaggtgggcgtgttttatgtcgagaatccgttttttggacagcgctatatccacatcctcggccgtcggaaattatatcacgtggtaaaatacacaggaggatccgctgagctcctcttctttgtggagggcttgtgtttccccgacgaagggttttctgggctcgtgtcaatccacgtgtcccttctcgaatatatggctcaggacatcccactcacccctatcttcaccgacacagttatcttcagaattgccccttggattatgacgcccaacattctaccccctgtctctgtttttgtttgttgtatgaaagataattacctgttcctcaaagaagtcaaaaacctcgttgagaagacaaattgcgagctcaaggtatgtttccagtatctgaatagaggggaccggtggatccaagacgagatcgagttcgggtacatcgaagctcctcacaagggtttccctgtggtgctggactccccaagggatggcaacctgaaggattttcctgttaaggaattgttgggccctgactttgggtatgtgactcgagaacctctctttgagagcgttacgtctctggacagtttcggcaatttggaggtctctcccccagttacagtgaatggcaaaacataccccctgggaagaatcctgatcgggagcagctttcccctatag

SEQ ID NO: 234271 - DNA, 1998 bp, synthetic construct
  misc_feature 1..1998: note = Description of Artificial Sequence: Synthetic coding sequence
  source 1..1998: mol_type = other DNA
atgcttcgtgagagaactgtcaggttacagtatgggtctcgggtcgaagccgtctacgttctgggcacctacttgtggacagacgtttatagcgctgctccagccggagcccaaacatttagcctgaaacacagcgaacatgtgtgggttgaagtggtgagggacggggaggctgaagaggtggccaccaacggtaagcaacgctggctactgtctcctagcacgacgcttcgtgtaacaatgagccaagccagcactgaggcatcctccgacaaggtaacagtgaattattatgacgaggagggcagcatcccgattgatcaggctggccttttcctcacggcgattgagatctctttggatgtggatgccgatagagatggcgtggtggagaagaacaatccgaaaaaggcctcttggacctggggccctgagggacagggtgccatcctgctcgtgaattgcgaccgagagacaccctggctgcccaaggaagactgtagggatgagaaagtttactccaaggaggacttgaaggacatgtcccagatgatccttcgtactaaggggcctgatcgcctgccagcaggatatgagatcgtgctgtatatcagtatgagtgacagcgataaggtcggagtcttttacgtcgagaatccatttttcggccagcgatacattcacatcttgggacgacggaaactgtaccatgtggtgaaatatacgggcggaagtgcagagctgttgttttttgtagagggcctctgctttcccgacgagggtttcagtggccttgtgtccatccatgtcagtctgcttgagtacatggcacaggatataccactgaccccgatatttacagacaccgtcatcttccggatagccccttggatcatgaccccaaacatactgccccctgtaagtgtgttcgtttgttgcatgaaggataactatttattcctgaaggaggtcaaaaatttagtggaaaaaaccaactgtgagctcaaggtgtgcttccagtacctgaatcggggtgatcgatggatacaggacgaaattgagttcggctacattgaagcaccgcacaagggattccccgttgtccttgatagcccgagggacggcaatctgaaagattttcccgtcaaggagctgctggggcctgacttcggatacgttacgcgagagccgctttttgaatctgtcacttcacttgacagctttggcaacctagaagtgtccccacccgttacagtcaatggcaaaacatacccgcttggtagaatcctgatcggttcgtcctttccactgtccgggggtaggagaatgacgaaagtggtaagagactttctgaaggcccaacaagtgcaagccccagtggaattgtattctgattggctgactgtcgggcatgtggacgagtttatgagctttgtgccgattcccggaacaaagaagttcttgctgctgatggctagcacttccgcctgctacaaactgttccgagagaaacagaaagatggtcatggtgaggctatcatgtttaagggcttgggtgggatgtccagcaagcggataactattaacaagattttaagtaacgaaagtttggtgcaggagaacctttacttccagcgttgtcttgattggaaccgggacatactgaagaaggaactgggtctcacagagcaggacattatcgatctgccggcactcttcaaaatggacgaggatcaccgtgcgagggctttttttcctaatatggtgaacatgatagtgcttgacaaggacttgggtatacccaagccctttggaccacaagtggaagaagagtgttgtcttgagatgcatgtccggggactactggagccactggggctggagtgtacgtttatcgacgatatcagcgcttaccacaagttcctaggggaagtccactgtggtacgaacgtacggcgaaaaccctttaccttcaaatggtggcacatggtaccttag

SEQ ID NO: 234272 - DNA, 1650 bp, synthetic construct
  misc_feature 1..1650: note = Description of Artificial Sequence: Synthetic coding sequence
  source 1..1650: mol_type = other DNA
atgctgcgcgagagaacagtccgactgcagtatggcagtcgggtagaggccgtatatgttcttggcacctacctctggacagacgtttattctgctgccccagcaggggctcagacattctctctgaaacactcagaacatgtgtgggttgaggtggtacgggacggggaagctgaggaagttgccaccaacggcaagcagcgttggctgctgtctccatctaccaccttacgagttactatgtcccaggcctctacggaagcgtccagcgataaggtaacagtgaactattatgacgaggaagggtcgatccccatcgaccaagcaggtctgtttcttaccgccattgaaattagcctggatgtagatgccgatcgcgacggtgtggtggagaagaacaacccaaagaagacacgcagctccgcaaacgccatttctactagctgggctggcggaagcagcaccatgtggtcatcaaccagagtggccccacgatcttgctgctcatcctggaaggcctccgtgtcacccacacgggctagccaagcatggtccccctctatgtccgcctgttggagtacatggccttccatgaaggacaattacctttttttaaaagaggtgaagaacctggttgagaagacaaattgcgagctcaaagtttgttttcagtatctcaatagaggagacagatggatccaggacgaaatcgaatttggatacattgaagcacctcataaaggctttccggtcgttctggacagcccgagagatggtaacctcaaggattttcctgtgaaggaattactggggcctgacttcggttacgtgaccagagaacctctgtttgagagtgtcacttctctggattcctttggaaacctcgaagtctctcctccggtgactgtgaacggcaagacataccccctaggcagaatcctaatcgggagctcttttccactctcagggggtagaaggatgactaaagttgttagagacttcctgaaagcacagcaggtgcaggcccctgtcgagctgtatagtgattggctcactgtgggccacgtggacgagttcatgagttttgtgccaataccaggaactaaaaagttcttactccttatggcttccacctccgcctgttataagttgtttcgagaaaagcaaaaagacggccatggagaggcgatcatgttcaaaggtctgggcggaatgtcttctaagcgtatcacaatcaacaagattctgtccaatgagtctctggttcaagagaatctgtattttcaacgatgcctggactggaaccgcgacatcctcaagaaagagttaggtctcacagagcaggacatcatagatctgccagcacttttcaaaatggacgaggatcacagagctagagccttcttccctaacatggtcaacatgattgtcttggataaggaccttgggataccaaaaccattcgggcctcaagtcgaagaagagtgctgtctggagatgcatgtgcgagggctcctcgaacccctgggacttgagtgcaccttcatcgacgacatatctgcttaccacaagttcctgggggaggtgcattgtggaacaaatgtacggagaaagccatttacatttaaatggtggcacatggtgccttag

SEQ ID NO: 234273 - DNA, 1995 bp, synthetic construct
  misc_feature 1..1995: note = Description of Artificial Sequence: Synthetic coding sequence
  source 1..1995: mol_type = other DNA
atgtccttacagaggatcgtgcgagtcagtctcgagcatcccaccagcgcggtttgcgtcgcaggggtggaaacactggtggatatttatggcagtgtgccagagggtacggaaatgtttgaggtgtacgggacacctggcgttgatatctacatctctcctaacatggaacgaggaagagagagagcagacactcggaggtggcgctttgatgctaccttagagatcatcgttgttatgaatagtccctctaatgatctcaatgattcccacgttcagatatcatatcattcctctcatgagcccttacccctcgcctatgctgtattgtatctgacctgtgttgatatttcactggactgtgatctgaactgtgaaggcagacaggatagaaactttgtcgacaaacggcaatgggtctgggggcctagcggatacggcggaatcctgttagtcaactgcgaccgtgatgatccatcctgtgatgtccaggataattgcgaccaacatgtccattgtctgcaggatctggaagacatgtctgttatggtactcagaactcaaggcccagccgctttattcgatgaccacaaactcgtcctacacacctcaagctacgacgcaaaacgggcacaggtatttcacatatgcggacccgaagatgtttgtgaagcctatcggcatgtgttggggcaggacaaggtttcatacgaagtgccacgtcttcatggtgatgaggaacgcttttttgtggaagggttgagcttccccgacgctgggttcaccggactgataagtttccatgtgaccctgttagacgactccaacgaagattttagtgctagccccatcttcactgacaccgtggtttttcgagtggctccctggatcatgactcctagcacactgccaccgttggaggtgtacgtttgtcgtgtgcggaataatacctgctttgtcgatgcagtcgccgagctggccaggaaggctgggtgcaaactgactatatgcccccaggccgagaatagaaatgatagatggattcaggatgagatggagctgggctatgtacaggcacctcataaaacactccccgtagtctttgatagcccacgcaacggcgagctccaggacttcccctataaaaggattctaggacctgattttgggtacgttaccagagagcccagagatcgaagcgtcagcggcttggactcattcgggaatcttgaggtgtcgcccccagtcgtggcgaatggtaaagagtatccgctggggcgtattctaattggaggcaacctaccaggttccagcggcaggcgtgtaacacaggtggtacgcgattttctgcacgctcagaaagtgcagccacccgtggaattgttcgtggactggctggcagtgggacatgtggacgagtttttatcttttgtgcccgcacccgacggcaagggattccgcatgctgctggcgtcacctggtgcatgttttaagttgttccaagaaaagcagaagtgtggtcacggacgggctctgctgtttcaaggagttgtggacgatgagcaggtgaagacaatcagtataaaccaagtcttgtctaacaaggacctaatcaattacaataaattcgttcagtcttgcatcgactggaacagagaggtgctgaagcgtgagctgggacttgcggagtgcgatataatcgacatccctcagctgttcaagaccgagcggaagaaggcaacagcttttttccctgacctggtaaacatgttggtcctcggaaaacacctgggcatcccgaaaccattcggtcctattattaatgggtgctgctgtctggaggaaaaggttcgtagcctacttgagccactagggctgcattgtaccttcatagatgatttcacaccctatcatatgcttcacggtgaagtgcactgcggcacaaacgtgtgccggaaacccttctcatttaagtggtggaatatggtgccatag

SEQ ID NO: 234274 - DNA, 645 bp, synthetic construct
  misc_feature 1..645: note = Description of Artificial Sequence: Synthetic coding sequence
  source 1..645: mol_type = other DNA
atggctcagggcacattaatcagggtgactccagagcagcccacgcacgctgtgtgtgtgttagggacactgacacagctggatatttgttcttcggcccctgaggactgcacaagttttagtattaacgcttcaccaggcgttgtggtcgacattgctcatgggcctccagccaagaaaaaatctacaggttcctccacctggccacttgatccaggtgtcgaagtgaccctgactatgaaagtggcttccggttctactggggaccagaaggttcagatatcctattacgggcctaaaacacccccagtgaaggcgctgctctatcttactggcgttgacggcgtatcaccgtgtcaccccggttggtccgcaatgcacgatctggctcactgtaatctgcgcctgcaggttcaggcaatactgtgcttttccgttcctagttcttggactaccggagcatgccaccatgcgtggttaattttcgtcttccttgtagagatggaattccaccacgtgggccaggcagggcttgagctcttgacgagcggagacctgcctgcgagcggctctcaatctgccaggattaccggtatgaaccattgcgctagaccttcaatcttccttatattgaaatacttatag

SEQ ID NO: 234275 - DNA, 1992 bp, synthetic construct
  misc_feature 1..1992: note = Description of Artificial Sequence: Synthetic coding sequence
  source 1..1992: mol_type = other DNA
atggcacaagggaccttgatccgagtcacacccgagcagcccacacatgctgtgtgcgtgctcggtaccctgacccagctcgatatttgcagctctgctccagaggattgcaccagtttctcaataaatgccagtcctggggttgtggttgacattgctcacggcccacccgctaaaaagaagtcaactggatcttccacctggccacttgatccaggtgtcgaggtaaccctcaccatgaaggtggcttccggtagtaccggggaccaaaaggttcaaattagttattatggaccaaaaaccccacctgtgaaagccttgttgtacctgacaggggtggaaatcagcctgtgcgctgacattaccagaaccggaaaagtgaagccaacccgcgcagtgaaagatcagcgaacctggacatggggcccatgtgggcagggcgctatcctactggtgaactgcgaccgggataatctggagtccagcgccatggattgcgaggacgacgaagttctggactctgaggacctccaggatatgtccctcatgaccctttctactaagactcccaaagacttcttcaccaaccacactttggtcctgcatgtggcccgttctgaaatggataaagttagggtctttcaggcgacccggggaaagctttccagcaagtgctcagttgtgctgggacccaaatggccttcccactacctcatggtgcctggcggtaaacacaatatggatttctacgtagaagctctggcttttcctgacaccgactttcctggactaataacgctgacaatctcccttttggatacttccaacctagagctacccgaggccgtggtgttccaggacagcgtggtttttcgagttgcgccatggattatgaccccaaatacacagccgcctcaggaggtatatgcgtgctctatcttcgagaatgaggattttctgaaaagcgtcaccacccttgcaatgaaggcgaaatgcaagttgactatctgccctgaagaggaaaatatggacgaccagtggatgcaagacgaaatggaaatcgggtacatccaggcaccccacaagacccttcccgtcgtcttcgactcaccgcgaaacagagggctgaaggagttccctatcaaacgggtcatggggccagattttggctacgtgaccagaggtccacagacaggcggtatctccggactggacagctttgggaatctggaggtgtctccccctgtgactgtcagaggaaaggaatatccgcttggcaggatcttgttcggggattcatgctacccaagcaacgattcccggcagatgcaccaagccttacaggatttcctgagcgcccaacaggtccaggccccagtgaaactgtacagtgattggctgtccgtggggcacgttgatgaattcctttcctttgtacctgcccctgacaggaagggctttcggctgctcctcgcgtcaccaaggtcctgctataaactgttccaagagcagcaaaatgaaggtcacggagaagcattgctgtttgaaggcatcaaaaagaaaaaacagcagaaaattaaaaacatcctcagtaataagaccctgcgtgaacacaattcatttgttgagagatgcattgactggaatagggaactgctgaaaagagagcttgggctcgctgaatctgatatcatcgacattccgcagctgttcaagttgaaagaattctctaaagccgaggcgttttttcctaatatggtgaacatgttggtcctgggaaagcatctgggaatccctaagccattcggacctgtcattaatggcaggtgctgtttggaggaaaaggtctgctccttgctcgagcccctcgggctgcagtgcactttcataaatgatttttttacataccatatccgccacggagaagtccattgcgggacgaacgtgcgacgcaaaccattctctttcaaatggtggaacatggtcccctag

SEQ ID NO: 234276 - DNA, 384 bp, synthetic construct
  misc_feature 1..384: note = Description of Artificial Sequence: Synthetic coding sequence
  source 1..384: mol_type = other DNA
atggcacaagggaccctcataagggtaacacctgaacaaccgacccatgctgtgtgtgtacttggtacgcttacgcagctagacatttgttcctctgctcccgaagattgcaccagttttagcataaatgcgagccccggagttgtggtggatattgctcacgggccacccgcaaagaaaaagtccactgggtcgagcacatggccgctggacccaggcgttgaagttaccctcacaatgaaagtagccagcggctccactggagaccagaaagttcaaattagctactacggtcccaaaactccccctgtcaaagcccttttgtatctgaccggggtcgatggggtgtctccctgccatcctggctggtccgccatggcatag

SEQ ID NO: 234277 - DNA, 2628 bp, synthetic construct
  misc_feature 1..2628: note = Description of Artificial Sequence: Synthetic coding sequence
  source 1..2628: mol_type = other DNA
atggacacagtccatcacatgctgttgtttggctgcaacatgccaagcagcactggatcatactggttctgtgacgagggcacttgcaccgataaggctaatatattgtacgcgtgggcgaggaacgctcctcccaccagactgcctaagggcgtgggttttagggtgggcggagagaccggctccaagtacttcgtgctacaggtgcattacggagatatatcagcctttagggacaacaacaaggactgtagcggtgtgtctcttcacctgacccggctcccccaacctcttattgccggaatgtaccttatgatgtcagtggacaccgtgattcctgcaggggagaaagtggtgaattcggacataagctgtcattacaaaaattatcctatgcatgtgttcgcttatagggtccacacacaccacctgggaaaagtcgtgtcagggtatagggttcgcaacggacagtggaccctgatcggccgacagagccctcagctaccccaggcgttctaccctgtcggacaccctgtggatgtgtcgttcggagacctgctcgctgcaaggtgtgtgtttaccggagaagggagaactgaagccacacatattggcggaacatcctccgacgaaatgtgcaatctgtatatcatgtactatatggaggccaagcatgccgtgtcgttcatgacctgcactcagaacgtagctcccgatatgttcagaacgattccaccagaggcaaacattccgattcccgtgaaatctgacatggtgatgatgcacgaacaccacaaagagactgagtacaaggacaaaatccctctgttgcagcaaccaaagcgcgaggaagaggaagtgctggaccagggcgacttctacagcctcctgtctaagctgctgggagagagagaggatgtggtgcacgtccacaaatataatcccacggaaaaagctgaaagcgaatccgatctggtggctgaaattgctaatgttgtccagaaaaaggacttaggacgatctgacgcaagagagggggctgagcatgagcggggaaatgctatcttggttcgagaccggatacacaagtttcatcgcctggtgagcaccctgagacccccagaatctagagtgtttagcctgcaacagcccccacccggagagggtacttgggaacccgagcacactggcgacttccatatggaagaagctttagattggccaggcgtctacctgttgcccggacaggtatctggcgtggccttagaccctaaaaataatctggtgattttccacaggggggaccatgtatgggacggcaacagtttcgattctaagtttgtgtatcaacagataggtctggggccaatagaagaggataccatcctggtgatagaccccaacaatgcagcggtgctccagagtagcgggaaaaacttgttttacctgccccatgggctatcaatagacaaggacggaaactactgggtgactgatgtcgcactccaccaagtgttcaagctcgaccccaataataaagagggtccagtgctcattttgggcaggtctatgcagcctgggagcgatcaaaatcacttttgtcagcccacagacgtcgccgttgatcctgggaccggcgctatttacgtttccgatggttattgtaattccaggatcgtacagtttagcccgtccgggaaattcatcacccagtggggcgaggaaagttccggatcctcccccctgccagggcaattcacggtgccccattcgcttgccctagtgcccctcctggggcagctttgtgtagctgacagggagaacggcaggattcagtgctttaagacggacacaaaagagttcgtgagagagattaaacattcttcctttgggagaaatgtctttgctatctcctacattccagggctcttgttcgccgttaacggcaagccccatttcggcgatcaggagcctgtccaaggtttcgtgatgaacttctccaacggagaaatcattgacattttcaaacccgtccgtaaacactttgatatgcctcatgacattgtagcatctgaggacggcacagtctatattggtgatgcgcacacaaacactgtttggaaattcacattgacagagaagctcgagcacagaagcgtaaaaaaggccggaattgaagtacaggaaattaaagccgaagcagtcgtggagacgaagatggagaacaagcccacttcctctgaactgcagaaaatgcaggaaaagcaaaagctgatcaaggaacctggatctggcgtgccagtggtgctgatcaccacactcttggttatcccagtggttgttctcctggccattgccatcttcattcggtggaagaagtctcgagcatttggcgactccgaacacaagctggagacctcctccggcagagtactgggtcggttccgcggaaaaggaagcggcggactgaaccttggtaatttctttgcttcccggaagggctactcccgcaagggcttcgatcgcctgtccacggagggcagcgaccaggagaaagaagatgacggaagtgaaagcgaggaggaatattctgctcccttgcctgccctcgcacctagcagctcgtag

SEQ ID NO: 234278 - DNA, 2925 bp, synthetic construct
  misc_feature 1..2925: note = Description of Artificial Sequence: Synthetic coding sequence
  source 1..2925: mol_type = other DNA
atggctggtcgggtgcccagcttgttggtgttgttggtgttcccctcttcctgcctcgcatttaggagccctctgtctgtattcaagcgattcaaagaaactactagaccattctctaacgaatgtctcgggactacccggccagtggtgccaattgatagtagcgatttcgctctcgacatacgcatgcctggggtcacccccaaacagagcgatacatatttttgcatgagtatgcggatacccgtcgacgaggaggctttcgtgattgattttaaacccagagcctctatggatacagtgcatcatatgctgctgttcgggtgcaacatgccctcatcaacgggttcatattggttctgtgatgaagggacgtgcaccgacaaggccaatattctctacgcatgggcacgaaatgccccacccacccgtctgcctaagggcgtgggtttccgcgttgggggagagactgggtcaaagtatttcgtgctccaggtccattatggcgacattagcgcgtttagggacaataataaggattgttctggggtatccctccatctcacgcgtctcccacaacccctaatcgccggaatgtaccttatgatgtcagtggacaccgtgattcccgcaggggagaaggttgtgaattcagatatctcatgtcactacaaaaattatccgatgcacgtctttgcctacagagtacatactcaccacctgggaaaagtcgtgtctggataccgtgtcagaaacgggcagtggaccctcattggacgccaaagcccccagctgccacaggcattctaccctgtgggacaccccgttgatgtatcctttggggatctgttggctgccagatgcgtgttcacaggcgagggcaggactgaagccacccacatcgggggtacctcctccgatgaaatgtgtaacctctatatcatgtattatatggaggccaaacatgccgtatctttcatgacttgcacccagaacgtggcaccagatatgttcaggactatcccccctgaagccaatatcccaattcctgttaaatctgacatggttatgatgcatgaacaccacaaagagacggagtacaaggacaagattccactgttgcagcagcctaagagagaggaagaggaagtccttgatcaaggagacttctactccttgctctctaagctgctcggagagcgggaggacgttgtgcatgttcacaagtacaatcctacggaaaaggcagagtccgaaagtgatctggtggcagaaatcgcaaatgtggtccagaagaaagatctaggtagaagcgatgccagagaaggggctgagcatgagcgagggaacgcaatacttgtgagagatcgtattcacaagtttcataggctggtgagcaccttgcggcctccagagagcagggtcttctcacttcagcagccaccgccaggggagggaacctgggaacctgagcacacaggagactttcacatggaggaagctctggactggccgggagtgtatttattaccaggccaggtgagcggcgtcgccctggaccctaagaacaacttagtgatttttcacagaggagatcatgtctgggatggcaactcttttgattcaaaatttgtataccagcaaattgggctcggcccaatcgaagaagacacaattctggttattgaccccaacaatgcagcggtcctccagtctagtggcaaaaatctgttttacctgccgcacggcctcagtattgacaaggatgggaattattgggtgactgacgtcgcattgcaccaggtattcaagcttgaccctaacaacaaggagggccctgtgctgatcctgggtagatccatgcagcctggaagcgatcaaaatcatttttgccagcctaccgacgtggcggtcgaccctggaacaggcgctatatatgtttccgacggatattgcaactcacggattgtgcagttcagcccttccggaaagtttattactcagtggggagaggaaagctctggctcctctccattgccagggcagtttaccgtgcctcactcacttgcgcttgtgcccctgctcggacaattatgcgtggccgacagagaaaacgggaggatccagtgcttcaagacagacactaaggaattcgtgcgggagatcaagcactcctcattcggcaggaacgtgtttgcaatttcttacatcccaggtctactgtttgccgtgaacggaaagccgcactttggtgaccaggagccagttcaaggctttgtcatgaacttctccaacggcgagattatagatatctttaaacctgttcggaagcatttcgatatgcctcacgatatcgtggcctcagaagacggaacagtgtatatcggcgatgcacacaccaacacggtttggaagttcacccttaccgaaaaactcgaacatcgcagtgtaaaaaaagctggaattgaggtccaggagattaaagaggcagaggcggtcgttgaaacaaaaatggagaacaaacccacatcctctgaactccagaagatgcaagaaaagcaaaagttaatcaaagaacccggatcgggcgttcctgtggtactcatcactacacttctggtgattcctgtggtcgtattactcgctatagccattttcatccgttggaagaaaagccgtgcctttggggctgacagtgagcacaaactggagacctcaagcggccgtgttcttggcaggttcagaggtaagggatccgggggtctgaatctgggaaacttttttgctagtcgtaaggggtattcgcgaaagggctttgaccggttgagtaccgaaggaagcgaccaggagaaggaggacgatggcagcgagagcgaagaggagtatagtgcgccattacctgcactcgctcccagcagtagctag

SEQ ID NO: 234279 - DNA, 2664 bp, synthetic construct
  misc_feature 1..2664: note = Description of Artificial Sequence: Synthetic coding sequence
  source 1..2664: mol_type = other DNA
atggcaggccgtgtcccatctctgctggtgctcctggtcttccctagctcttgcttagcctttcggtctcccctgagtgttttcaagaggttcaaagagacaacccgtccattctctaacgaatgcctcggcaccactcggccagtggttcctatcgatagctccgatttcgcgctagatatccgaatgccaggggtgactcccaaacaaagcgatacatatttctgcatgtctatgcggattccggtcgatgaagaggcctttgtaattgacttcaagccacgcgcttctatggacacagtgcatcatatgctgctgttcggctgcaatatgccatctagcacgggttcttactggttctgtgatgagggcacgtgcaccgataaggctaacattctgtacgcctgggctcgcaacgcccctcccacacgcctcccaaagggagtcggctttcgcgtcggcggagagactggttctaaatatttcgtgttacaggttcattacggcgacattagtgcattcagggataacaataaggactgttccggcgtgagcttgcatctcacgcgactcccacaaccgctgatagccggtatgtacttgatgatgagcgttgataccgtcattcccgcaggggagaaggttgtaaatagtgacatttcgtgtcattataagaattatccaatgcacgttttcgcctatcgggtgcatacccaccacttaggcaaggtggtgagcggctaccgcgtgcgaaacggccagtggactttgatcggcagacagagcccccaactgccgcaggccttttatcctgtcggacacccagtcgatgtttcgttcggggatctgttagccgcacggtgtgttttcacaggcgaggggagaaccgaggccactcacattggagggacttcgtcggatgaaatgtgcaacctctacatcatgtactatatggaggctaagcacgccgtgtcttttatgacatgcacacagaacgtggctcctgatatgttcagaactataccacctgaagccaacattcctattccagtaaagagtgatatggtgatgatgcacgagcatcacaaggagacagaatacaaggacaagatcccccttctgcagcagccaaaacgggaagaagaggaggttctagatcaaggggacttctactccttactgtccaaactgctgggagaaagggaggacgtagtgcacgtgcacaagtacaatccaacagaaaaggctgagtcagagtcggatctcgttgccgaaattgcaaatgttgttcagaagaaagacctcggcagaagcgacgcccgagagggagccgagcatgaaagaggaaacgccatcctggtccgggaccgtatccacaaatttcatcggctggtgagcaccctacgacctcccgagtcccgagtcttcagcctccagcagcccccacccggagagggcacttgggagccagaacatactggtgacttccacatggaggaagctctagactggccaggcgtttacctcctgcctggacaggtgtctggagtcgcgctggatccgaaaaataatctagtgatcttccaccgtggggaccacgtgtgggatgggaattccttcgactctaagtttgtctatcagcagattgggcttggaccaattgaggaggacacaatacttgtgatcgaccctaacaatgctgcggttttacaatcgtctgggaagaacctcttttatttgccacacggcctgagtatcgacaaggatgggaattactgggtgaccgatgtcgcccttcaccaagtcttcaaactggaccccaataacaaggaaggacccgtgctgatactcgggaggtctatgcagcccggttctgatcagaaccacttttgtcagcccaccgatgtggccgtcgatcccggtactggagccatttatgtatcagacgggtactgcaattcaagaattgttcaattctctccgagtggaaaatttattacccagtggggagaggagtcgagcggaagcagcccattgcccggtcagtttacagtcccccatagcctggcactggttcctcttctggggcaattgtgcgtggcagacagggaaaatggcagaattcagtgtttcaagacagacacaaaagagttcgttcgagaaatcaagcatagtagctttggtaggaacgtgttcgccatttcttacattcctggactcctgtttgctgtgaacggtaagccccatttcggagaccaggagcccgtccaggggtttgtcatgaactttagcaatggcgagatcatcgacatcttcaagcctgtccgtaagcatttcgatatgccccacgacatcgttgcgagcgaagatggaaccgtgtacatcggagacgcccacacgaacacagtgtggaaatttaccttaacagaaaagctagagcataggtctgtaaagaaggcaggaatagaggtccaggaaataaagggcaagggatctggcggtctgaacctgggaaacttctttgcgagcagaaaggggtactcccgcaaaggatttgatcgtttgtccaccgaaggatccgaccaggagaaggaggatgatggctcagagagcgaagaagagtatagtgctccgctccctgcgctggctcccagctctagttag

SEQ ID NO: 234280 - DNA, 2601 bp, synthetic construct
  misc_feature 1..2601: note = Description of Artificial Sequence: Synthetic coding sequence
  source 1..2601: mol_type = other DNA
atggccggtcgagtcccttccctgcttgtgttgctggtcttcccatcatcatgcctggcattccggtctcccttaagcgtgttcaagcggttcaaggagactaccaggccgtttagcaatgaatgtctggggacaacaaggcccgtggtccctatcgacagttcggacttcgccctggacatccggatgcctggggtcactccgaagcagagtgacacctacttctgtatgtctatgcgcatccctgtagacgaggaggctttcgtgatcgacttcaaacccagagcttcgatggacaccgtccatcacatgctgctgttcgggtgtaatatgccctcatcaacaggcagctattggttctgtgacgaaggcacgtgcactgacaaggctaatatcctttacgcttgggctcgcaacgcaccacctaccaggctccccaagggggttggcttcagagtgggaggtgagactgggagtaagtatttcgttttgcaggtgcactacggtgatattagcgccttccgagataacaataaggactgctccggggtctctctgcaccttactcggctcccacaacccttgattgcagggatgtatctcatgatgtcggtcgataccgtgatccccgcaggagagaaggtagtcaactcggacatatcgtgccattataaaaactaccctatgcacgttttcgcttaccgtgtccacacacaccatctaggcaaggtggtatccggttaccgggttcggaacggccagtggaccttgattggacggcagtctccgcagcttcctcaggctttttaccccgtcggccatcccgttgacgtttcttttggggatctgcttgctgcacgttgtgtgtttaccggggaggggaggactgaagctacacacataggaggcacatcatccgatgagatgtgtaacctgtacattatgtactacatggaggctaaacatgccgtgagttttatgacttgtacccaaaatgtcgccccagacatgttccgaacgataccaccggaagcaaatataccaatcccagtcaagtctgatatggtcatgatgcatgagcaccacaaggaaacagaatacaaagacaaaattcccctgttacagcagcctaagagggaggaggaagaagttttggatcaagattttcacatggaggaggccctggactggcctggagtctatctcctcccagggcaggtgtccggagtggcactcgaccccaaaaacaatctggtcatctttcacaggggcgatcatgtgtgggatggcaatagttttgatagtaagtttgtatatcagcagatcggtttaggacctatcgaggaagatacaatcctggtcattgaccccaataatgccgctgtattacagtcttccggcaagaacctcttttacctgccccacggactgagcatcgacaaagacggcaattattgggtgaccgacgtcgccctgcaccaagtgttcaaactggaccccaacaacaaggagggacccgtgctgatcctgggcaggagcatgcagccaggcagcgatcaaaatcatttttgtcaacctactgatgtagccgtcgaccctggcactggggcaatttacgtgtctgacggttattgtaactctagaattgtgcaattttcccctagtggtaaattcataacccagtggggtgaagagtcaagcggtagctctccattgccgggacagttcacagtgccccactcactagcactggtgcctctcctggggcagttgtgcgttgcagaccgtgaaaatggccgtattcagtgctttaaaacggataccaaggagtttgtcagggagatcaagcactcgtcttttggccgtaacgttttcgcgatttcctatatcccgggtcttttgttcgctgtcaatgggaagccacacttcggggaccaagaaccagtgcagggctttgtcatgaatttctccaatggagaaataatcgacatctttaaacccgttcggaaacactttgatatgccgcacgacatagtggctagtgaggatgggacggtttacatcggcgatgcgcacacgaataccgtgtggaagtttaccctcacagagaagctcgaacacagatctgtcaaaaaggcaggaatcgaggtccaagaaatcaaggaagcagaagctgtagtcgagaccaagatggagaacaagccgacatcctctgaactgcagaagatgcaggagaaacagaagctaattaaggagcccggtagcggagtccctgtagttctgataaccaccctattagttattcctgtcgtcgttctgctggccatcgcgatctttattcggtggaaaaagtcaagggctttcggcgactctgaacacaagctagaaaccagcagtggcagagttcttggaagattccggggaaaaggaagcggaggtctgaatctgggcaatttcttcgcttcaaggaaggggtactcgaggaagggctttgatcggcttagtacggagggaagcgaccaagagaaggaagatgatggatcagagagcgaggaggagtactcagcccctctccccgcactggctccatcatcaagctag

SEQ ID NO: 234281 - DNA, 1008 bp, synthetic construct
  misc_feature 1..1008: note = Description of Artificial Sequence: Synthetic coding sequence
  source 1..1008: mol_type = other DNA
atgcagccaggaagtgaccagaatcacttttgccagccgaccgacgtggctgtggatcctggaactggagctatctacgtctcagatggttactgcaactctcgtattgttcagttcagcccatctggaaagttcattacccagtggggtgaagagtcatcggggtcgtcccctcttcctggtcagtttacagtgcctcatagtctggctttggtgcccttgctaggtcaattgtgtgtggcagatcgagagaacggtcgtatccaatgtttcaaaactgacactaaagagtttgttcgcgaaatcaaacattcatcctttggccgaaatgtgtttgccatttcgtacattccgggattgctttttgctgtgaacgggaagccccactttggcgatcaggagccagtgcagggtttcgtgatgaactttagcaatggtgagatcatcgacatcttcaaacccgtcaggaaacacttcgacatgcctcacgacattgtggcgtctgaagatggcaccgtgtatatcggcgatgctcacaccaataccgtgtggaaattcacactcacagagaaactagaacaccgctccgtgaaaaaggccggaatcgaggtacaggagattaaggaagcagaagctgtggttgagaccaagatggaaaataaaccaaccagtagcgagttgcaaaaaatgcaggagaaacaaaaactcatcaaagagcccggatctggggttcccgtggtacttattacaaccctgttagtgattccagtggtggttctcttagcaatcgctatttttatacggtggaagaagtcgcgagcgtttggcggtaaaggcagtggaggactgaacttggggaatttctttgcctctcgcaagggatactctaggaaggggtttgaccggttgagcaccgaggggagcgaccaagagaaggaggacgacggttcagaaagcgaagaggaatactccgcccctctcccagccctcgccccttccagcagctag

SEQ ID NO: 234282 - DNA, 468 bp, synthetic construct
  misc_feature 1..468: note = Description of Artificial Sequence: Synthetic coding sequence
  source 1..468: mol_type = other DNA
atgcacgagcatcataaggagactgagtataaggataaaatcccactcctccagcagcccaaacgggaggaggaggaagtccttgaccaaggagacttctactccctgcttagcaagctcctgggagaacgagaggatgtggtgcacgtgcacaagtataaccctactgagaaagcagagagcgaatctgacctggtagccgaaatagcaaatgtggtgcaaaagaaggacttggggagatccgacgccagagagggcgcagagcatgagcgcggaaatgccatcctggtgagagatcgaatccacaaatttcatcggctcgtcagtactctgagaccgcctgaatcccgggttttcagcctgcagcagccaccacccggtgaggggacctgggagcccgagcataccggcgcaaggagagaagatatgaagtgttttcagtgtaaggaaatgatttcggttcaatag

SEQ ID NO: 234283 - DNA, 2922 bp, synthetic construct
  misc_feature 1..2922: note = Description of Artificial Sequence: Synthetic coding sequence
  source 1..2922: mol_type = other DNA
atggcaggcagggtaccctcgcttctggttttgctagtctttccatcttcctgtctggctttcaggtcaccgctgtcagtttttaagaggtttaaggaaaccactcgccctttctctaatgaatgcctcggtacaacccgtccagtggttcccattgactcgtccgacttcgctctcgacattagaatgcccggagtaactccaaaacagtctgacacatacttctgtatgtccatgagaatcccagttgatgaggaggctttcgtaattgactttaagccgcgagctagcatggataccgtgcatcatatgttgctgttcggttgcaatatgccttcttctacaggctcatactggttctgcgatgaagggacgtgcaccgataaagctaacatactgtacgcatgggcgcgaaatgcccctcccacaagactgccaaagggcgtggggttcagagtgggcggagagacaggtagcaagtactttgtgctgcaggtccattatggagatattagtgccttccgtgataacaataaggactgctctggagtgtccctgcacttaactagactcccgcagcctctcatcgcaggcatgtatctcatgatgtccgtcgacactgtgatccctgccggagagaaggttgtgaattcggacatatcttgccactacaagaactatcctatgcacgtgttcgcctatcgagtccatactcatcatctgggcaaggtggtaagcggatatagagtgaggaatggccagtggaccctcatcggccgacaatcaccacagctaccgcaggccttctatcctgtgggtcatcctgtagatgtctctttcggagatctattggccgcacgttgcgtatttacgggcgagggcagaaccgaagccacacacatcggagggacctccagtgatgagatgtgtaacctgtacattatgtattatatggaggcaaagcatgcagtgagcttcatgacttgcacgcagaatgttgcaccagatatgttcaggactatccccccagaagcaaatatacctattccagtcaagtccgatatggtaatgatgcatgaacaccacaaggagaccgagtataaggataaaatccctcttcttcagcagcctaagcgcgaagaagaggaagttttagaccagggggatttctattccctactgtcaaaactgctcggcgaacgcgaggacgtggttcacgttcataagtacaatcctacagaaaaggctgagagtgagtcggaccttgtggcagaaattgcaaacgtagtgcagaaaaaggatttaggcaggagcgatgcacgggagggcgcagagcacgaacggggaaacgctatactagtgagagacaggattcacaagttccatcgtttggtatcaacattgaggccccctgagagtagagttttcagcttgcagcaaccccctcccggtgaaggtacttgggaacctgaacacaccggggatttccatatggaggaggcactagactggccaggagtctatctgctacccggacaagttagcggggtggcattagatccgaagaataatttagtgatctttcatcgcggtgatcacgtttgggatgggaactccttcgattctaagtttgtgtatcaacaaatcgggctggggccaattgaggaagataccattcttgttatcgatccaaacaacgccgcagtgttacagtcatcaggcaaaaacctgttttaccttcctcacggcctgagcattgacaaggatggcaactactgggtgacggacgttgctcttcatcaggtgttcaaactggatccgaataataaagaaggccctgtgctgatcttgggacgtagtatgcagccaggcagcgatcaaaaccacttttgtcaacccacagatgtcgcagtggatcccggaaccggtgcgatctacgttagcgacggatattgcaattcacgcattgtccagttcagtccgtcagggaaatttataacacagtggggtgaagaatccagcggatcgtcaccgcttccaggtcagttcactgtgcctcattcactggctctcgtgccattgctaggacaactgtgcgtggccgaccgggaaaatgggaggattcagtgcttcaaaacggataccaaagagttcgtgcgggagataaaacattctagctttggcaggaacgtcttcgcaatcagctacatcccgggtctgctgtttgccgtcaacggtaagccccacttcggtgaccaagagcctgtgcagggttttgttatgaacttctctaacggagaaataatagacatttttaagccagtgcgaaaacactttgatatgccacacgatatcgtagcctccgaagatggcacagtttacataggcgacgctcacacaaacaccgtgtggaagttcactctcactgaaaagttagaacatcgctctgtcaagaaagctggcatcgaggtgcaagaaatcaaagaagccgaggcagttgtcgagaccaagatggagaacaagcccacttcatccgaactacagaagatgcaggagaagcagaagcttatcaaagagccaggttccggggttccagtcgtccttataactacgctgctggtgatcccagtggtggtgctcctggcaatcgctatctttattagatggaaaaaaagtagagcattcggcgattccgaacataaactcgaaacatcgagcggacgtgtcctgggacggtttcggggaaagggctcaggaggcctgaacctggggaatttttttgccagcaggaagggatatagtcggaagggatttgataggctgtctactgaaggctcagatcaggagaaagaagacgacggctccgagtcagaggaggaatacagcgcacccttacctgcactcgcgccatcaagttcatag

SEQ ID NO: 234284 - DNA, 2718 bp, synthetic construct
  misc_feature 1..2718: note = Description of Artificial Sequence: Synthetic coding sequence
  source 1..2718: mol_type = other DNA
atggccggaagagttccatccctgttggtgttgctggttttcccatcctcttgtctggcgtttcgctcaccactgagtgtgtttaaacgttttaaggagacgactagaccattctcgaacgagtgtctgggtactacaaggcctgtggtgccaatcgattcctctgacttcgctctcgacattagaatgcccggtgtgacacctaaacagagtgacacctacttctgcatgtcaatgaggattcccgttgatgaagaggcatttgttatcgattttaagccacgcgctagtatggataccgtccatcatatgctgttgttcggctgcaacatgcccagcagtactggcagctactggttctgtgacgagggtacttgcaccgacaaagcaaatattctgtacgcctgggctaggaacgcgccaccgacacgtcttccgaagggggttgggtttcgggtaggtggcgaaactggatccaagtatttcgttctgcaggtgcattatggtgacatttcagccttcagggacaataataaggactgcagtggcgtctctcttcatctcactcggctacctcagccattgatcgccggaatgtatttgatgatgtctgtggacaccgttatccctgcaggcgaaaaagtggttaattcggacataagttgtcactataagaactatccaatgcacgtgttcgcgtatcgcgttcacacacatcacctgggcaaggtagtgtctggctaccgggttcgcaatggacagtggacgctgataggaaggcagagtccacagctgccacaggccttttatcccgtgggccatccagtggacgtctcatttggcgacctcttggccgctaggtgcgtcttcactggagagggtcgcacagaggcgacccacattggcggaacctctagtgacgaaatgtgtaatttatatatcatgtattatatggaagctaagcacgcagtgtctttcatgacctgcacccaaaacgttgctcctgatatgtttcgaacaatccctccggaggctaacattccaatccccgtcaaaagcgacatggttatgatgcacgagcatcataaagagaccgaatacaaggacaaaattcctctgctgcagcagcctaaacgtgaagaggaggaggtgctcgaccagggagacttctacagcctgcttagcaagctgcttggggagcgggaagacgtggtccacgtccacaaatacaaccccaccgaaaaggcagaaagtgagagtgacctggtcgcggagattgccaacgtggtgcagaagaaggacctgggtcgttccgacgctagggaaggcgctgaacatgaaaggggaaacgccatcctcgtcagagatagaattcataagttccataggttggtgagtacattacgtcctcctgaatcccgcgtgttctctctgcagcagccacctccaggagagggaacctgggagcctgagcacacaggcgattttcacatggaggaggcactggactggcccggtgtctatctccttcctggacaagtctcaggggttgctctggacccaaagaataacctcgttattttccaccgcggagaccatgtctgggacggaaattcctttgatagcaagtttgtatatcaacagatcggcctcggtcccatcgaagaggacacaattcttgtgatcgatcccaacaacgctgcagtgctgcagtcctctggaaaaaacttattctacctcccacatggcctaagcatcgataaagatgggaactattgggtgacagatgtggccctacatcaggtcttcaaactggatcctaataacaaagagggaccagtgctgattctaggcagatcaatgcagcctgggtccgatcagaaccacttctgtcagccaaccgatgtcgccgttgaccccggaaccggagccatatatgtgtccgacggttattgcaacagtcgaatcgtccaattttccccatccggaaagttcattacccaatggggggaggagagctcaggtagcagcccgctccctggccagtttacagtcccacactcccttgcgctagtccccctgctgggacagctgtgtgtagccgatcgggagaacggcagaatccaatgtttcaaaacagacactaaggagttcgtcagagagattaagcattcgtcattcggccgaaacgtttttgccatctcatatatccccggactgctgtttgccgtgaatggtaagccgcacttcggggatcaggaaccagtgcaaggcttcgtaatgaatttctccaatggcgagatcatcgacatcttcaaaccagtccggaagcacttcgatatgcctcatgatattgtggctagcgaagatggaactgtatatattggcgacgcgcatacaaataccgtgtggaaattcacactaacagaaaaactggaacaccgctctgtgaaaaaggcaggaattgaggtgcaagaaattaaggattccgagcataagctcgaaaccagtagcggacgcgtgctgggcagattcaggggcaagggtagtggaggattaaacctgggaaacttcttcgctagtagaaaagggtacagccgcaagggcttcgatcgtctgtcgacagagggcagcgaccaggaaaaggaggacgacggaagtgagagcgaggaggagtactctgccccactgcccgcattggccccatccagctcctag

SEQ ID NO: 234285 - DNA, 90 bp, synthetic construct
  misc_feature 1..90: note = Description of Artificial Sequence: Synthetic coding sequence
  source 1..90: mol_type = other DNA
atggctggacgggtcccatccttacttgtgctgctagtcttcccctcatcatgtttagctttccgatccccgcttagcgtatttaaatag

SEQ ID NO: 234286 - DNA, 87 bp, synthetic construct
  misc_feature 1..87: note = Description of Artificial Sequence: Synthetic coding sequence
  source 1..87: mol_type = other DNA
atggccggacgagtgccatctctcttggtgcttctggttttcccctcctcatgcctggcctttcggtctcccctgtctgtgttctag

SEQ ID NO: 234287 - DNA, 162 bp, synthetic construct
  misc_feature 1..162: note = Description of Artificial Sequence: Synthetic coding sequence
  source 1..162: mol_type = other DNA
atggccggacgcgttcccagtttgttggtgctgctggtatttcccagctcttgcctggcattcagatctccgttatccgtcttcaagcgctttaaggagactaccaggcccttctccaacgaatgtctaggaaccacaaggcccgtggtgcccatcgactag

SEQ ID NO: 234288 - DNA, 129 bp, synthetic construct
  misc_feature 1..129: note = Description of Artificial Sequence: Synthetic coding sequence
  source 1..129: mol_type = other DNA
atggccggtcgggtgcctagtttgctggtcctgttggtgttcccatcaagttgtttggcttttcggtctcccctgagcgtattcaagcggtttaaagaaaccacgcggccttttagtaacgagtgttag

SEQ ID NO: 234289 - DNA, 207 bp, synthetic construct
  misc_feature 1..207: note = Description of Artificial Sequence: Synthetic coding sequence
  source 1..207: mol_type = other DNA
atggccggacgggtgccctccctgctcgtactgttggtcttccccagcagctgcctggcgttcagatcccccctgtctgtgtttaagaggttcaaagagacgacacgccctttcagtaacgagtgtctgggcacgactcggccagtggtgcccattgactcctcggattttgccctcgatatccgcatgcccggagtgacaccttag

SEQ ID NO: 234290 - DNA, 78 bp, synthetic construct
  misc_feature 1..78: note = Description of Artificial Sequence: Synthetic coding sequence
  source 1..78: mol_type = other DNA
atggctggaagggttccgtctctgctcgtcttgctggtattcccctctagctgcctggcatttcggtccccactctag

SEQ ID NO: 234291 - DNA, 501 bp, synthetic construct
  misc_feature 1..501: note = Description of Artificial Sequence: Synthetic coding sequence
  source 1..501: mol_type = other DNA
atggcagccatcccaccagattcatggcagcctcccaatgtttacctggaaaccagcatgggcatcatcgtgttagagctgtactggaaacatgcccctaagacatgcaagaacttcgcggagttggcaagaagaggctattataatggcaccaagtttcacaggattatcaaggactttatgatccagggcggtgatcccaccggcaccggacggggaggggcttccatctacgggaagcagtttgaagacgaactccatcccgaccttaagttcaccggagcgggtatacttgccatggccaacgcagggccagatacaaatgggtctcagtttttcgttactctggcccctacacagtggttggacggcaagcacaccatcttcgggagagtgtgtcaagggatcgggatggttaatagggtgggtatggtagagacaaactcacaggataggcccgttgatgatgtcaaaatcataaaagcctatccttccggttag

SEQ ID NO: 234292 - DNA, 1563 bp, synthetic construct
  misc_feature 1..1563: note = Description of Artificial Sequence: Synthetic coding sequence
  source 1..1563: mol_type = other DNA
atggggaaacggcagcatcaaaaagataaaatgtatatcacttgcgccgaatacactcacttttacggaggtaaaaaacctgacctgcctcagacgaacttccgaaggctcccctttgaccactgttcactgtcactccagccttttgtctaccccgtttgtacccccgatggaatagtgttcgatctgctaaatatagtgccctggctgaagaaatatggaactaacccttccaacggcgaaaagcttgatggccgatctttaatcaagttgaattttagtaagaattcggagggcaagtaccactgtccagtactgtttacagttttcactaacaacacccacattgttgccgtccgcactacggggaatgtgtacgcgtatgaggccgtggagcaattgaacattaaggcaaagaacttccgggatctcctgacagatgagccgttctccaggcaggacattatcaccctccaggatccgactaacctggacaagtttaatgtgagcaatttttaccatgttaaaaacaacatgaaaattattgatcccgacgaagaaaaagctaagcaagatccatcttattatctgaagaatacaaacgctgagactcgggagacactccaggagttgtacaaggaattcaagggagacgagattctggcagcgaccatgaaggccccagagaaaaagaaggttgacaagttaaacgcagctcattatagcacaggaaaggtcagtgcgtctttcacatcaactgccatggttcctgaaacgacccacgaggctgcggctatagatgaagacgttcttagatatcaatttgtgaagaagaaaggatacgttcgcctccataccaacaagggcgacttgaatttagagctacactgtgacctgaccccaaagacatgtgagaactttattcgcttgtgcaaaaaacactattacgacgggactatctttcaccggagcatccgtaattttgtgatccaaggaggcgatccaacaggaactgggaccgggggagaaagctattgggggaaaccatttaaagatgaatttagacccaatcttagccacaccgggaggggaatcctgagtatggccaatagtggacccaacagcaatcgtagtcagttttttattaccttccggtcgtgcgcataccttgataagaagcacaccattttcggcagagtcgtgggcggtttcgacgtgctcacagccatggaaaatgtcgagtcagacccgaagacggaccgacctaaagaggaaatacgcatcgacgccacaacagtgttcgtggatccgtatgaggaagctgacgctcagatcgcacaagagagaaagacgcagctcaaggtggcacctgagacaaaagtcaaatcatcacagccacaggctggctcacagggcccacagacatttagacagggcgtgggcaaatacattaacccagccgctactaaacgcgcagccgaggaagaaccgtctacttctgccacagtcccaatgtcaaaaaaaaaacccagtcggggattcggcgactttagttcctggtag

SEQ ID NO: 234293 - DNA, 1563 bp, synthetic construct
  misc_feature 1..1563: note = Description of Artificial Sequence: Synthetic coding sequence
  source 1..1563: mol_type = other DNA
atgggtaagaggcagcatcagaaggacaagatgtatattacatgtgcagaatatactcacttctacggtggaaaaaagccagaccttcctcaaactaacttcagacgtcttccctttgatcactgtagcctcagcctacagccattcgtgtatcctgtctgcactccggatggaattgtctttgacctgctgaacatcgtgccttggttaaaaaaatatggcaccaacccttctaacggggagaaattagatgggagaagtctgattaagttgaacttcagtaagaactccgaagggaaataccactgtcccgttctgtttaccgtgttcacgaataacacccacattgtggcagtgcgtactactgggaacgtctacgcttatgaggctgtggagcagctcaacatcaaggccaaaaatttcagagacctgctcactgatgaacccttcagcaggcaggatatcatcaccttacaggatccaaccaacctcgacaagtttaatgtcagcaacttctatcacgtgaagaacaacatgaagattatcgaccctgatgaagagaaggccaagcaggacccatcctactatctgaaaaatacaaacgccgagaccagagagaccctccaggagttatacaaggagttcaagggcgacgaaatattagccgcaaccatgaaggctcctgagaaaaaaaaggtcgataaattaaatgccgctcactactccaccggaaaggtctctgcgtctttcacctcaactgctatggttcctgagacaacccacgaggccgctgctattgatgaagacgttctgcgatatcagtttgtcaaaaagaaagggtacgttagactgcacacaaacaagggagacctgaatttggagctacactgcgacttgacgcctaagacttgcgaaaattttatccgcctgtgcaagaagcactactacgatggaaccattttccacaggtctatcagaaattttgtgatccagggtggcgatccaacaggcaccggtacgggcggtgaaagctattggggaaagccatttaaggatgagtttagaccaaatctgagccacaccgggcgaggtattctctctatggctaacagtgggcctaacagtaaccgtagccaattctttatcaccttccggtcttgcgcttacctcgacaagaagcatacaattttcggtagagttgtgggcggatttgacgtccttaccgccatggaaaacgtggaaagtgatccaaagactgacaggccgaaggaagagattcgcatcgacgccaccactgtgttcgttgatccttacgaagaggcggatgctcagatagcacaggagagaaaaacccagcttaaagtcgcccctgagacaaaggttaagagctcacagcctcaagccggatcccagggacctcaaacgtttcggcaaggtgtcggtaagtatattaatccagctgctacaaagcgtgcggctgaagaggagccgtcaactagcgcaaccgttcctatgagcaaaaaaaagccctcacgtggttttggggatttttccagctggtag

SEQ ID NO: 234294 - DNA, 1563 bp, synthetic construct
  misc_feature 1..1563: note = Description of Artificial Sequence: Synthetic coding sequence
  source 1..1563: mol_type = other DNA
atgggaaagcggcaacatcagaaggataagatgtatatcacctgtgcagagtacactcacttttacggcggaaagaaacctgacttgcctcagactaatttcagaaggctccctttcgaccactgtagtctgtctctccagccgtttgtgtaccccgtgtgcactcctgatggaattgttttcgacttactgaacatcgttccctggctcaagaaatacgggactaaccctagcaatggggagaagctcgatggacggtccttgattaaactgaatttcagcaagaacagtgagggcaagtaccactgccccgtcctattcaccgtctttacaaacaatacgcacatcgttgcggtacggacgactggaaacgtgtatgcctacgaagccgtggagcagctaaacatcaaggcaaagaacttccgagatctgttaactgacgaacctttctctagacaagatataatcacgctgcaggatccaacgaaccttgataagtttaatgtctcaaacttctaccatgtgaagaacaatatgaaaattatcgaccccgacgaagagaaggccaaacaagatcctagttactatctcaaaaatacaaatgctgagactcgagagacacttcaggaactttataaggaattcaaaggagatgagattcttgctgctacgatgaaagctcctgagaagaaaaaagtcgataaactgaacgctgcacattattcgacagggaaagtaagtgcaagctttacatcaacagctatggtgccagagacaacccacgaggcagcagcaatagacgaggatgtcttgaggtaccagttcgtaaagaaaaaagggtatgtaaggctccacacgaataagggggacctgaacctggagctccactgtgatctcactcctaaaacatgtgagaacttcatccgactgtgcaagaaacattactacgacgggacaatcttccaccggtcgatcaggaatttcgtaatacagggcggagacccaacaggcacagggaccggcggtgagtcatactggggcaagcctttcaaggacgagttccgcccaaatctgtcccacaccggtcgtggtatactttccatggccaactccgggccaaactcaaacaggtcccagtttttcatcaccttccgctcctgtgcttacctggataagaaacacacaatattcggtcgggtggtcggcggattcgacgtgttaacagcaatggaaaatgtggagtccgatcccaaaaccgaccgacctaaagaagagattaggatcgatgccactactgtgttcgtggacccgtatgaagaagccgatgcacagattgctcaggaacgcaagacgcagctgaaggttgctccagaaaccaaggtgaaatccagtcaacctcaggcagggtcccagggaccacagactttccggcaaggtgtgggtaagtatattaacccagccgcaaccaaacgtgccgctgaagaggagccaagtactagcgccaccgtgccaatgtccaaaaagaagccatcaaggggctttggagacttttctagttggtag

SEQ ID NO: 234295 - DNA, 1584 bp, synthetic construct
  misc_feature 1..1584: note = Description of Artificial Sequence: Synthetic coding sequence
  source 1..1584: mol_type = other DNA
atggggaaacggcagcaccagaaggataagatgtacatcacctgcgcagagtacactcacttctatgggggtaagaagccggatttgccccagactaattttagacgtctcccattcgatcactgctctttgagtctgcagccctttgtctaccctgtctgtacaccggatgggatcgtgtttgatctcctgaacattgtgccctggctgaaaaagtacggcacaaatccctcaaatggtgagaagcttgacggccgttcccttattaagttaaactttagtaagaactccgaaggtaagtaccactgccccgtcctattcacagttttcaccaataacactcacatagtggccgtcagaaccaccggcaacgtgtatgcgtacgaggccgtggagcagttaaatattaaggctaaaaactttcgagacctcttgaccgatgaacctttctctaggcaggatattattacactgcaggatcctactaacctggacaaattcaatgtttcaaacttctatcacgtcaaaaataatatgaaaatcatcgacccagacgaagagaaagcgaagcaggatcctagctactacctgaagaatactaatgcggagacccgcgagactctgcaggagctgtacaaagaatttaagggcgatgaaattctggccgctaccatgaaagctccagaaaaaaaaaaggtggataaactgaatgcagcccactactctacaggaaaggtgtcggcaagctttacctccaccgccatggtaccagagaccacacacgaagcggcagccatcgatgaggacgtgctgcggtaccagttcgtaaagaaaaaaggctatgtacgccttcacaccaataaaggggatctcaacttggagctgcattgcgatctgacccctaagacctgtgaaaatttcatccgtctctgcaaaaaacattactatgacgggactatctttcacaggtctattagaaacttcgtaatccaggggggtgatccgaccggcactggtaccgggggtgaatcatactgggggaaaccatttaaggacgagtttagaccaaatctgtcccataccggcagggggatcttgtccatggccaattctggcccaaatagcaaccgatcgcaatttttcattacatttcggtcctgcgcctacctcgacaaaaaacataccatatttggacgcgtggttggaggattcgatgttttgacagcaatggaaaacgtcgaaagcgatccgaaaaccgatcggcctaaagaagaaatccgcattgacgctactactgtgttcgtggatccctacgaagaagcagacgctcaaatcgcgcaggaacgaaagacccagctgaaagtggccccagagacgaaagtgaaatcctctcagcctcaggctggctcccagggtcctcagaccttccggcagggtgtcggtaaatacattaacccagcagcaacggagcagcaaaggaagtcaccgcaacctgttccactctctccttgtccaagacggtcacccgtgggggttctcgggaccagcgcgccaggcagcagccgactccctgatgatcattag

SEQ ID NO: 234296 - DNA, 1470 bp, synthetic construct
  misc_feature 1..1470: note = Description of Artificial Sequence: Synthetic coding sequence
  source 1..1470: mol_type = other DNA
atgggcaagaggcagcatcagaaagataagatgtacattacttgcgcagagtacacccacttctacgggggaaagaaacccgatctcccgcaaacaaactttagaagactccctttcgaccactgtagaaatattgtaccctggctaaaaaagtatggcactaatccgtccaatggtgaaaaactggatggacggagcctcattaagctcaatttcagcaaaaattccgagggcaagtaccactgtcccgtgctgtttaccgtgttcactaataatacccacattgtggccgtccgcacaactggtaacgtatatgcctacgaagctgttgagcaactcaacattaaagccaaaaactttagagatctgttgactgacgagccattcagccggcaggatatcataactctccaagaccctacaaacctcgacaaattcaatgtcagcaacttctatcatgttaaaaataatatgaaaattatcgaccccgatgaagaaaaggcaaaacaagatccatcatattatctcaaaaacacaaatgccgaaacgcgcgaaaccctgcaggaactctacaaagaattcaagggcgatgaaattttggctgccaccatgaaggcacctgagaagaagaaggttgacaagctcaacgccgcacattactccaccggcaaggtgagcgctagctttacgtcgaccgcgatggtgcccgaaactacccacgaggcagctgccattgatgaagatgttcttcggtatcaatttgtgaagaaaaaggggtacgttcgactgcatacgaacaaaggagatctgaacctggagctgcactgtgatctcaccccaaagacgtgcgagaactttatccgcctctgtaaaaaacattactacgacggcaccatctttcaccggagtattagaaatttcgtgattcaagggggagaccccacaggaacagggactgggggtgagtcatactggggcaagcccttcaaggacgaatttcggcctaatttaagccacaccgggcgagggatcttgtctatggctaacagtgggccaaactcaaataggtcccagttctttatcacatttcgaagttgcgcctacctggataagaaacacacaatcttcggccgtgtagtcggtgggttcgacgttctgacagcaatggagaatgtagaatccgatccgaagaccgataggcctaaagaggagatcaggatcgatgcaaccactgtgttcgttgatccatatgaggaagccgatgcccaaatagcccaagaaagaaagactcagttgaaggaagccagtagtcgcggtagggccttaaaccagtgtcattgtcctcacgtgcaggaggaggcccagtccgggttctgggggctccaactgctagtcgctgcagctacttgtaggctgtacctgtgccctagtttttcccaccaaagcctgatgctcaaactgcaggcctag

SEQ ID NO: 234297 - DNA, 1563 bp, synthetic construct
  misc_feature 1..1563: note = Description of Artificial Sequence: Synthetic coding sequence
  source 1..1563: mol_type = other DNA
atgggcaagaggcagcaccagaaggacaagatgtacattacctgcgcggaatacacacacttttatggcggtaagaagccggacctgccgcagacaaattttaggcggttaccgtttgaccattgttcactgagcctgcaaccctttgtttatccagtgtgtacccccgatggtattgtctttgacctcctcaacatcgttccatggctgaagaaatacggtacaaatcctagcaatggtgagaagcttgacggtaggagcctcattaagctgaatttctccaagaatagcgaaggtaagtaccattgtcccgtgctgttcaccgtgttcacaaataatacccacatcgttgcagttcggactactggcaacgtgtatgcatacgaggccgtcgagcagctgaacatcaaggctaagaacttcagagacttactgaccgatgaaccattttccagacaagatatcattaccctgcaggatcctacaaatctcgacaaatttaacgtgagtaacttttaccatgttaaaaacaacatgaaaattatcgacccggacgaagaaaaggctaagcaagatccgtcttactaccttaaaaatacgaacgccgagacacgcgaaaccctccaggaactgtacaaggagtttaaaggcgacgagattctcgctgccacaatgaaagcgccagagaagaagaaggtcgacaaactgaacgcagcccactattcaaccgggaaggtttcagccagttttacgtcaactgccatggtacctgaaaccacacatgaagctgccgcaatagacgaagacgttctgcgttaccagttcgtgaagaaaaaaggctatgttcggctgcatacaaataagggagacctgaatctggaactgcattgcgacttgacaccaaagacatgcgaaaacttcatcagattatgcaagaagcactattacgatggtaccatctttcacagaagcattcgtaattttgtgatccagggaggcgatcccacaggaaccggaactggcggagaaagctattggggcaagcctttcaaagatgagttccgccctaacctctcacatacaggcaggggaattctttctatggcaaatagcgggccaaactcaaaccggtctcaatttttcattacatttcggagctgtgcatatctcgacaagaaacacaccatcttcgggcgagtcgtgggcggattcgacgtcttgactgcaatggagaatgtggagagcgacccaaaaacagaccggccaaaagaagaaattagaattgatgccacaaccgtgttcgtcgatccgtacgaagaagcagatgcccagatagcccaggaacgcaaaacacagctcaaagtcgctcccgaaaccaaggtgaagtcttcccaaccacaggccggttcacagggtcctcaaacgtttagacagggagtgggtaagtacattaaccccgctgcaacaaagcgcgctgcagaagaagaaccgtcaacgagcgccaccgtacccatgagtaaaaaaaagccctcccgcggatttggcgacttctcaagttggtag

SEQ ID NO: 234298 - DNA, 1479 bp, synthetic construct
  misc_feature 1..1479: note = Description of Artificial Sequence: Synthetic coding sequence
  source 1..1479: mol_type = other DNA
atggctgtgttattggaaactacgctgggggacgttgtgatcgacctgtacaccgaggagagacccagggcctgcttaaactttcttaagttgtgcaaaatcaagtactataattactgccttattcataatgtgcagcgtgacttcatcatacagactggagaccctaccgggactgggaggggaggagagagcattttcgggcagctatacggcgaccaggcatcctttttcgaggccgaaaaagtccccaggataaagcacaagaagaaggggacagtgtcgatggttaacaacgggtctgaccaacacgggtctcagtttctgattacgactggagaaaatttggattacttagatggggtccacacggtgtttggcgaggttaccgaaggtatggacatcattaaaaaaataaatgaaaccttcgtcgataaggatttcgtcccttatcaagacattcggatcaaccacaccgtgatcctagatgaccctttcgacgacccccctgatctcctgataccagacaggtcgccagaacccacccgtgaacagctggattctggaagaattggagcagacgaagagatcgacgacttcaaagggagatctgctgaagaggtcgaggaaatcaaggcggaaaaagaggccaagacccaagctatccttctggaaatggtaggcgatctccccgacgctgatatcaagcctccagagaatgtactattcgtctgcaaactgaaccctgtaaccaccgacgaggacctggagattatattctcaagatttggtcctatcaggtcttgcgaggtaattagggactggaaaacaggcgagagcttatgctatgccttcatcgagttcgagaaggaagaagattgtgaaaaggccttttttaagatggacaacgttctaatagatgatagaaggatccatgttgatttttctcaatctgttgcgaaggtaaagtggaaagggaaaggagggaaatacaccaagagcgactttaaggagtacgaaaaagagcaggacaaacctcccaaccttgtactgaaggacaaagtgaaaccgaaacaggataccaagtacgacttgatacttgacgagcaggccgaagactctaagtccagccactcacacacttctaagaagcacaagaagaagactcatcattgctccgaagaaaaggaggacgaggactacatgccaataaaaaatactaaccaagatatttaccgcgaaatgggatttggccattacgaggaggaggagagttgttgggagaagcaaaagtcagagaaacgtgaccggacccagaatcgatccaggtcacgatctcgtgaacgggatggccattatagcaattctcacaagagtaaatatcagacggatctgtacgagagggagcgatccaagaaacgcgatagatccagaagtcctaagaaatctaaggacaaggagaagtccaagtacaggtag

SEQ ID NO: 234299 - DNA, 384 bp, synthetic construct
  misc_feature 1..384: note = Description of Artificial Sequence: Synthetic coding sequence
  source 1..384: mol_type = other DNA
atgtcaagacctaagacccaaaatcaagtcacccatacccaagttaagaatacgagacggaagcccatcactgttcttaaaagaaaaaaaatgcgtactacttgtcagtccaaaatcctgattagaattagcattgagaagtgggggctcgttaccatgaagaagaaaaaggccgtcggacgcaataagcgtgtcaaacgagagacggagcttcggaccgaggtggtggctgacctcgagcggggtatggccataatcgtcatagtgatcaatcaaaacacaaagcagattttcatgaaggagaagggagtgaaacgcgaaaccgaagccgaagtgcagcggagcccgaagattaagaaaaacctgagtatagacgaacggtag

SEQ ID NO: 234300 - DNA, 318 bp, synthetic construct
  misc_feature 1..318: note = Description of Artificial Sequence: Synthetic coding sequence
  source 1..318: mol_type = other DNA
atgtgccagggcggagattttacacgtcataatggaacaggagggaagtctatttacggcgagaagtttgaggacgaaaatttcattctgaagcacactggtcccggtatcctgtcaatggccaatgccggaccaaacaccaatgggtcccagttcttcatttgtacggcaaaaactgagtggcttgatggaaagcatgtggtctttggtaaggtgaaggagggcatgaatatagtggaggctatggagagattcgggtccagaaacggcaagacatcgaagaagatcaccattgccgactgcggtcagctcgagtag

SEQ ID NO: 234301 - DNA, 390 bp, synthetic construct
  misc_feature 1..390: note = Description of Artificial Sequence: Synthetic coding sequence
  source 1..390: mol_type = other DNA
atggtcaaccctaccgtatttttcgacatcgcggttgacggcgagcccctggggagggtgtccttcgagctgtttgccgataaagtgccgaagacggcggagaactttagagccctctccactggagagaagggattcgggtacaaggggtcatgtttccataggatcatccccggtttcatgtgccagggaggggacttcacacgccacaatggaactgggggaaaaagcatatgtactgcgaagacggaatggctggatggcaaacatgtggtttttgggaaggttaaggaaggcatgaatatcgtggaggccatggagcggtttgggtcacggaacggcaaaacctccaagaaaataacgatcgctgattgtggccagctggagtag

SEQ ID NO: 234302 - DNA, 498 bp, synthetic construct
  misc_feature 1..498: note = Description of Artificial Sequence: Synthetic coding sequence
  source 1..498: mol_type = other DNA
atggtgaaccctacggttttttttgacatcgccgttgacggagaaccccttgggcgagtatcctttgagctgtttgcggacaaggtccccaaaacggctgagaatttccgcgcattatctacgggtgagaaaggattcggctacaagggatcctgtttccatagaattatccccggtttcatgtgtcaggggggtgactttactagacataacggcaccggagggaaatccatctacggggagaaattcgaagacgagaatttcattcttaagcacaccggaccaggcatactgagcatggccaatgccggacccaacactaatggttcacagttctttatttgcaccgctaagaccgaatggctcgacgggaaacacgtggtcttcggtaaagtcaaggagggcatgaacatagtcgaggcaatggagcgtttcggaagcaggaatggcaagacctcaaagaaaattactatcgccgactgcgggcagttagagtag

SEQ ID NO: 234303 - DNA, 495 bp, synthetic construct
  misc_feature 1..495: note = Description of Artificial Sequence: Synthetic coding sequence
  source 1..495: mol_type = other DNA
atggtgaactccgtggtttttttcgatatcacggtggatgggaaaccccttggcaggatttccattaaactatttgccgataagattctcaagaccgccgagaattttagggctctgagcaccggcgaaaaaggatttagatacaagggaagttgctttcacaggatcatacccggatttatgtgtcaagggggtgacttcacgaggcacaacggaactggtgacaagagcatttatggtgagaagtttgatgacgaaaatctgatccggaagcacaccggcagtggcatcttatcgatggctaatgcaggaccgaatacgaacggatcccagtttttcatctgtgcagcgaaaaccgaatggctcgatggcaaacatgtggcattcgggaaggtgaaggaacgggtgaatatagtggaagccatggagcactttggataccgtaactctaagacctccaaaaagattactattgctgattgtggccaattctag

SEQ ID NO: 234304 - DNA, 651 bp, synthetic construct
  misc_feature 1..651: note = Description of Artificial Sequence: Synthetic coding sequence
  source 1..651: mol_type = other DNA
atgctacgactgagcgagcgcaacatgaaggtgcttctagcggcagctctcattgccggttcggtgttctttctcctgctgccaggaccttcagctgctgatgagaaaaagaagggcccaaaagtcacagtgaaggtctatttcgacctgcgcattggcgacgaagacgtgggcagggtaatcttcgggctatttgggaagaccgtgcccaagaccgtggataactttgtcgcgctggccaccggcgagaaggggtttggctacaagaacagcaaattccaccgggtgataaaggactttatgattcaaggcggtgacttcacacgaggagatggtacaggtgggaaatccatctacggtgaacggttccccgacgagaattttaaactgaaacactacggcccaggctgggtctccatggcaaacgctggcaaggataccaacggctcccaattctttatcaccaccgttaaaactgcgtggctggacggtaaacatgtcgtgtttggaaaggtcctcgagggaatggaagtcgttcggaaagtcgaatctaccaagacagattctcgcgataaacctctgaaagacgttatcattgctgactgcggcaaaattgaagtcgagaaacccttcgctattgctaaggagtag

SEQ ID NO: 234305 - DNA, 639 bp, synthetic construct
  misc_feature 1..639: note = Description of Artificial Sequence: Synthetic coding sequence
  source 1..639: mol_type = other DNA
atggggccagggccaagactcctcctgccactggtactgtgtgtcggattgggtgctctggtcttttcgtcaggagctgaggggttccggaaacggggacctagcgtcaccgcaaaggtctttttcgacgtgcggataggggacaaggatgtcggccgtatcgtgataggcctgttcggaaaagttgtgcctaagactgtagagaacttcgtcgccctcgccactggagagaaaggatacgggtacaagggctcaaaattccaccgagtaataaaagattttatgatccaagggggagatatcacaacaggggacggcaccggcggagtctccatctacggggagacttttccagatgaaaactttaagctgaagcactacggcataggctgggtgtccatggctaatgccggaccagatacaaacggctctcaattttttattaccctaacaaagcccacttggcttgacgggaaacatgtggtgttcggcaaggtcattgatggcatgactgtagtccatagcatcgagctgcaggcaacagacggccacgacaggcctctaactaactgctcaattattaactccggcaagattgatgttaagactcctttcgtcgttgaaatcgccgactggtag

SEQ ID NO: 234306 - DNA, 1113 bp, synthetic construct
  misc_feature 1..1113: note = Description of Artificial Sequence: Synthetic coding sequence
  source 1..1113: mol_type = other DNA
atgagccatcctagcccgcaagccaaaccatcaaatccttcgaacccccgagtgttctttgatgtcgacatcgggggtgaaagagtggggcgaatcgtgctagagctctttgcagacatagtgcccaaaaccgccgagaattttcgggctctgtgcaccggtgaaaagggcataggccacaccaccgggaaacccctacacttcaagggctgtccatttcacaggattataaagaaattcatgatccagggcggtgactttagcaatcaaaatgggacagggggagagagcatttatggcgagaagtttgaggatgaaaacttccactacaaacacgaccgtgaagggctgctgtctatggctaatgccggacgcaacacgaatgggtcccagttcttcatcaccacagtcccgacccctcacctcgatggtaagcatgtggtgtttggacaagtgatcaagggtatcggcgtcgcgagaatcctggaaaacgtggaagtgaaaggcgaaaagccagccaaactgtgtgtgattgccgagtgcggggaactgaaggaaggtgatgacggtggcatttttccgaaagacgggtctggcgatagccacccagacttcccagaggacgctgacatcgacttgaaagatgtcgacaagatactgctcataacagaagatctgaaaaacatcgggaacaccttcttcaagagccagaactgggagatggctattaagaaatatgcagaagtcctccgttatgtggattcgtctaaggctgttatcgagacagccgatagagctaaactgcagccaatagctctgagctgcgtcctgaacattggcgcatgcaaactgaaaatgagcaactggcagggagccatcgactcttgcctggaggctctggagctggacccttcaaataccaaggccctgtacaggcgcgcacaggggtggcagggcctgaaagagtacgaccaggctctcgcggacctgaagaaagcccaaggcattgcgcctgaggacaaggccatacaggctgagctgttgaaggtgaaacagaaaattaaggctcaaaaagacaaggaaaaagccgtctacgcgaaaatgttcgcttag

SEQ ID NO: 234307 - DNA, 597 bp, synthetic construct
  misc_feature 1..597: note = Description of Artificial Sequence: Synthetic coding sequence
  source 1..597: mol_type = other DNA
atggacgctattctgaactacagatcagaggacacagaagactactacactcttttgggctgcgacgaactttcctctgtagaacagatcctggccgaattcaaagttagagcattggaatgccaccccgacaagcatcccgagaatcctaaggctgtggaaacgttccagaagcttcaaaaagcaaaggagatcttgacaaatgaggaaagccgagcacggtacgaccattggaggcggagccagatgagcatgcctttccagcagtgggaggcgctcaacgattccgtcaagacctcaatgcactgggtggtgcgtggcaagaaggacctgatgctggaggaatctgataagacccacacgactaaaatggagaacgaggagtgcaatgagcaaagagagagaaaaaaagaggaactcgcctccactgcagagaaaactgagcagaaggaaccaaaaccactggaaaagagcgtgagcccacaaaatagcgactcatcaggtttcgccgatgtcaacgggtggcacttgcgctttcggtggagcaaagacgctccctccgaactcctacgaaagttccgaaattacgagatttag

SEQ ID NO: 234308 - DNA, 468 bp, synthetic construct
  misc_feature 1..468: note = Description of Artificial Sequence: Synthetic coding sequence
  source 1..468: mol_type = other DNA
atgctcgctttgagatgcggttctaggtggctcggcctattaagtgtaccgaggagcgtccccctgaggctccccgctgccagagcatgttccaaaggctccggcgatccctcttccagctctagtagcggaaacccattggtgtatctcgacgtggacgctaatggcaagccattgggaagggtggttctcgagctgaaggcagacgtggttcccaagacggcagaaaacttccgcgcattgtgtacaggggaaaaggggttcggctacaaagggtctacttttcatagagtcatcccctcatttatgtgtcaggctggagactttactaatcacaatgggacaggcggaaagagtatttacggtagcaggtttcctgatgaaaattttactctgaagcacgttggacccggatggatggctagtatgctgtgcagcgtaacctccaagagggcttggacctcctag

SEQ ID NO: 234309 - DNA, 498 bp, synthetic construct
  misc_feature 1..498: note = Description of Artificial Sequence: Synthetic coding sequence
  source 1..498: mol_type = other DNA
tgatcctcctcatcaagctctggtaatcccctggtgtacctcgacgtcgacgcaaatggaaaaccattgggtcgggtcgtgctggagctgaaagccgacgtggtcccaaaaaccgccgagaacttcagggcactgtgtactggagagaaggggtttggctataaaggatcgacctttcaccgggtgatcccgagctttatgtgccaagccggtgacttcacaaaccataatgggaccggcggaaaaagcatttacgggtccagatttcccgacgaaaattttacgttgaagcatgttggtccaggcgtgctaagcatggctaacgccggacccaataccaacggcagccagttttttatttgtaccattaagacagattggtctatggcgttggatgacatcgcattgcactgttgttctcccggatctcctgtgctgacggggtggatggcaagtatgctgtgctcagtgacctctaagagagcatggacatcttag

SEQ ID NO: 234310 - DNA, 2265 bp, synthetic construct
  misc_feature 1..2265: note = Description of Artificial Sequence: Synthetic coding sequence
  source 1..2265: mol_type = other DNA
atgggaatcaaggttcagcgcccaaggtgtttcttcgatattgctatcaacaatcagcctgccggaagagtggtgtttgaactcttctccgatgtgtgccccaagacctgtgaaaatttcaggtgtctgtgcactggtgagaagggaaccggcaaatcaacccagaaaccactacactataaaagttgtttatttcaccgggttgttaaagattttatggtacaggggggtgatttctcggaagggaatggtagaggcggtgaatcaatttatgggggattcttcgaggatgaatcttttgccgtaaaacacaataaggaatttttattgagcatggccaacagagggaaagatacgaatggctcacagttttttataacgacgaagccaactccacacctagacgggcaccatgtggttttcgggcaagtgatctcaggccaggaggtggtccgtgaaatcgagaatcagaaaaccgacgccgcaagcaagcctttcgcagaagtcagaatcctgtcttgtggagagctcatccctaagtctaaggtcaagaaggaggagaagaagcggcacaaatcttcttcctcatcatctagcagctcttccgattccgacagcagtagcgattctcaatcttcgtccgatagtagtgacagcgagagtgcaacagaggagaagtccaagaaacgaaaaaagaagcatagaaagaattcgcgcaagcataagaaagaaaagaagaagaggaagaagagcaaaaagagtgcgagtagcgagtcggaagctgaaaacctggaggcccagcctcagtctacggtcagaccggaagaaatacccccaattcccgagaataggtttcttatgcgtaagtcacctcccaaggcagatgaaaaggagcgtaaaaatagggaaagagagagggagcgcgaatgcaacccacccaactctcagccagcgagctatcagaggagactcctagttacacgctcgggtagaaaaatcaaagggaggggccctcgcagatatagaacgcctagccggtcacggtcaagagacagattcaggcgcagtgagactcctccccactggagacaggagatgcagcgggctcagaggatgcgcgtaagttctggagagaggtggattaaaggggacaaaagcgagcttaacgaaatcaaggagaatcaacgcagcccagtacgcgttaaggaacgaaagattaccgatcatagaaacgtcagcgaaagcccaaaccggaagaatgaaaaggaaaagaaagtcaaagaccacaagtctaacagcaaagagcgcgacatccgaaggaattccgagaaggatgataagtacaaaaacaaggtaaaaaagcgagccaagtcgaagtcacggtccaagagtaaagaaaagagcaagtctaaggagagagacagtaagcataataggaacgaagagaaacgaatgagatctagaagcaagggtagagaccatgaaaatgtcaaagagaaagagaaacagagtgatagcaagggaaaggatcaagaaagatctagatcaaaggagaagtccaagcaactcgagtcaaagtccaacgaacatgatcacagcaagtcgaaagagaaggacaggagggcccaaagcagaagccgggagtgcgatattacaaaaggaaagcactcctataacagtaggacccgggagaggtctcgctccagagatcggagccgcagagtgcgttctaggacccatgatcgggaccgcagccggtccaaggagtaccatcgctacagagagcaggaatatcgacgaagaggcagatcaaggtcccgtgagaggcggacaccccctgggagaagcaggtctaaggatcggcgtcggaggcgacgggatagcagatcaagcgagcgcgaggagtcccagtctcgaaacaaggacaagtacaggaatcaggagtctaagtccagtcataggaaggagaactccgaatccgagaaaagaatgtattctaaatcccgcgatcacaacagctccaacaattccagggagaagaaggcagatcgagatcaaagccccttcagtaagattaagcagagttcccaggataatgagttgaaatcaagtatgttgaaaaataaagaagatgaaaagatccgatcttccgtcgagaaagaaaaccaaaaatccaagggacaagagaatgatcacgtgcatgaaaagaacaaaaaattcgaccacgaaagcagccccggaaccgatgaggataagtctggctag

SEQ ID NO: 234311 - DNA, 741 bp, synthetic construct
  misc_feature 1..741: note = Description of Artificial Sequence: Synthetic coding sequence
  source 1..741: mol_type = other DNA
atgggaattaaagttcagcggccacgatgtttcttcgacattgccataaacaaccagcctgccggtcgggtcgtatttgaacttttttcagacgtgtgtcccaagacctgtgaaaacttcaggtgcttatgcaccggagaaaagggaactgggaagagtacccaaaagcctctgcactacaaaagctgcctgttccaccgcgttgtgaaggacttcatggtgcagggcggagactttagcgaaggaaacggccgtggcggtgaatcaatttatgggggatttttcgaggatgagagtttcgctgtcaagcataacaaggagtttctcctatcaatggcaaaccgaggaaaggacaccaatggaagtcagtttttcatcaccactaagccaacccctcacttggatggccaccacgtcgtgttcggacaggtgatttccggccaggaggttgtgcgcgagattgaaaatcagaagacagacgccgcttccaaaccatttgcagaagtgagaattctgtcttgtggagaattgatcccaaagagtaaagtgaaaaaagaagagaaaaagcgccataaatcctcaagcagctcatcaagttcatctagcgacagcgatagttcctccgattcccaatctagctcggacagctccgattcagagtctgccacggaggagaaatccaagaaaagaaagaagaagcatcgcaagaatagtcggaaacacaagaaagagaagaagtag

SEQ ID NO: 234312 - DNA, 180 bp, synthetic construct
  misc_feature 1..180: note = Description of Artificial Sequence: Synthetic coding sequence
  source 1..180: mol_type = other DNA
atgggcattaaggttcagcggccacgctgcttctttgacattgctataaacaatcagcctgcaggccgtgttgtgtttgagttgttctcagatgtctgcccaaaaacctgcgagaattttaggtgcctctgcactggcgagaaggggactggcaagtctacacaaaagcctctccactag

SEQ ID NO: 234313 - DNA, 2265 bp, synthetic construct
  misc_feature 1..2265: note = Description of Artificial Sequence: Synthetic coding sequence
  source 1..2265: mol_type = other DNA
atgggaatcaaggtgcaacggcctcgctgttttttcgacatagccattaacaatcagcctgcaggaagagtagtttttgaactgttttccgacgtatgtcccaagacatgtgagaactttcgatgtctctgcacaggtgaaaaaggcactgggaagtccactcagaagcctctgcactacaaaagctgtctatttcatcgggtagtgaaagatttcatggtgcaaggtggcgacttttccgaaggcaacggacgcggaggtgaaagtatctatgggggattctttgaggacgagtcttttgcagtgaagcacaacaaggagttcctgttgtcaatggcgaatcgcggaaaagacacaaacggttctcagttctttattacaaccaaacccactccgcaccttgacggacaccacgtagtgttcgggcaggtgatttccggacaggaggttgtgcgcgaaatcgagaatcagaaaacggatgccgctagcaaacctttcgctgaggtccgcatcttatcatgcggtgagctcatccctaagagcaaagtaaagaaggaagagaagaaacgacacaagtcaagctcttcttcaagttcctccagctcagatagtgactcttcgtctgacagtcagtcttctagcgactcctccgatagcgaaagtgctacggaagaaaaaagcaagaagcgcaagaagaagcaccgcaagaatagtcggaaacataaaaaagaaaagaagaagcgaaaaaaaagcaagaagagcgcctccagcgagtcagaagccgaaaatctagaggcccagccacagtcgaccgtgagaccagaggaaatcccgccaattcccgagaacagatttttgatgcggaagagtccccctaaggccgatgagaaagaaaggaaaaaccgggaaagagagcgcgagcgagagtgtaaccccccaaacagccagcccgcatcttaccagagaagattgttggtgactcgatctggtagaaaaataaaaggcaggggtccaagacgttatcgaactccttctaggagccgtagtcgagatcggttcagaagatcagagacgcccccacattggcggcaggaaatgcaaagggcacaaagaatgagagttagctcaggcgagagatggatcaaaggtgacaaaagtgaactgaacgagattaaggaaaaccaaagatcaccagtaagagttaaagaaagaaaaattaccgatcatcggaacgtctccgagagtccaaaccggaagaatgagaaagaaaaaaaggtgaaggatcataagtcaaacagcaaagagcgcgacatacggagaaattcggagaaggacgataaatataaaaacaaagttaagaagcgcgctaagtcaaaatcacgctccaagtccaaagagaagtccaaaagtaaagaaagagactccaaacacaaccggaatgaagagaagaggatgaggtctcgtagtaaaggaagagaccacgagaacgtgaaggagaaagagaagcaatctgactcgaaaggaaaagaccaggaaaggagccgaagcaaagaaaaaagcaaacagcttgagtctaaatccaacgaacacgatcattccaagagcaaggaaaaggaccgccgagcccaatctaggagtcgggaatgtgacataactaagggcaagcattcttacaacagtagaacaagggagcggagtcgtagcagagatcgatcacggagagtaagaagtcggacacatgaccgggatcgcagtaggtctaaagagtatcatcgctatcgagagcaggaatatcgcaggcggggtcggagcagatccagagagagacgcacgccccctggccgatccaggagcaaggacaggcgcaggaggagaagggactcccgctcatccgaacgggaggaatctcagtctcgtaataaagataagtaccgcaatcaagaatccaaatcctcccacaggaaggagaacagtgagagcgaaaaacgaatgtactctaagagtagagaccataattcatccaataacagtcgagagaagaaagcagatcgggaccagagccccttcagcaagatcaagcagtcctcccaggacaatgagctaaaaagctccatgcttaagaataaagaggatgagaagattagatcctcagtcgaaaaagaaaatcagaaatccaagggtcaagagaacgaccacgtgcatgagaagaataaaaaatttgaccatgagagcagcccaggtaccgacgaggacaagtccggatag

SEQ ID NO: 234314 - DNA, 1347 bp, synthetic construct
  misc_feature 1..1347: note = Description of Artificial Sequence: Synthetic coding sequence
  source 1..1347: mol_type = other DNA
atgggaatcaaggttcaacggcctagatgttttttcgacatagccataaacaaccaaccagccggacgggtggtttttgagttattcagcgacgtatgccccaaaacttgcgaaaatttccgatgtctgtgtactggagagaaggggaccgggaaatctacccagaagccgttacattacaagagctgcttatttcatcgggtggtcaaggacttcatggtgcagggtggggacttctccgaagggaacgggcgtgggggagaatctatctacggcggtttcttcgaagatgaaagctttgccgtgaaacataacaaagaattccttctgtcaatggctaatcgtggaaaagacaccaatggaagtcagttcttcatcactacgaaacctacacctcacttggatggtcatcacgtcgtgtttggacaggttatctcaggccaggaggttgttagagaaattgagaatcagaaaactgatgccgcttcgaagccttttgctgaggtgcgtatcctgtcttgtggagagctgattcctaaatctaaggtgaagaaggaagagaagaaaagacataagtcttcaagctcttctagctcatcctctagtgattctgacagctcctctgactcccagtcaagcagtgattcgtccgattctgaaagtgccacggaagaaaagtcaaagaagagaaagaaaaaacacaggaaaaactcgaggaaacataaaaaggaaaagaagaagcgcaagaagtccaaaaagtctgcgtcaagtgaatcagaggccgaaaacctggaggcccaaccacagtctacagttcgccctgaggagatcccaccaattccagagaataggtttctcatgcggaagtctccccctaaggccgacgagaaggaacgtaaaaacagggagagagagagggaacgcgagtgcaacccacctaactctcagcccgcaagctaccaacgcagactactggtaacccgatccggtcgtaagatcaagggacgcggaccgaggcggtatagaacaccaagtcgatcccgttctcgtgaccgatttagaaggtctgagaccccgccacactggcggcaggagatgcagcgcgctcagaggatgcgcgtgagcagcggagagcgctggattaagggcgacaagtcagagctcaacgagatcaaagagaatcagcgatcacccgttcgcgtgaaggagcgtaaaattacagaccaccggaatgtctccgaatcccccaaccgtaaaaacgagaaggagaaaaaagtgaaagatcacaaaagcaattctaaggagcgagacattagaagaaaaaagaagaagaagaagaaaaagtag

SEQ ID NO: 234315 - DNA, 534 bp, synthetic construct
  misc_feature 1..534: note = Description of Artificial Sequence: Synthetic coding sequence
  source 1..534: mol_type = other DNA
atggccgtcgccaatagtagtcctgtgaaccctgtggtattttttgatgtgtctatagggggacaggaggtcgggagaatgaagatagagctttttgcagatgtcgttccgaagactgccgaaaattttcggcaattctgcaccggggaatttagaaaagatggcgtgcccattggctacaaaggaagcacattccatcgagttatcaaagacttcatgattcagggtggggatttcgtcaatggagatgggacgggtgtggccagtatataccgagggccatttgccgatgagaatttcaagctccggcattctgcacccggactacttagtatggctaacagcggaccctcgacaaacggctgtcaattcttcattacctgctcaaagtgtgattggctagatggaaaacatgtggttttcgggaagattattgatggactgctggttatgcgcaagatagagaatgtgcccaccgggcctaataacaagcccaagctgccggtggtgatttcccagtgcggagaaatgtag

SEQ ID NO: 234316 - DNA, 174 bp, synthetic construct
  misc_feature 1..174: note = Description of Artificial Sequence: Synthetic coding sequence
  source 1..174: mol_type = other DNA
atgaaaatcgagctatttgccgatgttgtcccaaaaaccgccgagaactttcgacagttctgcaccggcgagttcaggtctgtgtcagatgtgtttgatttcttcgcctgctccagaggggtgttctgggggtgcagtgaaggcattggcgagccgccagccggactcgaatag

SEQ ID NO: 234317 - DNA, 405 bp, synthetic construct
  misc_feature 1..405: note = Description of Artificial Sequence: Synthetic coding sequence
  source 1..405: mol_type = other DNA
atgatcgcaggcgactcagaccgccgaaaggatggagtcccaattggctataaaggcagtacctttcaccgagtcatcaaggactttatgattcagggcggagattttgtgaatggagatgggactggcgttgctagcatatataggggcccattcgctgacgagaactttaagttgcgacattccgcccctggactcctgtctatggcaaattccggtccaagcaccaacgggtgccagttctttattacctgcagtaagtgtgattggctcgatggaaagcatgttgtatttggcaagataatcgatggcctattagtaatgaggaagattgagaatgtccctaccgggcctaataataaacccaaattaccggtcgtgatctcccagtgcggtgagatgtag

SEQ ID NO: 234318 - DNA, 207 bp, synthetic construct
  misc_feature 1..207: note = Description of Artificial Sequence: Synthetic coding sequence
  source 1..207: mol_type = other DNA
atggtcaattggaagggtttggtcctgccagccgtgacccctagtttgttcctctttgggtacaggaaggatggagtcccaatcggttacaaaggctccacttttcatcgggtgataaaggattttatgatccagggcggagactttgtgaacgtgagtactattcctttcctgtccaaaacaagatcgttctctttctgttgttag

SEQ ID NO: 234319 - DNA, 435 bp, synthetic construct
  misc_feature 1..435: note = Description of Artificial Sequence: Synthetic coding sequence
  source 1..435: mol_type = other DNA
atgaagattgagctgtttgccgacgtggtgccaaagacagctgagaactttagacagttctgcacgggagaattcagaaaggacggtgtaccaattggctacaaagggtccacattccaccgcgtcatcaaagactttatgatccagggcggtgactttgtcaacggagacggaactggagtggccagcatatatcggggaccctttgctgacgagaattttaagctgcgtcattcagcccctggactgctgtccatggcaaattcagggccaagcactaacggatgtcaattcttcatcacatgttcaaaatgcgactggttggacgggaagcacgtggtcttcgggaagattatcgacggactccttgtgatgagaaagattgaaaacgtgccaacgggcccaaataataaacctaaactgcccgtggtgtag

SEQ ID NO: 234320 - DNA, 405 bp, synthetic construct
  misc_feature 1..405: note = Description of Artificial Sequence: Synthetic coding sequence
  source 1..405: mol_type = other DNA
atgattgccggtgattccgaccgccgaaaagacggggtgccgatcgggtacaaaggctccacattccacagggttatcaaagactttatgatccagggcggagacttcgtaaatggtgatggaaccggcgtggcctccatttaccggggtccgtttgcagacgagaacttcaagcttagacatagtgccccaggactgttatcaatggccaattccggcccaagcactaacggctgccagtttttcatcacttgcagcaagtgcgattggttggacggcaagcacgtggttttcggaaaaattatcgatggcctattagtgatgagaaagatcgagaacgttcccactggccctaataacaaaccaaaactgccagtggtgataagtcagtgcggcgagatgtag

SEQ ID NO: 234321 - DNA, 540 bp, synthetic construct
  misc_feature 1..540: note = Description of Artificial Sequence: Synthetic coding sequence
  source 1..540: mol_type = other DNA
atgccttcgaaatcactggtgatggaatacctcgcacatccctcaactctcggtctggccgttggcgttgcgtgcggaatgtgtctgggctggtctcttcgggtgtgttttggcatgcttccaaaaagcaagacatccaagacgcacaccgacacagaatctgaggcgtctattcttggcgacagcggtgaatataaaatgattcttgtggttaggaatgatcttaaaatgggcaaaggcaaggtggccgctcagtgtagccatgccgctgtgagtgcctataagcagatacaacgcagaaatcccgagatgctgaaacagtgggaatattgcggtcagccaaaggtggtcgtgaaggctccagatgaggagactctgattgccctcctggcccatgcaaaaatgctcgggctgacagtttcactgatacaggacgccggaaggactcaaatcgcccctggctcccagacggttctgggaattggacccggacccgctgatctgatcgacaaggttaccgggcacctgaaactctactag

SEQ ID NO: 234322 - DNA, 543 bp, synthetic construct
  misc_feature 1..543: note = Description of Artificial Sequence: Synthetic coding sequence
  source 1..543: mol_type = other DNA
atgatgccctctaaatctttggtgatggagtatctcgcacacccttcaacccttggcctggctgttggcgtcgcatgtgggatgtgcctgggatggtctttacgggtctgttttggtatgcttcccaagagcaaaacatcaaagactcatacagatacagagagtgaagcaagtatcttgggcgactcaggggagtacaagatgatccttgtagtccgaaacgatcttaagatggggaaggggaaggttgccgctcagtgtagtcacgcagccgttagtgcgtacaaacagatacagcggcgaaaccccgaaatgctgaagcagtgggaatactgtggacagcccaaggtggtagttaaggcccctgatgaggaaaccttaatcgctttgctcgcccacgcaaaaatgttgggtctgactgtgtctcttatccaggatgccggtcggacgcagatcgcgccaggcagtcagacagtcttaggtatcggacctggaccagccgacctcatcgacaaggtcactggccatctgaagctgtactag

SEQ ID NO: 234323 - DNA, 540 bp, synthetic construct
  misc_feature 1..540: note = Description of Artificial Sequence: Synthetic coding sequence
  source 1..540: mol_type = other DNA
atgcccagtaaatcgctcgtcatggagtatttggcccacccctccaccctcggattggcggtgggcgttgcttgcggcatgtgtcttggttggagcttgagagtgtgttttggtatgttaccgaaatctaagacctcgaagactcatacagacacagagtccgaggcctctatcctgggggacagcggtgagtacaaaatgatattagtcgtgaggaatgatctaaaaatgggcaaggggaaggttgctgcccagtgctctcacgcagccgtgagcgcatacaagcaaatccagagaagaaaccccgaaatgttaaaacagtgggagtattgtggccagccaaaagtggtcgttaaagcacctgacgaagagacccttatcgccttattggcgcatgccaagatgctcggactgactgtgtccctgatccaagacgccggtcgcactcaaattgccccaggcagccaaacagttttaggaatcggacccggtccggctgatctgatcgataaggtcactgggcacctaaagctgtattag

SEQ ID NO: 234324 - DNA, 1668 bp, synthetic construct
  misc_feature 1..1668: note = Description of Artificial Sequence: Synthetic coding sequence
  source 1..1668: mol_type = other DNA
atggctgctagactgctgctactgggtatattactcttactgcttcctctgcctgtgccggctccctgccacacagcggcaagatccgaatgtaaacgatcccataagttcgttccaggggcttggctggctggcgagggcgtggatgttacaagcttgcgcagatcgggcagcttccccgttgacactcagcgctttctgcgccctgacgggacatgcactctgtgcgaaaatgctctgcaggaaggaacactgcagcgcctcccgctagcgttgactaactggcgggctcagggatctggctgtcagagacatgtgacaagggccaaggtgtccagtactgaggcagtggccagagacgcggctagaagtatccggaacgactggaaagtgggcctcgatgtgactcctaaacccaccagcaatgtgcacgtttctgtagccggaagccattctcaagctgccaacttcgcagcgcaaaagactcatcaggaccagtactctttcagtacagacaccgtggaatgcagattttacagctttcatgtcgtccacaccccgccactgcacccagactttaagagagctctaggcgacctcccacaccacttcaatgcctctactcaacccgcatacctgcgcttgatctcaaactacggcacccactttatccgtgcggttgaactggggggaagaatttccgcccttaccgcccttcggacctgcgagcttgcactcgagggcctcactgataatgaggtcgaagactgcctgacagtggaggcacaggttaacatcgggattcacggcagcatcagtgccgaggccaaagcgtgtgaggagaagaaaaaaaaacataaaatgaccgctagtttccatcaaacttatcgcgaaagacactctgaggtggtaggtggacaccacacaagcataaatgacttactctttggaatacaagccggacccgagcagtactccgcctgggtcaattcccttcctggatcccccggtctcgtagactacacgctggagcctctgcacgtactcctggattcccaagatcccaggcgcgaggccctgagaagagctctctcccagtatctgaccgatcgagccaggtggagggattgctcccggccttgtccccctggtaggcagaagtctccgagggatccctgccagtgtgtctgccatggctccgcagtcactacacaggactgttgcccgagacagcgagggttggcccagcttgaagttacatttatacaggcatgggggctctggggggactggttcaccgccactgatgcttatgtcaagcttttcttcggcggacaggagttgcggacaagcactgtgtgggataacaataatcccatttggagcgtcagactggatttcggagacgtcctgctggctacaggcggtcccctgaggctgcaagtgtgggatcaggactcaggcagggatgatgatcttctcggcacctgcgatcaggcacctaaaagtgggtcccatgaagttcgctgtaatctgaaccatggacatctcaaatttcgataccacgcacgttgcctgccccacctcggtggaggaacgtgtctcgattacgtgcctcaaatgctgctcggggagccccctggcaacagatccggagccgtgtggtag

SEQ ID NO: 234325 - DNA, 1668 bp, synthetic construct
  misc_feature 1..1668: note = Description of Artificial Sequence: Synthetic coding sequence
  source 1..1668: mol_type = other DNA
atggctgctaggttgctcctgcttgggatcctcctgttactcctgcctctgccagtccccgcaccttgtcacaccgctgctagatccgagtgtaagagatcccataaattcgtgccaggcgcatggttggcgggagagggcgtcgacgtaacatcccttcgtcgatctgggagcttccctgtcgatacccagcgcttcctgcgcccagacggcacctgcactttgtgcgagaatgctctgcaagagggcaccctgcagcgacttcccctcgcgttgactaactggcgcgcacagggcagcgggtgccagaggcacgttacaagggccaaagtttcctctactgaggctgtggcacgagatgctgcgagaagcattcggaacgattggaaggtgggattagacgtcacccccaaacctacctcaaatgttcacgtttcagtcgccggatcgcactctcaagccgcaaattttgctgcccagaaaacccaccaggaccagtattccttttcaaccgatacagtggagtgtcgtttttattcctttcacgtcgtgcatactcctcccctccaccctgattttaagagagctctaggtgacctgccacaccatttcaatgcgtctacgcaaccagcctatcttcggctgataagcaactacggaactcactttataagagccgtagagttgggtgggagaattagcgccctgaccgccctcaggacgtgcgagctcgcactggagggccttacagacaacgaggtagaggattgcttaaccgttgaggcccaggtgaatatcggcattcatggaagcattagtgccgaggccaaggcctgtgaggagaaaaagaaaaagcataaaatgactgccagttttcaccagacttaccgagaacgccactcggaggtagtgggtggacaccacacatccattaatgatctgctctttggcattcaggcgggtccagagcagtactcggcctgggtgaacagcttaccaggctcccccggactcgtggactatacactcgagcctctccatgtgctccttgacagtcaggatcctaggcgggaagcacttcgtagagccttgtcccaatacctgactgacagggcccgatggcgcgactgcagtcgcccttgccccccaggtcggcagaagtctcctagggacccttgtcaatgcgtgtgtcatggttccgcagttacgacccaggattgttgcccaaggcagagaggtttggcacagcttgaagtgacgtttatccaggcgtgggggctgtggggggactggttcaccgccacggatgcatatgttaaactgttctttggcggtcaggagctaagaacctcaacagtatgggataataacaacccgatctggtctgtgcgcttggactttggggatgtgttactcgccaccggcggtccactccggttgcaggtgtgggaccaggactctggaagagatgatgacctgttgggtacttgcgaccaggcacccaagtcaggatcccatgaggtgaggtgtaaccttaaccacggccacttaaagttcagatatcacgctcggtgtttaccgcacctggggggaggaacgtgcctggattacgtacctcagatgctgctaggagaaccgccaggaaatagatccggcgctgtttggtag

SEQ ID NO: 234326 - DNA, 1668 bp, synthetic construct
  misc_feature 1..1668: note = Description of Artificial Sequence: Synthetic coding sequence
  source 1..1668: mol_type = other DNA
atggccgctcggctactgctgctgggtatcttgctgctcttattaccgctcccagttcccgctccatgccataccgcagcaagaagtgaatgcaagcgctctcataaatttgtccctggtgcctggctagctggagaaggagtggacgtaacatcccttagacgaagcggaagctttccagtcgacactcaacggtttctgcggcctgatggaacgtgtacgctgtgcgaaaatgcgctgcaggagggtaccctgcagcgcctgccactggctctcacgaactggagagcccagggctcggggtgccaacgtcatgtgacgcgcgctaaagtgagttctactgaagctgtcgcgcgtgatgctgctcggtctatcagaaacgactggaaagtcgggctcgacgtaactcctaaacctacctctaatgtacacgtgtccgttgccggatctcacagtcaagctgccaacttcgctgctcagaaaactcaccaagatcaatacagtttcagtaccgatacagtcgaatgccggttctacagctttcacgtggtgcatactccccctttgcatcctgacttcaaaagggcgctgggcgatcttccccatcacttcaatgcttctacacagcctgcttacctgcgcctcatctcgaattacggcacccactttataagggccgtcgagttgggtggtaggatatctgctctgactgcacttagaacatgtgaactggcgcttgagggcctaacggacaacgaggtcgaggactgcttaacggtcgaggctcaggttaacatcgggatccacggcagcatctcagcggaggccaaagcatgtgaagagaagaagaagaagcataagatgacagccagctttcaccagacttatagagagaggcacagcgaagtggtgggagggcaccatacttctatcaacgacctactcttcggcatccaggccggaccggaacagtatagcgcctgggtgaatagtctgccagggtcgccaggacttgtggactatacactcgagccactgcacgtattgctggattcacaggatccgaggcgcgaggcccttcggagggccctgtctcagtatttaaccgacagagccaggtggagggattgctctcggccttgtccgcctgggcgacagaaaagtccgcgtgatccttgtcagtgtgtgtgtcacggatccgcggttaccacccaagattgctgccccaggcaacgcggtctcgctcagctggaagtgacattcattcaggcatggggtctttggggtgattggtttacagccaccgatgcctacgtgaagctcttcttcgggggacaggaactgcgtacatctacggtgtgggataataacaaccccatctggagcgtgcgcctggactttggcgacgttctcctagccaccggaggcccactgagacttcaagtctgggaccaggactctgggagggatgacgatctgctcgggacatgtgatcaggcacccaagtcagggtctcacgaagttaggtgcaacctgaatcacggacacttaaagtttcgttatcatgcgagatgtctgccacacttgggcggtggaacctgtctcgattacgtcccccagatgctcctgggagagcctcctggtaaccggtccggggctgtgtggtag

SEQ ID NO: 234327 - DNA, 444 bp, synthetic construct
  misc_feature 1..444: note = Description of Artificial Sequence: Synthetic coding sequence
  source 1..444: mol_type = other DNA
atggaggctagatcacgtagcgccgaagaactgcgtcgcgctgaactggtagagattattgtggagacagaagcacagaccggagtgagcggaattaatgtggccggagggggaaaagagggtattttcgtccgggaactcagagaagacagccccgcagcacgttcactgagcctgcaggaaggagatcaactcctgtctgcaagggtgttctttgaaaattttaaatacgaagatgccctgaggctgcttcagtgcgctgagccttataaggtgtctttctgtctgaaaagaaccgtgccaacaggcgatctggctctcagacccggaaccgtttccggatatgaaatcaaagggccaagggctaaggttgccaagctggtgcgcgtcctctcacctgcccctgccctcgactgcccaagcgatcctgtttctgcaccttag

SEQ ID NO: 234328 - DNA, 4386 bp, synthetic construct
  misc_feature 1..4386: note = Description of Artificial Sequence: Synthetic coding sequence
  source 1..4386: mol_type = other DNA
atggaggccagatccaggagcgccgaggaattaaggcgcgcagaactcgttgaaataatcgtagagacggaagcccagactggcgtgtcaggcatcaatgtcgcaggcggaggaaaggaggggattttcgtcagagaactcagggaagattcgccggcagctaggagtctgagcttacaggagggcgaccagctccttagcgcccgagtcttcttcgagaatttcaagtatgaagatgcactgcggctcttacagtgtgctgaaccatacaaggtgtccttctgcctgaagcggaccgtgcctacaggtgatttagcccttcggccaggcacggtgtccgggtatgaaatcaaggggcctcgggctaaggttgctaagcttaacatacaaagcctgagccccgtgaagaagaagaagatggtgccaggcgctttaggggtacctgccgacctggcgcctgtcgacgtggaattttccttccccaaattctcgcgtctgcggcgaggcctgaaagccgaagctgtcaaaggccctgtgccggctgctcccgctaggaggcgcctccagctgcctaggctcagagttcgcgaagtggccgaagaagcccaggccgctagactcgccgcagcagcccctccgcctaggaaagccaaagtggaggcagaggtggcagccggtgcaaggtttaccgcgcctcaggtcgaactggtaggccctaggttgccaggcgctgaggtgggtgtgccccaggtgtctgctcccaaggcagccccatcggccgaagccgcaggcggatttgcgctccatctacctactctgggtctcggcgcacctgccccacctgcggtggaggcccctgctgtaggcatccaggtaccgcaggtcgaactgcctgccttaccatccctgccaactcttccaacacttccatgcctggaaacacgtgagggcgcagtaagtgtcgtggtgccaaccctcgatgtggctgcacccacagtaggagtggacctagctctaccaggcgctgaggtggaggcccgaggcgaggctccagaagtagccttaaaaatgccccgtctctcctttcccaggtttggggcacgggcaaaagaggtggccgaggccaaagttgccaaggtttcacctgaagcccgtgttaaaggcccacgactacggatgcctacattcgggctgtcactgctggaacctcgccctgccgcaccagaggtggtggagtccaagcttaagctgccaaccatcaaaatgccgtcacttgggatcggagtctcgggtcccgaagtgaaagtaccgaagggcccagaggttaagctccctaaggctcccgaggtaaagcttcctaaagtgccggaggccgctcttcctgaagttaggttgcccgaagtcgagctgccgaaggtgtctgagatgaagctgcctaaagtcccagagatggctgttcctgaagttcgtctcccagaagtagagctcccgaaagtatcagagatgaaattacccaaagtgcccgaaatggccgtgccggaggtgaggctgcccgaagtccagctcctgaaggtctccgagatgaagctgcccaaagtgccggagatggccgtgccagaggtcagactccccgaggtccagcttccaaaggtctccgaaatgaagctccctgaagtgagcgaagttgctgtgccagaggtgaggttacctgaagtccaactaccaaaggtccctgagatgaaagtgcccgagatgaagctacccaaagttcctgaaatgaagctgcctgaaatgaaactgccagaggtgcaattacctaaggtacctgaaatggccgtgccagatgtgcaccttccggaggtgcagctgccaaaggtacccgagatgaaattacccgagatgaagctgcccgaagtgaagttgcctaaagtgcctgaaatggctgtccccgatgtgcatcttccagaagtgcaactccctaaagtgccggagatgaagctgccaaagatgcccgagatggccgttcctgaggttcggctccctgaagttcagctgcccaaggttagcgaaatgaaactccccaaggtgccagagatggcagtgcccgatgtccacctcccagaagtacaactacccaaggtgtgcgagatgaaagtgccagacatgaagctccctgagataaaactccctaaagtcccggaaatggcagtccccgacgtgcatcttcccgaagtgcaactgccaaaagtgtcagagatccggttaccagagatgcaggttcctaaagtacccgacgtgcacttacccaaggctccggaggtgaaacttcctagggctcccgaggtccaactgaaggcaacaaaggccgaacaggccgagggaatggagtttggttttaaaatgccaaagatgacaatgccaaaactcggtagggccgaaagtccctccagaggaaagcccggtgaggctggagctgaggtcagcggtaaactcgtgaccctgccttgtctccagcccgaagttgatggggaagcccatgtgggggttccttcccttaccctcccatcagtggaactggacctgccaggagcgttgggactgcaggggcaagttcccgctgccaaaatggggaagggggagcgagtagaagggcctgaagtggcagctggggtgagggaggttggcttcagggttccctccgttgaaatcgttacaccacagctgcctgcggttgagatcgaagagggaaggttagagatgatagagactaaagtgaaaccaagtagcaaattttctttgccgaagtttgggctttccggtcccaaggtggctaaagcagaggcagagggggctggtcgcgcaaccaagctgaaggtcagtaaatttgctatctcactgcccaaggcccgtgtgggggcagaggcggaggccaaaggtgcaggggaagccggactgctgcccgcactggacctgtctattccgcaactgagcttggatgcccatctcccgtccggaaaggttgaggtggcaggcgcagacctgaagttcaaaggaccaaggtttgccctgcctaaattcggcgtcaggggccgagacaccgaggccgcagaattggtccctggcgttgctgaactcgaggggaagggctggggatgggacggcagggtgaaaatgccaaaactcaaaatgccgtcctttggtctggcgaggggaaaagaggccgaggtgcaaggcgacagggccagtcctggtgagaaggctgagtcgactgccgttcagctcaagatcccggaagtggagcttgttacccttggggctcaggaggagggcagagctgaaggggctgtggcggtctcaggaatgcaactgtctgggctgaaggtgtcgacagctggccaggtcgtgacagagggacatgacgctggactcagaatgcctccacttggtattagtcttcctcaggttgaactcacggggttcggcgaagctgggacaccagggcagcaggcacagagcacagtccctagcgccgagggcaccgccggatatcgagttcaggtaccccaggttaccctttccctccccggagcacaggtggctggaggcgagctgctggtcggtgagggtgtctttaagatgcctacggtgacggtgccccaactcgagcttgacgtaggcctgtctagagaggcccaggcgggagaggcagccactggcgagggcggactgcgactgaaattaccgaccctcggggctcgcgcacgagttggaggcgaaggagctgaggagcagccacctggggctgagcgtaccttctgcttatctcttccagacgtggagttatccccctctggcggtaatcacgctgaataccaggttgccgaaggcgagggtgaggccggacacaagcttaaagtcagattaccgcgatttggcctggttagagctaaagagggtgcagaagaaggcgagaaagccaagtctcctaagctgcgtctgccacgcgtggggttcagccagagtgagatggtcacgggcgagggctccccttctccagaggaggaggaagaggaggaagaggaggggagcggcgaaggcgcaagtggccgacgaggtcgcgtacgggtgcgactacccagagtaggattggctgcccctagtaaggcttcccgcggtcaagagggtgacgcagcccctaaatcacccgttagggaaaaatccccaaagttcagattcccgagagttagcctgagtcctaaggcgcgatctggcagtggcgaccaggaagagggcggactccgagtccgacttccttctgtcgggttcagtgaaacgggcgcacctggcccagcgcgaatggagggagctcaggccgcagccgtgtag

SEQ ID NO: 234329 - DNA, 4191 bp, synthetic construct
  misc_feature 1..4191: note = Description of Artificial Sequence: Synthetic coding sequence
  source 1..4191: mol_type = other DNA
atggaagccaggagcagaagtgcagaagaactccggcgtgccgagctggtggaaatcatcgtcgagaccgaggcacagaccggcgtgagcggtataaacgtggccggtggcggaaaagaagggatatttgtgagagaacttcgcgaggattcgcctgcggctagatctctgagtctccaggaaggagatcagctgcttagcgccagggtgttcttcgagaacttcaaatacgaagacgctctgagactgctgcagtgtgctgagccctacaaagtgagcttttgtcttaaacgaacggtgcccacaggcgatttagctctccgacctggaacagtgagtggctatgagatcaaaggtcctagggccaaggtcgccaaactcaatatccagtccctcagtccggtaaagaagaagaagatggtgcctggggctctaggagtacccgcagaccttgctccagtcgatgtcgaattctcttttccaaagttcagcaggctccgcagaggtctcaaagctgaagcagtcaagggacccgtgcccgctgctcccgcacggagaaggctccagttgcccagactccgagtcagagaggttgccgaagaagcccaggccgctaggctcgccgctgccgctcctccaccgagaaaggctaaggtggaagccgaggtggccgcaggcgcacgctttacagcaccccaggtggagttggtgggcccaaggctgcccggagcagaagtaggggtcccccaagtgagcgcccctaaggccgctccgtctgcggaggcagccggaggatttgcactgcacctgcctacactgggactgggggcacccgctcctcccgctgtggaagcaccggcagtgggtatccaggtcccccaggtcgaactccccgcactgccatcattgccaacactgcccaccctcccgtgtctggagacacgtgaaggggctgtctccgtcgtcgtgcctacactcgacgtggcggctcccactgtaggagtggatcttgccctgcctggtgctgaggtggaagctcggggtgaggcacctgaggtggctttgaagatgcctcgactctcctttcctcggttcggggctcgggcaaaggaagtcgctgaggccaaagtggcgaaggtctctcccgaggcaagggtgaagggaccgcgtctgagaatgccgacatttgggctgagtcttctcgagcctcgacccgctgcccctgaggtggtcgagtccaagttaaagctgcccaccattaagatgccctccctcgggatcggcgtctcaggccctgaggtcaaggtaccgaagggtccagaagtcaaacttccgaaagctcccgaggtgaagctgcctaaggtgccggaggcagctctccccgaggtccgcctgcccgaagttgagctacctaaggtttcagaaatgaaacttcctaaggtgcccgaaatggccgttcccgaagtgcgcctgcccgaagtggagctccctaaggtctccgaaatgaaactgccaaaggtccccgagatggctgtgccggaagtgaggttgccagaagtgcagctgctgaaagtctccgagatgaaattgcccaaagtgccagagatggcggttcccgaagtcaggctcccagaagtccaactgcccaaggtctcagagatgaaattgccagaggtctctgaagtggccgtacccgaggtgagactccctgaagtgcagctgcctaaggtgcctgaaatgaaagtgccagagatgaagctgccaaaagtgcctgagatgaagctccctgaaatgaaactaccagaggtacagcttcctaaggtgccagaaatggcagtccctgacgtccaccttcccgaagtccagctgcctaaggtgccagaaatgaagctgccagagatgaaactaccggaggtgaagctgccaaaagtgcccgagatggccgtgcctgacgtgcacctgcctgaggtgcagctgccaaaggtaccagaaatgaagctgcccaagatgccagaaatggcagtgccggaagtccggcttccagaggtgcagctccccaaagtgagcgagatgaaactgccgaaggtcccagaaatggctgttcccgacgtccacctgcctgaggttcaactgcccaaagtgtgcgaaatgaaggtgccagacatgaaactgccagagattaagctgccaaaggttcccgagatggcagtcccagacgttcatctgcctgaagtgcagctgccaaaagtcagcgaaattcgcctcccagaaatgcaggttccgaaagtccctgacgttcacctgccgaaagctcctgaggtgaagctgcccagggcacccgaagtacaactaaaggctacaaaggcggagcaggccgaagggatggagttcggtttcaagatgccgaagatgacaatgccaaagctgggcagagcagagtcgccttccagaggaaagccaggagaagccggagctgaggtgagtggcaagctagttaccctgccgtgcctgcagcccgaggtggacggagaagcccatgttggggtgccctctctgactcttccctccgtcgagcttgacctgcctggagcattgggacttcaaggtcaggtccctgccgctaaaatgggcaagggagaaagggtggagggacccgaagtggcagctggcgtcagggaagtgggttttcgggtgccatcagttgaaatagttacacctcagctgccggctgtcgaaatcgaagaaggcaggctggaaatgatcgaaactaaggttaagcccagctccaaattctcacttcccaagtttgggctcagtggccctaaggtggccaaagcagaggccgagggcgcaggtagagcaactaaactgaaggtgtccaagttcgccatctccctgcccaaggcacgcgttggcgctgaagcagaggccaagggagccggagaggcaggtcttctccctgccttagacctaagcatcccccagttgagtcttgacgcccatttgccgtccggcaaggtggaggtggccggagctgacctgaaattcaaaggacctcggtttgcactacccaaattcggggtcagaggcagagataccgaggcggcagaacttgtcccaggagttgcggaactggagggcaaagggtggggatgggacgggagagtcaagatgccgaagctcaaggtctccaccgccggacaagtagtgacagagggccatgatgcgggtctcaggatgcctccccttgggatctctttgccccaggtagaactcacgggtttcggtgaagcaggaacccctggccagcaggcgcagagcacggtgccgagtgctgagggcaccgccggatatagagtacaggtcccccaagtgacactcagcttgccaggcgcacaggtcgcaggcggagagctgctggtcggagaaggcgtgttcaaaatgccaactgtcaccgtaccccagttggagctggacgtggggctatctcgggaagcccaagctggcgaggctgctaccggtgagggcggactccggttgaaactgcccaccctgggggcaagagccagggttggcggtgagggggctgaggagcagcctccaggggcagaaagaaccttctgcctgtcgcttcctgatgttgagctctccccatctggcggaaaccatgcagagtatcaggtggctgaaggagagggcgaagctgggcacaaactcaaagtccgactaccccgatttgggctggttcgcgcaaaagaaggcgctgaagagggcgaaaaagcaaaatcccctaagcttcgactaccaagggtcggcttcagtcagtcggagatggtgactggcgagggttccccaagcccagaggaggaagaggaggaagaagaagaaggttcaggtgaaggagcctctggcaggcggggaagggttcgggtgcggctgcctcgagtggggttggcggctccaagtaaagccagccgcggtcaggaaggggatgcggctcccaaatccccagtccgagaaaagtcaccaaaattccgtttcccacgagtgtccctttctcccaaagcccgttccggcagcggcgaccaagaggagggcggactccgggttcgcctaccatctgtgggtttctccgagaccggagcgcctggtccggctcgcatggagggagcacaagctgcagccgtatag

SEQ ID NO: 234330 - DNA, 2214 bp, synthetic construct
  misc_feature 1..2214: note = Description of Artificial Sequence: Synthetic coding sequence
  source 1..2214: mol_type = other DNA
atggaagttgagcaagagcagaggagacgtaaggtggaagccggtcgaaccaagttagcccactttcggcagcgcaagaccaagggagattctagccacagtgaaaaaaaaacagctaagcgaaaaggtagcgccgtcgatgcttccgtacaggaagagagccccgttaccaaggaagactccgcgctgtgtggagggggtgacatatgcaagtcaaccagttgcgatgacacacccgacggcgcaggtggcgcattcgctgctcagccagaagactgtgacggcgagaagagagaggatctggagcagctgcagcaaaaacaggttaatgatcaccctccggagcagtgtggcatgttcacagtctcagatcacccaccggaacagcacgggatgtttaccgtcggcgatcacccccctgaacagagaggtatgttcaccgtcagcgatcatccacctgaacagcgaggtatgtttaccattagtgaccaccaacctgagcagcggggaatgttcaccgtttctgaccatacaccggaacagcgcggtatttttaccatcagcgatcacccagctgaacagcgaggcatgtttacgaaagagtgcgagcaggagtgtgagctggcaattaccgacttagagagcggacgcgaagacgaagccggtcttcatcagagtcaggccgtgcacgggctggagctggaagcgctccggctgtccctgtccaacatgcacacagcacagctggagctgacacaggctaatctacagaaagagaaagagacagctctcaccgaactgagagagatgctgaattccagacgggcacaggagctcgctttactgcagagtaggcagcagcacgagctggaactactgcgcgaacagcacgcacgggagaaggaagaggtcgtactaagatgtgggcaggaagccgctgaactgaaggaaaagttgcagagcgaaatggagaaaaacgctcagatagtcaaaaccctgaaggaggactgggagagtgagaaagatctgtgtctcgaaaatcttaggaaagagctgtcagcaaagcatcagagtgaaatggaggacctgcaaaaccagttccagaaggagctggcagagcagagggctgagctggaaaagattttccaggataagaatcaggctgagagagcactccgaaacctggagagccatcaccaggccgctatcgagaaattgcgcgaagaccttcagtctgagcatgggagatgcctggaagacttggagttcaagttcaaggagagcgagaaagaaaagcagctggaactggagaacttgcaggcctcttacgaagatctcaaagcccagagtcaagaggagattaggcgtctatggagtcagctagacagcgcccgaacctcaagacaagaactctccgagctccacgagcagctcctggctagaaccagccgtgtggaggacctagaacagctcaagcaacgggaaaagacccaacatgagtccgaactggagcagctgagaatttactttgaaaaaaaactgcgcgacgcggagaagacatatcaggaggatctgaccctgctgcagcagcggctccagggcgctcgcgaggatgccttactggactcagttgaagtcggcctttcatgcgtgggcctcgaggaaaaaccagagaaaggtaggaaagaccacgtcgacgagctggaacccgagagacataaagaaagcttgcctagattccaggccgaacttgaggagtcccatcgacaccaacttgaagcactggaatcacctttatgtattcagcatgaaggccacgttagcgacagatgttgcgtcgagacgagcgcgttgggccacgaatggagacttgagccctctgaggggcactctcaagaacttccctgggtccatctgcagggcgtgcaggacggcgatctggaggccgacactgagcgggctgccagagtgctgggactggaaaccgaacacaaggtacagctttcactgctgcaaaccgagttgaaagaggagatcgagctgcttaagatcgaaaaccggaacctatacggaaagttgcagcatgagacaaggcttaaagatgaccttgaaaaggtaaaacataatttgatcgaagaccatcagaaagaacttaacaatgcaaagcagaaaaccgagctgatgaagcaggagtttcaacgcaaagagacatag

SEQ ID NO: 234331 - DNA, 10010 bp, synthetic construct
  misc_feature 1..10010: note = Description of Artificial Sequence: Synthetic coding sequence
  source 1..10010: mol_type = other DNA
atggaggtggaacaggagcagcgaaggcggaaggtagaggcagggaggactaaactggcccacttcaggcagcgaaaaaccaagggcgactcctcccactcggagaaaaagaccgctaagagaaaaggctccgcagtggatgctagcgtgcaggaagagtctccggtgactaaggaggactcagctctatgtggaggtggcgatatatgtaaatcaacttcttgtgacgacactcctgatggtgcagggggtgcattcgccgcacagccagaggactgcgatggcgaaaagcgggaagacctggaacaactccagcagaagcaggtgaatgaccatcctccagagcagtgtggaatgttcacggttagcgaccatccgccagagcagcacggcatgtttaccgtcggagatcacccaccggagcagaggggaatgtttaccgtgtcagaccacccgccagaacagcatggcatgtttacggtttccgatcaccccccagagcagcgagggatgttcactataagcgatcatcagcccgagcagaggggtatgtttactgtgagcgatcacaccccagaacagagaggcatcttcacaatctccgaccacccagccgaacaacggggtatgtttacaaaagaatgtgaacaggagtgtgaactggctatcacagatttggagagtggacgtgaggatgaagcgggactgcaccagtcacaggccgtgcacggtctggaactcgaggctcttcgtctgagcttgtctaacatgcatacagcccagctggaactgacacaggcaaacctccaaaaagagaaggaaacagcactgaccgagctgcgggagatgctcaacagccgacgggcacaagagctggccctcctgcagagccgccagcagcacgaactggaactgctgagagagcaacatgctcgcgaaaaagaggaagttgtgttacgatgcgggcaggaagctgcggagctgaaggaaaaactgcaatcagagatggaaaaaaacgcccagatcgttaagaccctgaaggaggattgggaaagcgagaaggacctgtgcctggagaacctgcgaaaagagctgagcgccaagcatcagagcgagatggaagatttgcaaaaccagttccaaaaagaattggctgaacagcgagccgagctggagaagatctttcaggataaaaaccaggcagagagagccttaagaaatctcgaatctcaccatcaggcagccattgaaaaactgagggaagatttgcaaagtgagcacgggagatgtctggaagatctagagtttaagttcaaggaatctgagaaagaaaagcaactggaactggaaaatttgcaggcttcctatgaggacctgaaagctcagagtcaggaggagattaggcgcctatggtcccagttggattctgcccgaacatctcgtcaggaactaagtgagcttcacgagcaactgctggccagaacatctagagtcgaggaccttgagcagttgaagcaacgtgaaaagacacagcacgaatccgaattagagcagctgaggatctactttgaaaaaaaactgcgggacgccgaaaagacctatcaagaggacttaactctcttacaacaaaggctgcagggcgcaagagaagacgcccttctggactcagttgaagtaggactgagctgcgtcggtctagaggaaaaaccagagaaggggaggaaggaccatgtagatgaattggagcccgagcgccacaaggagtctctgcccagatttcaggcagagcttgaagaaagccacaggcaccaattggaggccctcgagagcccactatgcattcaacacgaagggcatgtgtcagacaggtgttgtgtcgagacgtcagctctgggccacgagtggcgtctggaaccctcagagggacacagtcaggaattgccatgggtgcatcttcagggcgtacaagacggcgacctagaggcggatacagagcgcgctgccagggtactcggtctcgaaaccgagcacaaggtccaactctcccttcttcagacggagttgaaggaggaaatagagctcctgaaaattgagaaccgcaatttgtacggtaagttgcagcacgaaacccgcctcaaagacgacctggagaaggtgaagcacaacctgatagaagaccaccagaaagaactcaacaacgcgaaacagaagaccgaactgatgaaacaagaattccagcgaaaggagaccgactggaaagtgatgaaggaagagctgcaaagagaagctgaggagaagctcacattgatgctgctggagctgcgggaaaaggccgagtcagagaagcaaactatcattaataaatttgagctccgcgaggccgaaatgagacagctgcaagatcagcaggccgctcaaattctggacttagaaaggagtctgaccgaacagcagggaaggcttcagcagctggagcaggatctaacttcagacgatgcgttgcactgttctcaatgtggacgtgaacctcctaccgcccaagacggtgaactcgccgcactgcatgtgaaggaggactgtgccttgcagctgatgctggctcgatcccgctttctcgaagaacgcaaagagatcaccgagaagttcagcgctgagcaggatgcctttctgcaggaggcccaggaacaacatgcaagagaattacagctgctccaggagaggcaccagcagcagctcctttccgtgacagcagagctggaagccagacatcaggccgctcttggcgagctgaccgctagtctggagtcaaaacagggtgctctgctggctgcgagggtcgccgaattgcagaccaagcacgccgcagacctgggcgctctcgaaactcggcacctgtcatcccttgactctctcgaatcgtgttatttgtcagagtttcagacaattagggaggagcatcgacaggctttagagctcctgcgggctgacttcgaggagcagctttggaaaaaggatagcttgcaccagacaatcctgacgcaggagttagagaagttgaaaagaaagcatgagggagagctgcagtccgtgcgggaccatcttcgtacggaagtcagtacagagttagcaggcactgtggcacacgagctgcagggggtccatcagggcgagttcggttccgagaagaaaacagctctgcatgagaaggaggaaacacttcgcttgcagtcagctcaggcgcagccttttcaccaggaggaaaaggagtctctgtccctgcagctccagaaaaagaatcaccaggtccagcagctaaaagaccaggtgctcagcttaagtcatgagattgaagagtgtcgaagcgagctagaagtgttacagcagcggagagaaagagagaacagggaaggggcaaatttgctcagcatgctcaaggccgacgtgaatctctctcactcggagcgcggagccctacaagatgcacttcgacggctgctcgggctgttcggagaaacccttcgggcagccgtgaccctccggagtcgcataggcgagagggtggggctgtgtctcgatgatgcaggggcaggtctggccttgagcacggctcctgccctcgaagaaacgtggtccgacgtggccctgccagaattggatcgaacgctttccgaatgcgccgagatgtcctccgtcgcagaaatttcatcacacatgagagagagctttctaatgtcacctgaatcggttcgggagtgcgaacagcccatcagacgggtttttcagtcactgagcctggccgtggatggtttgatggaaatggcgctggactcctctcgccagctggaagaagccagacagatccactcacgctttgaaaaggagttttctttcaaaaatgaggagaccgctcaggtggtgcgcaaacaccaggaactgctggagtgtttgaaggaggaaagcgcagctaaggccgaactggcgttggaacttcataagactcagggaacgctagaagggttcaaagtggagactgccgacctcaaggaagtgctggctggcaaggaggacagtgagcatcgactggttctggagctggagtcattaaggcgtcagcttcagcaggctgctcaagagcaagctgctctgagagaggagtgtactcggctctggtctaggggagaggccaccgcaaccgatgccgaagctcgtgaagccgcactcagaaaggaggtggaggacctgacgaaagagcaatcagagacccggaagcaggcagagaaagacaggtctgccctcctttcgcagatgaaaatcctagaatccgagctcgaagaacaactgagtcagcacagaggctgcgccaaacaggccgaagccgtgactgcattggagcaacaagtcgcttctcttgacaagcacttgcggaaccagcggcagttcatggacgaacaggccgcagagcgagaacacgaacgtgaggagtttcagcaggaaattcaaaggctggaagggcagctgcgacaggctgccaaaccacagccgtggggcccacgggacagtcaacaggcaccgcttgacggcgaggtagagcttttacagcagaagcttagggaaaagctggatgaattcaatgagctcgcaatccagaaggagtctgccgaccggcaggtgctgatgcaggaagaggagatcaaaaggctggaggagatgaatatcaatatcaggaagaaggttgcccagctgcaggaagaggtggagaagcagaagaatattgtgaaagggcttgagcaggacaaagaggtattgaagaagcaacagatgtcaagcctgttattggcaagtactctgcagtctaccctcgacgcagggagatgtcccgaacctcccagcggaagtccgccagaagggcctgaaattcagctcgaggtgacccaacgggcactcctaaggagggaaagcgaagtgcttgacctgaaagaacaactagagaaaatgaagggcgacctcgagtctaagaatgaggaaattttgcacctgaatctcaaactcgacatgcagaactctcagacggccgtctcactgcgcgagctggaagaggagaacaccagcctgaaagtaatctacactcgaagcagtgagatcgaggagctcaaggcaacaatcgagaatctccaggagaatcagaagaggctgcagaaggagaaagctgaggaaattgaacagctgcacgaggtcatagagaaattacagcacgagctgagcttgatgggacccgttgtccacgaggtgtcagacagccaggcaggatcgctgcagagcgaattactgtgtagccaggcaggcggaccccgtgggcaggcactgcaaggcgagctggaagctgcccttgaggcaaaggaggcactgtccagattacttgcggaccaagaacgtagacacagtcaggcactggaggctctacagcagaggctccagggcgcagaggaagccgctgagctacagctcgcggaacttgagaggaacgtggcgttaagagaagctgaggtggaagatatggcatcacgtatccaggagttcgaagcggctttgaaagcaaaggaggccaccatcgcggagcggaacttggagatagatgcactgaatcagcgcaaggctgcccattccgcagagctcgaagccgtcctcctggctctggcacggattagacgggcactggaacagcagcctctggctgccggtgctgctcctccagaactgcagtggctgagggcccagtgtgccagactctcccggcagctgcaggttcttcaccaaaggtttttgcgatgccaggtggaactggacagacggcaggccaggcgggctactgcccatacacgcgtgccaggagctcacccacagcctcggatggatggaggcgctaaggcccaggtgacaggagatgtagaggcctcccatgacgcagccctggagcctgtggtgccagacccacagggagacctccagcccgtgctggtgacactaaaagatgctccattgtgcaagcaggaaggcgtgatgtccgtcctgaccgtgtgtcaaaggcagctgcaatcagagctgttactggttaaaaacgagatgagattgtcattagaagacgggggaaaaggcaaggaaaaggtacttgaggactgtcagttgcccaaagtggacctcgtcgcccaggtcaagcaattgcaggagaaattaaaccgccttttgtactccatgactttccaaaatgtagatgctgctgatactaaaagcttgtggcctatggcaagcgctcatctgctcgaatcaagctggtccgacgactcttgcgatggcgaggaacccgatatatcgcctcatatcgacacatgcgatgctaatacagctaccggaggagtgaccgacgtgatcaagaaccaggcgattgacgcatgtgatgccaacaccacgcccggaggcgttacggacgttatcaagaattgggattccctgattcctgatgagatgccagacagccccatccaagagaagtccgagtgtcaggatatgtcgctgtcatcgcctaccagtgtactgggcggttcacgccaccagtcacatactgcagaagcgggtcccaggaagtccccggtgggcatgctcgatctttcaagctggtcgagccctgaggtgctgaggaaggactggactctcgagccctggcccagtttgcccgtgacaccccactccggcgctttgagcctgtgtagcgctgataccagccttggtgatagagcagatacaagtctgccacagactcaagggcctggacttttgtgtagtccgggagtgagtgctgctgccctcgctctgcaatgggccgaatctccacccgctgatgaccatcacgtacagcggacagcagtcgagaaggacgtcgaggatttcatcaccacatctttcgattcgcaggagactttatccagcccccctcccggtctcgaaggcaaggccgaccgttccgaaaagagcgatggaagtggattcggggctagactcagccctggttcagggggtccagaggcccaaactgctggaccagtcactcctgctagcatttcagggagatttcagccattgcctgaggctatgaaagaaaaggaagtgaggccaaaacatgtgaaggccctactccagatggtgagggacgagtcccatcaaatcctcgcactctccgagggactggctcccccttcgggagaaccacatcctccccgtaaggaggacgagatacaggacatttcactgcacgggggaaagacccaggaagtacccactgcatgtcccgactggagaggggacttgctgcaggtggtccaggaggccttcgagaaggaacaggagatgcagggcgttgaactgcagccgcgtctcagtggaagcgacctcggtggacactcctcgttgctggaacgacttgaaaaaattatcagagaacaaggagacctccaggagaaaagccttgagcatctgcgtttgccggatcgcagctcgcttctgtctgagatccaggccctcagagcccagctgaggatgacacatctacagaaccaggaaaaactgcagcatttacggacggcattaaccagcgcagaggctcggggttcacagcaggagcatcaattacggcgacaagtcgagctgttggcatacaaagtcgaacaagagaaatgcatagctggagacctgcagaaaacactgtctgaagaacaagagaaagcaaactctgtgcagaagcttctggccgcagagcagacagtcgtccgcgacctgaagtccgatttatgcgaaagtcggcagaaatccgagcagctgtcaagatcactttgcgaagtgcagcaggaggtattgcagctcaggtcaatgttgtcgtccaaggagaatgagttgaaggctgctctccaggagctggagagtgagcaagggaaaggcagagcactccagtctcagttggaagaggaacagctgagacaccttcagcgggaatctcagagtgcaaaagctcttgaggaactgagggcatccctcgagactcaacgggcacaaagttcccgactgtgtgtcgcgctaaagcatgagcagacagccaaggacaacctgcagaaggaactgcggatcgaacattcacgctgtgaggcactcctcgctcaagaacgatcacagctgtcagaactgcagaaggaccttgccgcagagaagtcccggaccctcgagctgagtgaggctctgaggcacgagcgcctattgacagaacaactttcacagcgaacgcaagaggcttgcgtgcatcaagacacgcaggcacatcatgctctacttcagaaactcaaggaggagaaaagcagagtggtcgatctgcaggccatgctggagaaagttcagcaacaggcgctgcatagtcaacagcaactcgaagccgaggcccagaagcattgtgaagctctgagaagagagaaggaggtgagcgccaccctgaagtccactgtggaggctctccacacccagaagcgggagttgagatgcagtctcgaacgagagcgggaaaagccagcctggctccaggccgagctggaacaaagtcatccacggttaaaagagcaagagggcaggaaagccgctaggcgctcagctgaggcgcgtcagagccccgcagcggctgagcagtggagaaagtggcagagagacaaggagaagttacgggaactcgaactgcagagacagagggacttacataaaattaaacagctgcagcagacagtcagggatctggagagtaaggatgaggtgccaggaagtcggttgcatctgggctccgcaaggagggctgctggatccgacgcggaccatctccgagagcagcagcgcgagctggaagcgatgaggcagcggttactgtctgctgctaggctgctaacctccttcacctctcaggccgtcgatcgcacagtcaatgactggaccagcagcaatgagaaagctgtcatgagtttgctccacacactggaggagctgaagagcgaccttagtagacccacatcgtcacaaaagaagatggccgctgagcttcaattccagtttgtggacgtccttctgaaggacaacgtcagtctgacgaaggcactgagcacggtcacacaggagaaactagagctgtcccgggctgtgtctaagctcgaaaagttgcttaagcaccaccttcagaagggttgtagtccttctcgcagcgagcgctcagcatggaaacctgatgagacggccccacagagtagcctccgccgtcctgaccccggaagactcccaccagctgcaagcgaggaagcccacactagtaatgtcaagatggagaaactttatctgcactatctccgggctgaatcctttaggaaggccctgatttatcagaagaaatatctgcttttattaatcgggggatttcaagacagtgagcaggagaccctgtcaatgatagcacacctgggtgttttccccagcaaagcagagcgcaagattaccagccgccctttcaccaggtttaggacagccgtccgcgtggtgatcgctatattgcgactcagatttctagttaaaaaatggcaagaagtggacaggaagggcgcactcgcccaggggaaggcgcctcgccctggccctcgggctcgccagccacagagcccgcctaggacccgcgagtctccgcctactcgagacgtgccatctgggcacacacgggatcctgcccgtggacggcgactggcagcagccgcatcgccacactccggaggacgggctactcctagccccaatagccgattggagcggtctcttacagcaagtcaggaccccgagcactccctgacagagtatatccaccatttggaggtaatccagcagaggctagggggtgttctgcccgactcgacctccaagaagtcgtgtcatccaatgataaaacaata

SEQ ID NO: 234332 - DNA, 6074 bp, synthetic construct
  misc_feature 1..6074: note = Description of Artificial Sequence: Synthetic coding sequence
  source 1..6074: mol_type = other DNA
atggcgaccggcggtgggccatttgaagatggaatgaacgatcaggatctgcctaattggagcaatgagaatgttgacgaccggctgaataacatggattggggtgcccagcagaaaaaggcaaaccgatcgtcggagaaaaacaagaagaaatttggagtcgagtccgacaaaagggtaacaaacgacatttccccagagtcgagtccaggagtagggagaaggcggacaaagacaccacacacctttcctcattctcggtacatgtcacagatgtccgtgcctgaacaggctgagttagaaaagctgaagcagcgcatcaactttagcgacttagaccagcggtcaatcggatcggattctcaggggagggctaccgccgcaaacaacaaacgccagctgtccgaaaacagaaagccctttaattttcttccgatgcagatcaacactaacaaatccaaggatgcctccacaaacccccctaacagggaaaccattggctctgcccagtgtaaggagttgtttgcttctgccctctctaatgacctgctgcagaattgccaggtatccgaagaggatgggcgaggagaacctgcaatggaatcctctcaaattgtgtcccgattggtccagattagagactacatcactaaggcctcctccatgcgggaagacctggtggaaaagaacgagcgcagcgctaacgtagaaaggctcacccatctcatcgatcaccttaaggagcaggagaagtcatacatgaaatttttgaagaaaatcctcgcacgtgacccgcagcaggaacccatggaagaaatcgagaatctgaaaaaacagcacgacctcctgaagaggatgctgcagcagcaggaacagctcagggccctccagggaaggcaggccgcacttctagccctccaacataaggcggagcaggccattgctgtcatggatgattctgtcgttgccgaaaccgccggttccctttccggtgtgtcaataacctctgagctaaatgaagagctgaatgacctaattcagcgttttcacaaccagctccgggactctcaacctcccgctgtcccagacaaccggaggcaagcggagtctctgagtctgacccgcgaagtgtctcagtctcgaaagccgtctgcaagtgagagactccctgatgaaaaagtggagctgttcagtaaaatgcgggttcttcaagagaaaaaacagaaaatggacaaattactgggagaactgcacaccctccgcgatcagcaccttaataatagcagttcttcacctcagcgtagtgtcgatcagagatctaccagtgcaccttccgcgtcagtcgggctagctcccgtggtaaacggagaatctaactctctgacaagtagcgtgccctatccaaccgccagcctcgtttcccagaacgagagtgagaatgaagggcatttgaatccctcagagaaactgcagaaactgaatgaagtgcgtaagaggctgaacgagctgagggaactggtgcattattacgagcagacctcggacatgatgacagatgccgtgaacgaaaacaggaaggacgaggagacggaggagtctgagtacgacagcgagcatgagaattcagaaccagtgaccaatattaggaatccccaggtggcgtccacatggaacgaagtcaactcgcattccaatgcgcaatgcgtttccaacaacagagacggtcggactgtgaattcaaactgtgaaatcaataatcgctcggcggcaaacatccgggctctgaacatgcctccttcgctggactgccgatacaatagggagggggaacaggagatccacgtcgcacagggcgaagacgatgaagaggaagaagaggaggcggaagaggaaggggtctctggggcatcacttagtagccaccggtcttccctcgtagacgagcatccagaggatgcagagttcgaacagaaaatcaatagactgatggccgcaaagcagaaactacgacagctgcaggacctggttgcaatggtccaggatgatgatgcggctcagggggtgatctctgcgtccgccagtaacctcgacgatttttatcccgctgaggaagacaccaagcagaactccaataatacacggggaaacgcaaacaaaacccagaaagacacaggagtgaatgagaaagccagagagaagttttacgaagccaagctgcaacagcagcaaagagagctgaaacaactccaagaggagcgcaaaaaattgatagatatccaagagaagatccaagcacttcagaccgcttgtcccgatctacaactctccgccgcttccgtcggcaactgccctacgaagaagtatatgcctgctgtcaccagcaccccaacggttaaccagcacgaaacatctacgagcaaaagcgtctttgagcccgaggattcaagcatcgtggacaacgaactttggtccgagatgaggagacacgaaatgctgcgagaggagctacgccaacgaagaaagcaactggaggctcttatggcagagcaccaacgtcgtcaaggcttagctgagacggccagcccagtcgctgtgtccctcagatcagatgggtccgaaaatctgtgtactccccagcagagtaggactgagaaaaccatggcaacctggggcggatcaacacagtgcgccctggacgaggaaggtgacgaagatgggtatctctctgaggggatagtgaggacagacgaggaggaggaagaggagcaggatgccagctcaaatgataacttttcagtgtgtccctccaactccgtgaaccataacagttataacggtaaggaaacaaaaaatcgatggaaaaataactgtccgttctccgctgacgagaactaccggcctctggccaagacccgacagcagaacatcagcatgcagcggcaggagaatctccgttgggtgtccgaactgtcatacgtagaggaaaaagagcaatggcaagaacagataaatcagctgaagaaacagttggatttcagcgtctccatatgtcagacactcatgcaggatcagcagaccttgagctgtctccttcaaaccctcttaacagggccatattctgtcatgccctcaaatgttgcaagcccgcaagtacatttcataatgcatcagctgaatcagtgttatacccagctcacctggcagcagaataacgtgcagagattgaagcagatgctgaacgaactcatgagacagcagaaccagcatcccgaaaaaccaggaggcaaagagagaggcagctccgcaagccatcctccctcacctagcctcttctgcccttttagcttcccaacacaacctgtgaacctattcaacattcccggattcaccaatttttcctctttcgcgcctgggatgaacttctcgcccctcttcccaagcaattttggtgatttctctcaaaacatttctacaccctctgagcaacagcaacccttagcccaaaacagttccggtaagacagaatacatggcgtttccaaagcctttcgagtcctccagctctataggcgcagagaagcccagaaataaaaaactgccggaggaggaagtcgaatcttctcggaccccctggctgtacgagcaagaaggcgaagttgaaaagcccttcatcaaaactggattttccgtgtctgttgaaaaatctactagctccaacagaaagaaccagctggacaccaatggcagaagacgtcagttcgacgaagaatccttggagagcttcagctcgatgcctgaccctgtggatcccactactgtcacaaaaacgttcaagacacgaaaggcttctgcccaggcatcacttgcttcgaaagataagaccccaaagtccaagagcaaaaagcgaaattccacacagctcaagtccagggtgaaaaatattcggtacgagagtgcttcaatgtcctccacgtgcgagccttgtaaatcccggaatcgtcacagtgctcagactgaagaaccagtccaggccaaggtgttctcaaggaagaaccacgagcagcttgaaaagatcataaaatgcaatcgctcaacagagatttcaagcgagaccgggagcgacttcagcatgttcgaagcgctccgcgacaccatctactcagaggtggctacccttataagccagaatgagtctagaccccacttcctgatcgagctgttccacgaactccagctgctgaatacagattacttgcgtcagcgggcactatacgccctgcaggacattgtatccagacacatttctgagagccacgagaaaggcgagaacgtgaaatctgtaaattctggcacgtggattgcatccaattccgaattgacaccatccgaaagccttgccaccacggatgatgagacatttgaaaaaaatttcgagcgtgagacccacaaaatttcagaacagaatgacgctgataacgccagcgtgctgtcagtttcttccaacttcgaacccttcgctactgacgatctgggtaacaccgtgatacatctcgaccaggccctcgcaaggatgcgcgaatatgagcgaatgaagaccgaagcagaaagcaattcgaatatgcggtgtacctgtcgtatcatagaagacggcgacggcgcaggcgctggaaccacagtgaataacttggaggaaacgcctgtgatcgaaaacaggagcagccaacagcccgtgtctgaagtgtccactatcccgtgcccgcgaattgatactcagcagcttgatagacagatcaaggcaattatgaaagaggtaattcctttcctgaaagaacatatggatgaggtgtgcagttcccaactcctgacatctgtcaggaggatggtgctgacgttgacccagcagaatgatgaaagcaaggagtttgttaagttcttccataaacagctagggagtattctacaggattccctggcaaagtttgccggtcgtaagttgaaagactgcggagaagaccttcttgtagaaataagcgaggtgctgttcaacgagctcgcctttttcaagttgatgcaagatctcgacaacaattctattacagtcaaacagagatgcaagagaaagatcgaagccaccggcgttatccaatcctgtgcaaaagaagccaagagaattctagaagatcacggatcccctgctggggaaatcgatgatgaagataaagacaaagacgagacagagacggttaaacagacacagacttcagaagtgtatgatgggcctaaaaatgtgagatccgacatctctgaccaggaagaggatgaagagagcgaaggatgtcccgtcagcataaaccttagcaaagccgaaacccaggcactgacaaattacggaagcggcgaggatgagaacgaggacgaagagatggaggaattcgaggagggccctgtagacgtgcagaccagcctgcaagcaaacaccgaggctacagaagagaatgagcatgacgagcaggtgctgcagagggactttaagaagactgctgaatcgaaaaatgtgcccctggagcgcgaagccacctccaagaacgaccaaaacaattgtccggtgaaaccctgttatctgaatattttagaagatgaacagcccttaaattccgctgcacataaggagtcccctccgaccgtcgattccactcagcagcctaaccccctcccattacggcttcccgaaatggagccattggtgccccgagttaaagaggtgaagtcagcacaagaaaccccagaaagttctctggccggatccccggacacggagtcaccagttctggtgaatgattatgaagctgaatctgggaacattagccaaaagtctgatgaagaggattttgtcaaagtcgaggatcttcccttgaaactgactatctatagtgaagccgacctgcgtaagaagatggtggaggaggaacaaaagaaccatctctccggggaaatctgtgagatgcaaactgaggaactggctgggaatagcgaaacactgaaggagccggagactgtcggtgcccagagtatcta

SEQ ID NO: 234333 - DNA, 1590 bp, synthetic construct
  misc_feature 1..1590: note = Description of Artificial Sequence: Synthetic coding sequence
  source 1..1590: mol_type = other DNA
atggccacagggggtggccctttcgaagatggaatgaatgaccaggatctccctaactggtcgaatgaaaacgtagatgatcgtctaaataacatggactggggcgcacaacagaaaaaggcaaataggagcagtgagaagaataaaaaaaaattcggcgtggaaagtgacaaaagagtcactaatgatatcagccctgagagctctcctggagttggtagacgacgaactaagactccacacacatttccacatagcagatatatgagccagatgtctgtcccggagcaggctgagctcgagaagttaaagcagcgcatcaacttctcagacttagaccagagatcgatcggttctgacagccagggcagggccacagctgcaaataataagcggcaactttcagaaaatcgcaagccatttaattttctccccatgcagataaatacaaacaaaagcaaagacgcaagcactaacccccctaatagagagactattggctccgctcagtgtaaggagctgtttgcctctgcactgtcgaacgatctactccagaattgccaggtttcagaggaagacgggagaggggaaccagccatggaatcctcccaaatcgtctcccgcctcgtgcaaatcagggactacattaccaaggcaagtagtatgagagaagatctggtcgagaagaatgagcggagtgcaaacgtcgagaggctgacacacctgatcgaccacctgaaggagcaggaaaaaagctatatgaaattcttaaaaaagatcttggctagggaaaacgaagaagaggacgtcagaactatagattccgcggtcggctctggctccgtggccgaaagtacgtctttaaatatcgatgtgcagagtgaggcaagcgacacaacagcgagagacccccagcaggagccgatggaagagattgagaatctaaaaaagcagcacgacctcttaaagcgcatgctgcagcagcaggagcagcttagggctctgcaggggcgacaggccgctttgctcgcacttcagcacaaggctgagcaggccattgccgtgatggatgacagtgtggtggcagaaacagccggatctcttagcggagtctctatcacctccgagctgaacgaggaacttaacgacctgattcagcgttttcataatcagctacgcgacagccagcccccagccgttccggataataggagacaagccgaatccctgagtttgacccgagaggtatctcagagccgtaaaccatctgcgagtgagagactacctgacgagaaggtggaactctttagcaaaatgagagtactacaggagaaaaagcagaagatggacaagcttttgggcgagctacacactctccgagatcagcacctgaacaattctagctcatccccccagaggtcggtggaccaaagaagcacaagtgctcctagcgcctcagtggggctggcaccagtggttaatggggagagcaattccctgacgtcctctgtaccatacccaactgcttcgttagtaagccagaatgaatcagagaacgaaggccatttaaaccccagcgaaaagttgtag

SEQ ID NO: 234334 - DNA, 2172 bp, synthetic construct
  misc_feature 1..2172: note = Description of Artificial Sequence: Synthetic coding sequence
  source 1..2172: mol_type = other DNA
atgagctctacatgtgaaccctgtaagagtagaaatagacatagtgcccagactgaggaaccagttcaagcgaaagtcttcagcagaaaaaatcatgaacaattggaaaagatcatcaaatgtaaccggtcaacggagatcagtagcgctcacgccaggagaatcctgcaacagagtaaccgcaacgcctgtaatgaagcccctgagacaggaagtgacttttctatgtttgaagcacttcgcgatactatctactcggaagtagccaccctcattagtcagaacgagagccgtccccattttttgatagaactgtttcatgagctgcaactcttaaatacagactacctgagacagagagccctttacgccctgcaggacatcgtgtcaagacacatttcggagtcccatgagaagggcgagaacgtgaaatcagtcaattcaggtacctggattgcctcaaattccgaactgactccatcagaatctctggcgaccacagatgacgaaacattcgagaaaaatttcgaaagggaaacacacaaaattagcgaacagaacgacgccgacaatgccagcgtgttgagcgtatcttccaattttgaaccgtttgctactgatgatctggggaatacagtcattcacttagaccaggccctcgcacggatgcgagaatacgagagaatgaaaacggaagcagaaagcaactctaatatgagatgtacctgccgcattatcgaggatggtgacggggctggggcaggcaccacagtgaacaacctagaggaaacccccgtgatagagaataggagctctcagcagcccgtgtctgaggtcagcactatcccctgtccacgcatagacacacaacaactggacagacagatcaaagccatcatgaaagaggtgatcccttttctgaaagagcatatggatgaagtctgttcttctcagttgctgacctctgtgcggagaatggtcctgactcttacgcagcaaaatgacgagtctaaagaatttgtgaaattcttccacaagcagctcggatcaatcctgcaagactccctggccaaattcgcgggacgcaagttgaaggactgtggagaagacctcctggtggaaattagcgaggtcctcttcaacgaactagcttttttcaagctgatgcaggatctcgacaacaatagcatcactgtgaaacagaggtgcaaacggaaaatagaggcgaccggagtgatccaatcatgtgctaaggaagctaaacggatcctcgaagaccacggcagtcctgcaggggaaattgacgatgaggacaaagataaggacgagaccgagaccgtcaagcagacacagacaagcgaggtatatgacggccctaagaacgtgaggtctgatatctccgatcaagaggaagacgaagaatctgagggttgccccgtgtctattaatctgtccaaggctgagacccaggccctgaccaattacgggagtggtgaggacgaaaacgaggatgaagagatggaagaattcgaagagggcccagtggacgtccagacatccctacaggcaaataccgaagctactgaggaaaacgaacatgacgaacaggtacttcagcgtgatttcaagaaaaccgccgaatccaagaacgttcctctcgagcgtgaggcaacctctaaaaacgaccagaacaattgtcctgtgaaaccctgttatctcaatatccttgaagatgaacaacctctgaacagtgccgcacataaggagtcccctcctacagtggacagcacacagcagcccaatcccctacccctcagactgccagaaatggagcctctcgtgcctagagtgaaagaggtgaagagtgcccaggagaccccagagtcatcactggccggtagccctgacacagagagccctgtgctggtgaacgactatgaagccgaatctggcaatatctcccaaaaatcagatgaggaagactttgtgaaagtggaggacctgcccctaaaactcacgatctatagcgaagctgatctccggaagaagatggttgaggaggaacagaagaaccatttatccggcgagatttgtgagatgcagactgaggaactggcagggaactccgaaaccctgaaggagcctgagacagtcggggctcagtccatctag

SEQ ID NO: 234335 - DNA, 2295 bp, synthetic construct
  misc_feature 1..2295: note = Description of Artificial Sequence: Synthetic coding sequence
  source 1..2295: mol_type = other DNA
taaaaggctagtgcacaggcaagtctcgcatctaaggacaagacgcccaagagcaagagcaagaaaaggaattctacgcagcttaaatcgcgcgtgaagaatatacgatatgagagtgcctccatgtctagcacctgcgaaccctgtaaatctagaaataggcacagcgcccagactgaggaacctgtgcaggccaaggtgtttagcaggaagaaccatgaacaactagaaaagattatcaagtgtaacagatcaactgagatttcatcagcacacgccagaaggattctccagcagtctaaccggaacgcatgtaacgaagcccctgagactgggagcgatttctctatgtttgaggccttgcgagataccatttactctgaggtggcaaccctcatctcccagaacgaatctcggccacacttcctgatagagctgtttcacgagcttcagctgctcaacactgactatctcagacaacgagcgctgtacgcgttgcaagacatcgtgtctaggcatatcagtgaatcccatgagaagggggagaacgtgaaatccgtcaactcaggcacttggatagcgtccaactctgagttaaccccctctgagtccctggccaccacggatgacgagactttcgaaaaaaacttcgaacgcgagacccacaagatatcagaacagaatgacgcggacaacgcaagcgttctgtccgtttctagcaacttcgaacctttcgcgactgatgacctcggcaatacagttatacacctggatcaagcacttgcacggatgcgggagtatgaacggatgaagaccgaagccgagagtaactctaatatgcgctgcacttgcaggatcattgaagacggggatggggctggggcaggcaccacagtaaacaacctggaggaaacacccgtgatcgagaaccggtcgagccagcagcctgtatccgaagtgtctactattccgtgtcctagaattgatacccagcagttggacagacagattaaggctatcatgaaagaagttattccttttctcaaagaacacatggacgaggtatgctcctcacagttactgacctctgtgaggaggatggttcttacactgacccagcagaatgacgagtccaaggaattcgtgaagtttttccataaacagctgggctccattttgcaagactcccttgcgaagttcgcaggaagaaagctgaaagattgtggagaagatttattggttgagatatccgaagtcttgtttaacgagctcgcattcttcaagctgatgcaggatctggataataactcaataacagttaaacagagatgtaaaagaaaaattgaggctacaggagtgattcagtcctgtgctaaggaagccaagaggattctggaggatcacggctctccagctggagagatcgatgacgaggacaaggataaagacgagaccgaaacggtgaaacagacgcagacctccgaagtctacgatgggccaaagaacgtccggagcgatattagcgatcaggaagaagatgaggagtcagaaggctgtcctgtcagcattaacctcagcaaggctgagactcaggctcttactaactatggtagcggcgaggacgaaaatgaggatgaagaaatggaggagttcgaggagggccctgtcgatgtccagactagcttgcaggcaaacacggaagccacagaagaaaacgaacatgacgaacaagtcctgcagagagacttcaagaaaacagcagagagtaaaaatgtgccactggagagggaggctaccagtaaaaacgaccagaataactgtcccgttaagccctgttacctgaatatccttgaagacgagcagcctttgaacagcgctgcccacaaagaaagccctcctactgtggacagtacgcagcaaccgaacccactcccactccgcttgcctgagatggaacctctagtgcccagggttaaagaggtcaagtccgcccaagagactcctgagtcatccctggccggttcacccgacacggagtctcccgtgctcgtcaatgattacgaagccgaatcaggaaatatctcgcaaaagagcgatgaagaggattttgtcaaggttgaggacctgcctctgaagctgaccatctacagtgaagccgatttacgtaaaaaaatggtggaagaagaacaaaaaaatcacctgtctggcgaaatctgtgagatgcaaaccgaggaattggccggaaatagcgaaacacttaaggagcccgaaacggtgggagctcagagtatctag

SEQ ID NO: 234336 - DNA, 1227 bp, synthetic construct
  misc_feature 1..1227: note = Description of Artificial Sequence: Synthetic coding sequence
  source 1..1227: mol_type = other DNA
atggccacagggggaggtccattcgaggatggaatgaacgaccaggacttgccaaactggtctaatgagaacgtcgatgatcggctcaataatatggactggggcgctcaacagaaaaaggccaatcggagtagcgagaaaaataaaaagaaattcggcgtggagtctgacaagcgagtgacaaacgacatcagtcccgaatcctccccaggtgtgggccgacgacggaccaaaacaccccacaccttcccccattccaggtacatgtcacagatgagcgtgccagaacaggccgagttggaaaaattgaaacaacgcatcaacttctccgacctggatcagagatccattggatcagacagccagggaagggctaccgctgccaataacaaaaggcagctgtccgagaacaggaagcctttcaatttcctgcccatgcagattaataccaacaaaagtaaagacgccagcacaaaccctccgaatagggagaccatcgggtccgcccagtgtaaagagctcttcgcttctgctttgtctaacgatctcctgcagaactgtcaggtgagtgaggaagatggaagaggagaacccgcaatggaatctagccaaatagtctcgcggctggtgcagatcagggactacatcactaaggcaagttccatgcgagaggacctggttgaaaagaacgaaagaagcgctaacgtcgagaggctgacacatctgatcgatcaccttaaagagcaagagaaaagttacatgaaatttctgaagaagattctagccagagatccccagcaggaaccgatggaggaaatcgagaatctgaaaaagcaacacgacctcctgaaacggatgctccagcagcaggagcagcttcgagcactccaaggtaggcaagcagcactgttggccctgcaacacaaggcagagcaggcaatcgccgtgatggatgattctgttgtcgctgagaccgcaggatccttgagtggagtcagtattacgagcgagcttaatgaagaactgaatgatttaatccaaagatttcacaaccagctccgagacagccagcccccagccgttcccgacaatagacgccaggccgaatcactgtccctcacgcgcgaagttagccagagcagaaaaccgtccgccagtgaacgtctgccagacgagaaggtggagcttttcagtaaaatgcgagtgctgcaggagaagaaacaatag

SEQ ID NO: 234337 - DNA, 1569 bp, synthetic construct
  misc_feature 1..1569: note = Description of Artificial Sequence: Synthetic coding sequence
  source 1..1569: mol_type = other DNA
atggccgtgaacaagggcttgactctccttgatggtgacctccctgagcaagagaatgttctacagagggttctccagctgcctgttgtgtcaggcacgtgtgagtgttttcaaaaaacctatacctcaaccaaagaagcccacccactggttgcaagcgtttgcaatgcctacgagaagggagtccaaagtgctagctcccttgcggcttggagtatggagccggtggtccggcgtctgagcactcaatttaccgcagctaacgaactggcttgtaggggtctggatcacctcgaggagaagatcccggctctacagtatccccctgagaagattgcatctgagcttaaggacacaatcagcactcggctgaggagcgccagaaactccatttcggttcctatcgccagtacaagcgataaagttctgggcgcagctctagcgggatgcgagttagcctggggggtggccagagacaccgcggagttcgccgcaaacacccgtgcagggcgtctcgctagtggaggggctgacctggcgctgggctccattgaaaaggtcgtggagtacttattgccacctgacaaagaagagtcggctccggcacccggtcatcagcaagcccagaagtccccaaaagctaaaccttcactgctatcaagagtgggtgccctgacgaacacactctcaaggtacactgtccaaacgatggcccgtgccctagagcaggggcacacagtggcaatgtggatccctggcgtggtgccattgagttctcttgcacagtggggcgcatctgtagcaatgcaggcagtgtctcggagaagatcagaggtgcgcgtcccctggctacacagcttggccgcagcccaggaagaggatcacgaggatcagaccgatactgagggagaagataccgaagaggaggaggaactagaaaccgaagaaaataaatttagtgaggtggcagcacttcctggacccagggggttgctcgggggtgtcgcccacaccttacagaaaacactgcagacgactatctctgctgttacttgggcacccgctgcagtgctcggaatggcaggcagagtgcttcacctgactccagcaccagccgtgtcatccaccaagggacgcgctatgtccctgtccgatgccctgaagggtgtcaccgacaatgtcgtcgatactgtggtgcactacgtacctctccctcgactgtcactcatggaacccgaaagcgaattccgggacattgacaatccccctgccgaagtggaacgcagggaggcggaacggagagctagtggggctccctcagccggacccgaaccagctcccaggttagcacagccacgacgaagtctcagatccgcccaatctcccggagcgccaccgggacccggactggaggacgaagtggcaacccccgcagccccaaggcctggctttccagcggtgcctagggaaaaaccaaagagaagggtgtccgacagctttttcaggccgtctgtgatggagcctattcttggcaggactcattacagtcagctgagaaaaaaatcatag

SEQ ID NO: 234338 - DNA, 1569 bp, synthetic construct
  misc_feature 1..1569: note = Description of Artificial Sequence: Synthetic coding sequence
  source 1..1569: mol_type = other DNA
atggcagtgaataaagggcttacactcctagacggcgatctccccgagcaggaaaatgttttgcagcgggttctgcagcttccagtggtgagcggaacgtgtgagtgttttcagaaaacctatacttctactaaggaggctcaccccctcgttgcgtctgtttgtaatgcctacgaaaaaggcgttcagagcgcctcaagtctggctgcttggtcaatggagcctgtcgtgagacgcctgagtacccagttcaccgctgccaatgaactcgcctgtcgtgggctggatcacctagaggaaaaaattcctgcacttcaataccccccagaaaagattgcaagcgaacttaaagacacaatcagcaccagactgcgcagtgctcggaatagcatttccgtccctatcgcaagcactagcgacaaggtccttggtgcggcactggccggatgtgaactcgcatggggagtcgctcgggatacagccgaattcgccgcaaacaccagagcaggcaggttagcttcgggcggtgctgacctcgctctgggcagtattgaaaaagtggtcgaatatcttctgccccctgataaggaggagtcggccccagccccaggacaccagcaggcacagaaatcacccaaggccaagcccagcttgctgagtcgtgtgggggcactaacaaacaccttgtcacgatataccgtgcagaccatggctagagctttggaacaggggcacaccgtcgccatgtggatacctggggtggtgcctctcagctctctggcccagtggggtgcttcggtggccatgcaggccgtgtctcgcaggcgaagtgaagttcgtgtcccttggctgcacagcctggcagccgctcaggaggaggaccatgaggaccagactgacacagagggagaggacacggaggaggaggaggaacttgagacggaggagaacaaattctcagaagtggccgcattaccaggacctagggggctgcttgggggagtcgcccacacactccaaaagactctccaaaccacgatctccgccgttacttgggccccagccgctgtgctaggcatggccggtcgtgttcttcaccttacccctgctcctgccgtatcatcaacaaaaggaagagcaatgtccctcagcgatgccctaaagggtgtaaccgacaatgtggtagacaccgtggtgcactacgtgcccctgccccgactgtctctcatggaacccgagtcagagtttcgggacatcgacaatcctcctgcagaagtggaaagaagagaagccgagcggcgtgctagcggcgctccatctgccggaccggagcccgctccgaggttagcacagcccaggcgctcccttaggtccgcacaatctcctggagccccacctgggcctggcctggaagacgaggtcgccaccccggctgctcctcgtccaggcttccctgcagtgccgagggaaaaacctaaacggagagtttcagacagtttttttcggccatctgtcatggaaccaattctgggcaggactcattactcacagctccggaagaaatcctag

SEQ ID NO: 234339 - DNA, 1314 bp, synthetic construct
  misc_feature 1..1314: note = Description of Artificial Sequence: Synthetic coding sequence
  source 1..1314: mol_type = other DNA
atggcctccgttgcagtagatccacagccaagtgtggtcacacgagttgtgaatctgcctcttgtgagctccacctatgacctgatgtcctcagcctatctgagtaccaaggaccagtacccctatctgaaatcagtgtgtgagatggcggagaatggcgtaaaaaccatcacgtcagtggccatgaccagcgcgctgcccatcatccagaaactggaaccgcagatcgccgtggctaatacctacgcatgtaaagggctggatagaatcgaagagcgactgcctatcctcaatcagccatctacccagatcgtggctaatgccaagggggcagtgacgggcgctaaagacgctgtgaccacaaccgttaccggggcaaaggattccgtagcttccacaattaccggggttatggataaaaccaaaggagccgtgaccggctctgttgaaaaaacaaaaagcgtcgtttctggcagcattaatacagtgcttggatctaggatgatgcagctcgtttcttccggcgtggaaaatgcgttgacaaaaagtgaacttctggtcgaacagtatctgccactcacagaagaagagctggaaaaggaagccaagaaggtggaaggatttgatctcgtgcaaaaacccagctactatgtgcggctgggctcattatctaccaagctgcactcaagagcgtatcagcaggccctcagccgtgttaaagaggcgaagcagaagagccagcagacgatttctcaactgcattctaccgtgcacctgattgaatttgccagaaagaacgtgtactccgccaatcaaaaaattcaggacgcacaggacaagttgtatctgtcttgggtggaatggaagaggagtataggttatgacgatacggatgaaagccattgtgcagaacacatcgaatccaggacccttgctattgcacgcaaccttactcagcagctccagaccacgtgtcataccttgctgtcaaacattcagggagtacctcagaatatccaggatcaggccaaacatatgggggttatggctggagatatttactcagtcttcagaaatgcggctagttttaaagaagtgtctgacagtttgttgacgtcaagcaagggccaactccagaagatgaaggagtcccttgatgatgttatggattatctggtgaacaatactcccctaaactggttggtagggcctttttaccctcagctgacagagagccagaacgcccaggatcaaggagccgaaatggataagtctagccaggaaacccaacggtcggagcataagacacattag

SEQ ID NO: 234340 - DNA, 333 bp, synthetic construct
  misc_feature 1..333: note = Description of Artificial Sequence: Synthetic coding sequence
  source 1..333: mol_type = other DNA
atggcctccgttgctgtggatcctcagccttcagtagtgacacgcgttgtgaatcttccccttgtttccagcacctacgacctgatgtctagcgcctatctgtccacaaaagatcagtatccatatctgaaatccgtatgtgaaatggctgagaatggcgtcaaaaccattacctcggttgcgatgacttctgcgctgccgatcatccaaaagctggagccccagatagccgttgcgaatacgtacgcatgtaagggtctggatcgcatcgaagagcgcctccctatcctgaaccaaccatcaacccaagtttccctgggacagaagtgttag

SEQ ID NO: 234341 - DNA, 381 bp, synthetic construct
  misc_feature 1..381: note = Description of Artificial Sequence: Synthetic coding sequence
  source 1..381: mol_type = other DNA
atggcaagtgtcgccgttgacccccagccctccgtcgttacccgcgtggtgaatcttcccttggtgtctagcacgtatgaccttatgtcttccgcgtatttgagcactaaggatcaatatccatatctgaaatcagtctgtgaaatggctgaaaatggagtgaaaacgattacctccgtcgccatgaccagtgccttgcctataatccaaaagctggagcctcagatcgccgtggcaaacacatatgcctgcaagggactggatcgaatcgaggaaaggcttccaatccttaatcagccaagcactcaggccaacacttgttttccaaatttggatctggacgtctgcctcaagaacaatggacacttcctgacaagttag

SEQ ID NO: 234342 - DNA, 1071 bp, synthetic construct
  misc_feature 1..1071: note = Description of Artificial Sequence: Synthetic coding sequence
  source 1..1071: mol_type = other DNA
atggctagtgttgcggtggatcctcagccaagcgtggttacacgcgtggtgaatctccctttagtgtccagcacctacgatctaatgtcttctgcctacttgagcactaaggaccagtacccttatctaaaatcagtgtgtgaaatggccgagaatggtgttaaaacgattaccagcgtggctatgaccagcgctctgcccatcatccagaaactggagccccagatagcagtggccaatacgtacgcttgtaagggcctggaccgcattgaggaacgtcttcctatcttgaaccagccaagtacccagatcgtggcaaacgcgaaaggcgctgtcacaggtgcaaaggacgctgtgactacaacggtgacaggcgctaaggacagtgtcgcttcaacaataaccggtgtgatggataagaccaaaggcgctgtcaccggaagcgtcgaaaagacaaagagcgtcaagaaaaagcagaaaaagctgaaggacctgatctggttccggtcccaactgcactccacggtgcacctaattgagtttgcaagaaagaacgtgtattcagctaaccagaagattcaggatgcacaagacaaattatacttatcttgggtcgagtggaaaagaagcatcggttacgatgatacagatgagagccactgtgccgaacatattgaaagccggacattggccattgcacgtaatctcactcagcagcttcagaccacatgccacacgttactgagcaatatccagggcgtcccgcaaaacattcaggaccaagctaaacatatgggagtaatggccggagacatatactctgtcttcaggaacgctgctagcttcaaggaggtgtcggattcccttctaacctcatccaaaggccagcttcagaagatgaaggagtccctcgatgacgttatggattacctcgttaataatacgcccctaaactggctggtggggcctttctatccacaactcacagaatcccagaacgcccaggaccaaggcgcagagatggacaagtctagtcaggagacgcagcgcagcgagcataagacccattag

SEQ ID NO: 234343 - DNA, 378 bp, synthetic construct
  misc_feature 1..378: note = Description of Artificial Sequence: Synthetic coding sequence
  source 1..378: mol_type = other DNA
atggcttcggtcgcagtggatccccagccctcagtggtaactagggtagtgaatctcccactcgtgagctccacctatgacctaatgtctagcgcatatctgtccaccaaggaccagtacccatacctgaagagcgtttgcgaaatggccgaaaacggcgtcaaaaccattacgtcggtggctatgacctccgccttgcctatcatacagaaactcgagcctcagatcgctgtcgccaatacatatgcctgtaagggtctggacagaatcgaagaacggctcccaattctaaatcaacccagcacacagatagttgctaatgctaagggtgccgtcaccggcgctaaagacgccgttaccacaactgtgaccgggtag

SEQ ID NO: 234344 - DNA, 735 bp, synthetic construct
  misc_feature 1..735: note = Description of Artificial Sequence: Synthetic coding sequence
  source 1..735: mol_type = other DNA
atgggtccaccttcggcggctccgagaggtggccaccgtccgtggcagggactgctgatcaccgcttcattactgaccttttggcaccctcccaccaccgtccagttcacgattgaagcccttccttcaagcgccgctgagggcaaagatgtattgctgctggcgtgtaacatttctgagacgattcaggcgtactattggcacaagggaaagacagctgagggcagccctctcatcgcaggctacatcacagacatccaagccaatataccgggagcagcttacagtggcagggaaaccgtataccccaatgggtcactcctgttccaaaatatcacactggaggatgctgggtcatacacacttcggactataaatgcctcatacgactctgaccaggcgacaggacagctgcatgtgcaccagaataatgtgcccggtcttcccgttggcgcagtggcaggaatcgtgactggagtgctggtgggagtggccctggtggcagcgctggtctgcttcctgttgctgtcgagaaccggacgcgctagcatccagagagatctgagagaacaaccaccccctgccagtacacccggtcacggaccatcccaccggtctacattctccgctccactgccgagtccacggaccgccacacctatctacgaagagctgctgtattctgatgcaaacatttactgccagattgaccacaaagctgacgttgtgtcatag

SEQ ID NO: 234345 - DNA, 1269 bp, synthetic construct
  misc_feature 1..1269: note = Description of Artificial Sequence: Synthetic coding sequence
  source 1..1269: mol_type = other DNA
atgagcgccgatggagctgaggcggatggatcaacccaggtgactgtggaggaacccgtacagcagccttcagtagtcgaccgggtggccagtatgccgctgatttcatctacctgtgatatggtgtcggctgcctacgccagcacaaaggaaagttaccctcatataaaaactgtgtgcgacgctgccgagaagggggtgaggacccttactgctgctgctgtgtccggtgcccagcctatcctatctaaattggagccccaaatcgctagtgcctctgaatatgcacaccgtggacttgacaagttagaagagaacttacccatattgcagcagcctaccgagaaagtgtcaggcgcacaggagatggtgtctagtgcgaaggacactgtcgccacacagctcagtgaagcagtcgacgccactcggggtgctgtgcagtccggagtcgataaaaccaaaagtgtggtcactggaggagtccagtccgtgatggggagcagactgggccagatggtgctgtcaggggtggacaccgtgctgggtaaatccgaagaatgggctgataatcaccttcctctgaccgacgcagagttggctaggatcgccacctctctcgacggtttcgacgtggcaagtgtccagcagcaacggcaggaacaaagttactttgtcaggctgggcagtctgagcgagcggttgagacagcatgcatatgagcattcactcggaaagctgagagcaaccaagcagcgagcccaggaagctcttctgcagctgagtcaggtcctttccctgatggagactgtgaaacaaggggtcgaccagaagctcgtcgaggggcaggagaagctgcaccaaatgtggctgagttggaaccagaaacaactgcagggcccagagaaggaaccacctaagccagaacaagtagagtcgagagctctgaccatgttccgagatatcgctcagcagctgcaggcgacgtgcacgtctctggggtctagcatccaaggccttcctacgaatgtaaaggaccaggtccaacaggccagaagacaggtggaggatctacaggcaacgttctctagtatccattccttccaggacctgagctcttctattctggcgcagagccgagagcgtgttgcctccgctcgagaagctctggaccacatggttgagtatgttgcgcagaatacgcctgttacatggctggtcggcccttttgcccctggaatcaccgagaaagcccctgaggaaaagaagtag

SEQ ID NO: 234346 - DNA, 1392 bp, synthetic construct
  misc_feature 1..1392: note = Description of Artificial Sequence: Synthetic coding sequence
  source 1..1392: mol_type = other DNA
atgagcgaggaagaagccgctcagatcccacggtcatcagtgtgggagcaggaccagcagaacgttgtgcagcgagtcgtcgccctccctctggttcgagccacttgcaccgcagtgtgtgacgtgtatagcgccgctaaggaccgccaccccttgcttggatcagcctgccgcctcgcagagaactgcgtatgtggactgacaaccagagctctggatcatgctcagcccttgctcgagcacctccagccacagctggctacgatgaactcactggcctgtcggggactggacaaacttgaggaaaagctgccctttttacagcagccgtcagagactgtggttacctccgccaaggatgtggtggcatcttctgtaactggcgtggtggatttggctcgcagagggcgtcggtggtctgtggagctcaaacgttccgtctcacacgctgtagacgtcgttttggagaagagtgaggagctggttgatcactttctacctatgacagaggaggagctcgccgctctggcagctgaagctgagggccctgaagtaggcagcgtggaagaccagagaagacagcagggctactttgtgaggcttggctccctcagtgccagaataaggcatctagcttacgagcactcagttggaaagctgagacagtccaagcacagagcacaagatacgttggcacaactacaggaaacactcgagttaattgatcacatgcagtgcggcgtaacccccacggctcccgcttgccccggaaaggtgcacgaactgtggggggaatggggtcagaggccacctgaatctcggaggcgcagtcaggcagaactggaaactctggtgctgtccaggagcttgacccaggagctccagggcacagtggaagcactggagtctagcgttcgcggactgccagccggagcccaggagaaggtcgccgaggtaagacgcagtgtggatgccctccagactgcctttgccgacgcaagatgctttagggacgtgcctgctgctgcactggccgagggcagaggaagagtcgctcacgctcacgcttgcgtggatgagttgctcgagcttgtcgttcaggccgtcccccttccttggctggttggccctttcgcaccaatactggtggaacgaccggagcctctgccagatcttgcagatctggtcgacgaggtgatcgggggtcccgatcctcgttgggcccacctcgactggcctgcccagcagagggcatgggaagcagaacatagggatggaagcggcaacggcgacggagatagaatgggcgtagccggagacatttgcgagcaggagcctgagacaccctcctgccctgtaaaacatactctcatgcctgagctcgatttctag

SEQ ID NO: 234347 - DNA, 3768 bp, synthetic construct
  misc_feature 1..3768: note = Description of Artificial Sequence: Synthetic coding sequence
  source 1..3768: mol_type = other DNA
atgaatgggtacgctgaattccccccaagcccaagtaaccccacaaaggagccagtggagccacagccctctcaggttcccttacaggaagatgtcgacatgtcaagcggatcttcaggacacgagaccaatgaaaattgttccactggaagagactcccaaggcagcgactgtgatgactccggaaaggagttgggaatgttggtggaaccaccagatgccaggcagagtcccgacacatttagtctgatgatggccaaatcggaacacaaccccagtacatccggctgtagcagcgaccaatctagtaaagtagacactcacaaggagctcattaagactcttaaagaactcaaggtgcatctgccagccgacaagaaggcaaaaggaaaggctagcaccctggcgactctgaaatacgctctccgctccgttaaacaggtcaaggcaaatgaagagtactatcagcttctgatgtcctccgagggacatccttgcggggctgacgtgccctcgtataccgttgaggaaatggagagtgtgacaagtgaacacattgtgaaaaatgcagacatgtttgcagtggctgtttcactggtatcaggaaaaatcctgtatatatccgaccaagtggcctctatcttccattgcaagcgcgacgccttttctgacgccaagtttgtggagtttctggcaccacatgacgtgggagtcttccacagttttacttctccctacaaactgcccctctggtctatgtgctctggggcagactcttttactcaggagtgcatggaggagaaaagctttttctgtagggtgtccgtgcgaaagagccacgaaaacgagattagataccatcctttccgaatgaccccctatttagtcaaagtgcgtgatcagcaaggcgcagaaagccagctctgttgtttgctactcgcagagcgcgtgcactccgggtatgaggcacccaggattcccccagagaagagaatttttactacgacacatactcccaactgcttattccaggatgttgacgagcgcgctgtgcctctgctaggctacctgccccaggatctaatcgagactcccgtcctcgttcagctccatccatcagacagaccactgatgctggccattcacaagaagattttgcaaagtggcggtcagccgtttgactactccccaattagattcagggccagaaatggagaatatatcactttggacacatcttggtcatcctttattaatccatggtctcggaaaatctccttcatcatcggtcggcataaggtccgcgtggggccactcaatgaggatgtttttgcagcccatccctgtaccgaggagaaagcacttcaccctagtatccaggagcttactgagcagattcacagacttcttctccagcctgtgccccactccggctcctcaggctacgggagcctgggctctaacggctcccacgagcacctcatgtcgcagacttccagctctgacagcaatggtcacgaggattcgcggcgtcggcgagctgagatctgcaagaacggcaacaaaaccaaaaatagaagccattacagccatgaatccggggagcaaaagaaaaagtctgtgacagaaatgcagacgaatccgcctgccgaaaagaaggctgtccctgccatggaaaaagattctctcggggtgtcattccctgaggaattggcttgcaagaaccagcctacgtgctcatatcagcaaatctcttgtttggatagtgtgatacggtacttggagtcatgtaacgaggccgcaaccttaaaaaggaaatgcgaattccccgctaatgtccccgcactgagatcctcagataagcggaaggccaccgtgagcccaggtcctcatgcaggagaagccgaaccaccctcccgagtgaattcaagaacaggcgtcgggacacatttgactagccttgcactccccggtaaagcggagtcagtggctagcctgacctcccagtgctcttacagttctaccatcgtacatgtcggcgataaaaaaccccaacccgaattagagatggtcgaggatgccgcttccggccctgagtcattggactgcctggccggacctgcccttgcctgcggtttatcgcaggagaaggagccattcaagaaactggggctcacaaaagaggtgctggctgcccacactcagaaagaagaacagagttttctgcagaaatttaaggagatccggaagctctccattttccagtcccattgtcattactacttacaagagagatcaaaaggccagccgtctgagaggaccgcccctgggctgcgcaacacgagtggtatcgacagcccctggaagaaaaccgggaagaacagaaaactcaaatcaaagcgggtgaagcccagggacagctcagaatcgaccggatccggtggcccagtgagcgcacggccaccccttgtggggctgaatgctaccgcttggtctccatccgatacttcacagtctagctgccctgccgtcccgttccccgcacccgttcccgcagcttactcccttcccgttttcccagcaccaggcacggttgcggctccaccagctcctcctcacgcttctttcactgtgcctgccgtgcctgtagatttgcagcaccaattcgctgtccagcccccaccttttccagctccactggctcctgtcatggcattcatgcttccctcctactcatttccgagcggcaccccaaacctgccacaagctttcttcccttctcaacctcagttccccagtcatcccactctcacgtcagagatggctagcgcgtctcagcccgagtttccaagcagaacttcaatcccccgtcagccctgtgcttgcccggcaaccagagccacaccaccttctgccatggggagagcgtcccccccactctttcaatctaggagtagtagccccttacagcttaacctgctccagttggaagaggctcccgaaggcggtaccggcgctatgggcaccacaggtgcaacggagactgccgcagtcggggctgactgcaagcctggaacgtctagggatcagcagcctaaagcaccactaaccagagatgaaccatcagacacccagaactcagacgccctgagcacgtcgtcaggccttttgaatttgctgctgaacgaggacctctgcagcgcttccggctcagcagctagcgaatcgctgggcagcggctccctgggatgcgatgcttctccatctggggcagggtcttcagataccagccatacctccaaatatttcggctccatcgattcctcagaaaacaaccataaggcaaagatgaatacgggtatggaggaatcggaacacttcataaaatgtgtcctacaggacccaatctggctcctgatggccgatgctgactcgagtgtaatgatgacatatcaattgccatctcgtaatttggaggctgtccttaaggaggaccgcgaaaaacttaagcttcttcaaaaacttcagccgaggttcacggagtcccagaagcaggagctccgggaggtgcatcaatggatgcagacaggtggactcccagcagcaatcgatgtcgccgaatgtgtctactgcgaaaacaaggaaaaagggaatatttgcattccttatgaggaggatattccgtccttgggcctgtctgaggtcagcgataccaaggaagatgagaatggttcaccacttaatcacagaatcgaagagcaaacatag

SEQ ID NO: 234348 - DNA, 1215 bp, synthetic construct
  misc_feature 1..1215: note = Description of Artificial Sequence: Synthetic coding sequence
  source 1..1215: mol_type = other DNA
atgaacggctacgcagaattcccgccatcccccagtaatccaaccaaagagccagtggagccccagcctagccaggtgcctctgcaggaagacgtcgatatgtccagtggctcctccggacacgagacaaacgaaaactgctcaaccggcagggattctcagggcagtgactgcgacgactccggtaaggaactgggaatgttagttgagcctccagatgcaagacagagtcctgacacattcagcctgatgatggccaaatctgaacataacccatcaacctcgggctgcagcagcgaccaatcgtccaaggtggacacgcataaggaactcattaagaccctgaaggaattgaaggtgcatctacctgctgacaaaaaagctaaaggaaaggcctctactctggccacactgaagtatgcccttcgctctgtgaaacaagttaaggctaatgaggagtattaccagcttctgatgtcgagcgaaggacatccctgtggcgcagatgtcccctcttacaccgtggaggaaatggagagtgtcacaagtgagcatattgtcaaaaacgcagacatgttcgccgtggccgtttctctggtgtccgggaaaatcttatacatctccgaccaggtggccagcatatttcactgtaagcgcgatgctttctcagacgctaaattcgttgagttcctggctcctcacgacgttggtgtcttccatagtttcacgagcccttataagctgcccttgtggtccatgtgctctggagccgactctttcacacaggaatgtatggaagagaaatcatttttctgtcgcgtgtccgtgcgcaagtcgcatgagaacgaaattcgctaccacccatttcggatgacaccgtatctggtcaaggtgagagaccaacagggcgctgaatctcaactgtgctgcctgctgttggcggagcgggtccactccggatatgaagcacccagaattccccctgagaagcgaatctttaccacaactcatacccccaattgtttatttcaggacgtcgatgagtcgcctgctgtgcgcagggctgcctttcggttgttttcacattctgtatcccgaccggagcgcagggttcatcacgtgggccaccagctcgtccagttgcaccaaccaatggagcaagagaacttgctccatcactgggaggcccagtcccagggcggaccgttcgaatag

SEQ ID NO: 234349 - DNA, 1215 bp, synthetic construct
  misc_feature 1..1215: note = Description of Artificial Sequence: Synthetic coding sequence
  source 1..1215: mol_type = other DNA
atgaatggatatgccgagttcccacctagtcccagcaatccaaccaaggagcccgtggaaccgcagccatcgcaggtgccccttcaggaagatgtggatatgtcatctggatcttctgggcatgaaacaaatgagaattgcagtacgggacgtgactctcagggatctgactgtgatgattctggtaaggaattaggtatgttagtggagcccccagacgcccgtcaatccccagacacatttagcttgatgatggccaaaagcgaacacaacccttccacctcgggatgcagttccgaccagagctctaaggtagacactcacaaggaacttattaaaaccctcaaggagctcaaggtccatctgcctgcagacaagaaggctaaaggaaaggcaagcacactcgccacactgaaatatgcactgaggagtgtgaagcaggtcaaggcaaatgaggaatactaccagctgcttatgtctagcgaaggccatccctgtggagcagacgtacctagctacacagtggaggagatggaaagcgtcacaagtgaacatattgtgaagaacgcagatatgtttgctgtggctgtgtcactggtgtcagggaaaattctgtacatctccgaccaggttgcgtctatatttcattgcaaacgcgacgcattcagcgacgccaaatttgtggagttcctggcaccacatgatgtgggcgttttccactcattcacctccccatacaagttacccctttggagtatgtgttctggtgcagatagtttcacacaggaatgcatggaagaaaaatcattcttctgtcgggtgagcgttaggaaatcccatgagaacgaaatccgataccatccttttcgcatgacaccctatctcgtgaaggtacgagaccagcaaggggctgaatcccagctctgctgtcttctgttagccgagcgcgtccactccggttatgaggcacctcggatccccccagagaagaggatcttcacgacaacccacacacctaattgtctgtttcaggatgtggatgagagccccgctgtgagaagagctgcctttcggctgtttagccactcggtgtcacgacccgagcgccgtgtccaccacgtgggacaccagctcgtacagttgcaccaaccaatggagcaagaaaacctgctgcatcactgggaggctcagtcccagggcggacccttcgagtag

SEQ ID NO: 234350 - DNA, 330 bp, synthetic construct
  misc_feature 1..330: note = Description of Artificial Sequence: Synthetic coding sequence
  source 1..330: mol_type = other DNA
atgaatggctatgccgaatttccccctagtccaagcaaccccaccaaagagcctgtcgagccccagccctctcaggtccctctgcaggaggacgttgacatgagcagcggtagcagtgggcatgaaacgaacgaaaactgttcaactggacgggactcacaggggtctgattgcgatgattcaggcaaagaactgggaatgctcgttgagccccctgatgctcggcaatcccctgataccttttccttaatgatggccaagtcagagcacaatccgtctacaagtggatgtagttccgaccagtccagcaaagtagatacccacaaatag

SEQ ID NO: 234351 - DNA, 1452 bp, synthetic construct
  misc_feature 1..1452: note = Description of Artificial Sequence: Synthetic coding sequence
  source 1..1452: mol_type = other DNA
atgaatggctatgccgagttcccacctagcccaagtaaccctactaaggagcctgtcgagccccagcccagccaagtccccctacaggaggatgtggatatgtcttctggttcctcaggccatgagaccaatgagaactgttccacaggccgtgattctcaaggtagtgattgtgacgatagcggtaaggagttagggatgctagtggaaccacctgatgctcggcagagtccagacaccttttcgttgatgatggccaaaagcgagcacaatccttccacgtctggctgctcaagtgaccaaagctctaaagtcgacacacacaaagaactgattaaaaccctgaaagaacttaaggtgcacctgccggcagataagaaagccaaaggaaaagcctctacactcgctacacttaaatatgctttgcggagtgtgaagcaggtcaaggcgaatgaggagtattatcagcttctcatgagcagcgaagggcacccatgtggggctgacgtgcctagctataccgttgaggagatggaatccgtaacttcggaacacatcgttaaaaacgccgatatgttcgctgttgcagtttcgttagtatccggaaagatcctgtatatcagcgatcaggtagcctcaattttccactgcaaaagggatgctttctccgacgctaagttcgtggagttcctggcaccccacgatgtcggggtgtttcactcattcaccagtccctataagctgcccctttggtcgatgtgctccggagccgactcctttacacaggagtgcatggaggagaaatcattcttctgtagggtgtctgtgaggaagagccatgaaaacgagatcagatatcatcccttcagaatgacaccgtaccttgtcaaggtccgcgaccagcagggagccgagtcccagctgtgttgtctcttattggctgagagagttcattctgggtatgaggctccacgaatcccacccgaaaagcgtatttttacaacaacacacactccgaattgtctgttccaggatgtggacgagcgggcagtgccattactgggctatctgccacaggatctgatcgagaccccagtgctagtacagctgcatccttcagaccgcccacttatgcttgccattcacaagaagatccttcagtccggaggacagccgttcgactatagccccatacgatttcgagcaaggaacggagagtatattaccttggatacaagttggagctctttcattaatccgtggtcccgcaagatctcatttataattggccgtcacaaggtccgcgtgggccctctgaacgaggacgtgtttgctgcgcatccttgtactgaggagaaggcccttcacccttctatacaggagttaactgaacagatccacagactgttactgcaggtgggagtcgtgcccgcttgccctcctcccagatag

SEQ ID NO: 234352 - DNA, 2340 bp, synthetic construct
  misc_feature 1..2340: note = Description of Artificial Sequence: Synthetic coding sequence
  source 1..2340: mol_type = other DNA
atgattcccttcttgcctatgttctccctcttacttctactcatcgtgaatccaattaatgccaacaaccattatgataagatcctggctcattcccgaatccgcggtcgcgatcagggccctaacgtatgcgcgctgcaacagattttgggcactaagaaaaagtatttctcaacatgtaagaactggtataagaagtctatttgcggtcagaaaaccaccgttctgtacgagtgctgtcccggttacatgagaatggaggggatgaagggatgtcccgctgttctgcccattgatcatgtttatggcactcttggaattgtgggggcaaccacaactcaacggtattctgatgcctccaagctcagagaggaaatcgagggtaaggggagcttcacttacttcgctcccagcaacgaggcttgggacaacctggactctgatatccgccgtgggttagaatccaacgtgaatgtcgaactcctgaacgcactccattctcacatgatcaacaagaggatgctgactaaggatcttaagaacgggatgattatccctagcatgtacaacaatctggggttgttcataaatcactatcctaacggagtggtcaccgtcaactgtgctcggataatccatggaaatcagatcgcgacgaatggcgttgttcacgtgatcgatagagtgttgacccaaattggcacctccattcaggattttatcgaagcggaggacgatctctcttccttccgggcagcagccatcacatccgatatacttgaagcccttgggagagatggccactttacacttttcgcacccacaaatgaagcctttgagaaacttccaaggggtgtcctggaaagaatcatgggtgataaagtggccagcgaggccctgatgaagtatcatattctaaacactttacagtgttcagagtccatcatgggtggcgctgtgtttgagacactagaaggtaacactatcgagattggctgcgacggcgactctattaccgtgaacggcatcaaaatggttaacaaaaaggatatcgtgacaaataacggagttatacatctcatagatcaggtactgatccccgacagcgccaagcaggtcatcgaattggccggaaagcagcaaaccacatttacagatcttgtggcccaactgggccttgccagcgccctgagacccgatggggaatatacccttcttgcccctgtaaataatgctttttcagatgacactctttccatggatcaaagactcctgaagttgatcctgcagaatcatatccttaaagtgaaggttggactcaatgagctatacaacggacaaatactggaaacgatcgggggaaaacagctgagggtatttgtttatagaaccgctgtgtgtatcgagaattcgtgcatggaaaaaggctcaaaacaaggaagaaatggcgctatccatatttttagggaaataattaaaccggctgaaaagtctctgcacgagaagctcaaacaagacaagcgcttcagtaccttcctgtcactgctggaggctgccgatctcaaagagctgctgacgcagcctggcgattggaccctgtttgtgcccacaaacgacgccttcaaagggatgacttcagaagagaaagagatccttatccgagataaaaacgctctccagaacatcatcttataccacttaaccccaggggtgttcattgggaaagggttcgagcctggagtgacaaacatactgaagaccactcagggttccaaaattttcctgaaggaagtgaatgatactctgttggtgaatgagctgaaaagtaaggagagtgacatcatgacgactaacggcgtaatccatgtggtggacaagctcctgtacccagcggacacgccagttggcaacgatcagctgctggaaattctgaacaaactcatcaaatatatccagatcaaatttgtacgcggaagcacattcaaagagatcccagtgaccgtttataaaccaatcattaagaaatacaccaaaattatcgacggggtcccggtggagatcacagagaaggagactagggaagagaggattatcacgggcccagaaataaagtacactcgtatatctacaggcggtggggaaacagaagagactctcaagaaattattacaggaggaggttactaaagtgactaagtttatcgagggaggagacggacacctattcgaagatgaagagataaagcggctgttacagggcgatactcccgtgcggaagctgcaggccaacaagaaggtgcagggttcacggcgacggctccgcgaaggccgtagccaatag

SEQ ID NO: 234353 - DNA, 2430 bp, synthetic construct
  misc_feature 1..2430: note = Description of Artificial Sequence: Synthetic coding sequence
  source 1..2430: mol_type = other DNA
atgatcccctttctacccatgttcagccttctattgctgctgatcgtgaatccgatcaatgccaataatcactatgataaaatcctcgcccattccagaattcgagggcgtgaccagggtcccaatgtgtgcgccctccagcagatcctaggaacaaagaagaaatacttctctacttgtaagaactggtataaaaagagcatctgcggccaaaagaccactgtcctatatgaatgctgccccggatatatgagaatggaggggatgaagggttgccctgccgttttacctatcgatcatgtgtacggcaccttaggcatcgtgggggctacaaccacccagagatattcagacgcatccaaactacgtgaggagatcgagggaaagggtagcttcacgtactttgcaccaagtaacgaggcttgggataatctggatagtgatattagacgcggactggaaagcaatgtaaatgtggagctactgaacgcactgcactctcacatgatcaacaagaggatgctgaccaaggacctcaagaatggcatgattataccctccatgtataacaacctggggctgttcataaatcactatccaaacggggttgtcaccgtgaactgtgcacgaattattcacggcaaccagatagccacgaatggggttgttcacgttattgatcgcgtgctgacacagatcggtacctctatccaggatttcattgaggccgaggacgatcttagcagcttcagggccgctgctataacatccgatatccttgaggccctagggagagacggtcatttcactcttttcgcaccaactaatgaggcctttgagaaattgccacggggagtgctggagaggataatgggtgacaaggttgcatcggaagctctcatgaaataccatattcttaatacccttcagtgtagcgagtccatcatgggtggcgctgtgtttgaaacccttgaggggaacactatcgaaatcggctgcgatggagactctattacagtgaatggaatcaaaatggtgaacaagaaggacatcgtcaccaacaacggcgtgatacaccttattgaccaagttttgattcccgactccgctaagcaggttatagaactggctggaaaacagcagaccactttcactgatctggttgctcaactggggttggcctcggccctcaggcccgatggtgagtacacactgctggcccctgtcaataacgctttctccgacgatacactgtccatggaccagaggctcttgaagttgatcttgcagaaccacatactaaaagtcaaggtgggcctgaacgaactgtacaatggccagattctggagacaatcggaggaaagcaactcagggtctttgtgtaccgcacagcagtctgtattgaaaacagctgtatggagaaagggagcaagcagggcaggaacggggcaattcatatcttccgcgaaatcataaagcctgcagagaagtctttacacgagaaactcaagcaggacaaaagattctctacatttctatcactcctagaagcagccgacctgaaggagcttttgactcaacctggagattggactttatttgtccctaccaatgacgcattcaaaggtatgacttccgaggaaaaggagatcctgataagggataagaatgcgctgcaaaacattatcctgtatcatctgaccccaggcgtctttattgggaaaggcttcgaacccggtgtcacaaatatcctcaaaactacccagggctcgaagatcttcctcaaagaagtcaacgacaccctgctcgtgaatgaactaaagtcaaaagagtccgacattatgacaacaaatggggtgatccacgtggtagacaagctcctgtacccggcagatactcccgtgggcaatgaccagctgctggagatcctgaacaagctcatcaaatacatccagattaagtttgtaagaggctcaacgttcaaagagatccccgtaactgtgtatcgccctacattaaccaaagtaaaaatagaaggagagccagaatttcgcttaataaaagagggcgagacaataactgaagtgatacacggagaacctatcatcaaaaagtacactaagatcattgatggtgtccctgttgagattaccgaaaaggaaacgcgtgaagagagaattataacagggccagagatcaagtacactcgtatcagtaccggagggggtgaaactgaagagacactaaaaaagctgctccaggaggaagtgacaaaagtgaccaagtttattgaaggcggagacgggcacctgttcgaagacgaagagatcaaacggctcctgcagggggacacccccgttagaaaactccaagctaacaagaaagtgcagggcagccgcaggcggttgcgggagggcagatcgcagtag

SEQ ID NO: 234354 - DNA, 2511 bp, synthetic construct
  misc_feature 1..2511: note = Description of Artificial Sequence: Synthetic coding sequence
  source 1..2511: mol_type = other DNA
atgattccatttctgcccatgttctctttgctcctgctgctgatcgtgaatcccatcaacgccaataaccattacgacaaaatactcgctcactcccgcattagaggcagagaccaaggcccaaacgtgtgcgctctgcagcaaatcctgggcaccaaaaaaaaatacttttccacatgcaaaaactggtacaagaaatcaatctgtggccaaaagacaactgtcctgtacgagtgttgccctggatacatgcggatggaagggatgaaaggctgccccgcagtcctgcccatcgaccatgtctatggcacgcttggtatcgtaggtgccaccacgacgcagcgatacagcgacgccagtaagctccgtgaggagattgaggggaagggctcgtttacctacttcgcaccttctaatgaggcttgggacaacctcgatagcgacatccgcaggggactcgaatccaacgtgaacgtggaactcctgaatgccctgcattcccacatgataaacaagagaatgctcactaaagacctcaaaaatggcatgatcatccctagcatgtacaacaatttgggcctattcataaatcattatcctaatggggtggtcaccgtgaactgtgctaggatcatccacgggaatcagatcgccaccaacggggtcgtacatgtgattgacagagtgctcacccaaatcggcactagcatccaagacttcattgaagcagaggacgatctcagcagcttccgcgcagctgcgatcacttccgacatcctggaggcgcttggaagagacgggcattttaccttgttcgctcccaccaatgaagctttcgaaaagctgccacgtggcgtgcttgagcgaataatgggcgataaagtggcttccgaagccctgatgaagtaccatatcctgaatactctccaatgctctgaatctatcatgggcggagcagtgtttgaaacgctggagggtaacaccattgagattggctgcgacggcgactcaataaccgtcaatggtatcaagatggtgaacaagaaagacatcgttacaaacaacggcgtgatccatttgatcgatcaagtgctgatccccgacagcgcgaagcaggtcattgagttggccggaaagcagcagaccacattcacagacctggtcgctcagttgggacttgctagcgcacttaggcccgatggagaatatacgttgcttgcaccagtgaacaatgctttctccgatgatacgctatctatggaccagcgactgcttaaactgattctccaaaaccacatactgaaggtgaaggtgggcctcaacgaactgtacaatggacaaattcttgaaaccattgggggaaagcagttgcgagtgttcgtgtaccgtacagccgtgtgcatcgaaaattcatgtatggagaagggatctaaacaggggcgaaatggtgccatccacatcttcagagagatcatcaagcccgcagagaagagccttcatgaaaaacttaaacaggataagcgcttctcgaccttcctgagcctattggaggcagctgaccttaaggagctattgacccagcctggagactggactcttttcgttcctacaaatgacgcctttaagggcatgactagcgaagagaaggaaatcctaatccgtgataaaaatgctctgcagaatatcattctgtaccacctcacaccaggagtgtttattgggaaagggttcgagcccggagtgaccaatattcttaagaccacacaaggaagcaaaatctttctaaaggaagtgaacgatactcttcttgtgaatgagctgaaaagtaaggagagtgacatcatgacgactaatggggtgattcatgtcgtcgacaaactactctatccagctgatacccccgtaggaaacgatcagttactcgaaatactcaacaagctgataaagtatattcagatcaagtttgtgcgtggcagtacatttaaagaaattccagtgacggtttacacgacgaaaataatcaccaaagtggtggaacccaagatcaaggtaatagaaggttccctgcagccaattattaaaacagaggggccaacgctgacaaaagttaaaattgaaggggaacctgaattccgcctaattaaggagggagaaaccatcaccgaggtgattcacggcgaacccatcatcaagaagtatactaaaataatcgatggagtgccagtggagataacggagaaggagacccgggaagagcggattataacaggacctgaaataaaatacacgcgtatctctacgggcggtggggagaccgaagagaccctaaaaaaactgttgcaggaggaggtcacaaaggtcacaaagtttattgaaggcggtgacgggcatctgtttgaggatgaggagatcaagaggttactacagggcgacacacccgtgaggaaacttcaagccaataagaaagtgcaaggatccagaaggcgactccgagagggtcgatcccaatag

SEQ ID NO: 234355 - DNA, 2427 bp, synthetic construct
  misc_feature 1..2427: note = Description of Artificial Sequence: Synthetic coding sequence
  source 1..2427: mol_type = other DNA
atgattccctttctgccaatgtttagcctcctcctgctgcttatcgtgaacccaattaacgccaacaaccactatgacaaaatccttgctcactccagaattagggggagggatcaagggccaaacgtgtgtgccttacagcagattttaggtacaaagaagaagtacttttctacatgcaaaaattggtataaaaagtccatctgcggccagaaaactaccgtgctttacgagtgttgccctgggtacatgaggatggaaggcatgaaggggtgtcccgctgtcctacctatcgaccacgtgtacggcaccctcggaatcgtgggtgcaactaccacccagcggtattcggacgctagcaaactaagagaagaaatcgagggaaagggaagtttcacttatttcgcaccatccaacgaggcatgggacaatttggatagcgatatccgacgcggtttagaaagcaacgtaaatgtggaattactgaacgcccttcatagccatatgatcaacaagcgtatgctgaccaaggatctcaaaaatggcatgatcattcccagcatgtataataacctagggctgttcatcaaccactatccgaatggggtggtgaccgtgaactgtgccaggataatccacgggaaccagatcgcaactaatggagtggttcacgttatcgatagagtcttaacccagatcggcacaagcatccaagattttatagaggccgaagacgatttgtcctccttcagggccgctgctatcacatccgatatcctcgaggctttaggccgtgacggccattttaccctgttcgcccctaccaacgaggcctttgaaaaactccctaggggcgttctggagcggatcatgggcgataaggtggctagcgaagcactcatgaaatatcacatcttaaatacccttcagtgttccgagtctattatggggggtgccgtgttcgaaacattagaaggcaacacaatcgaaatcgggtgtgacggtgatagtataaccgttaacggaattaagatggtaaacaagaaagacattgtgacgaacaacggcgtgatccatttgatcgaccaggtccttattccagattcagctaagcaggtgattgaactcgccggaaaacaacagaccacttttacagaccttgtggctcagctgggtttagcctccgcgcttagaccagacggcgaatacactctgctggctccagttaacaacgctttctcagatgacaccctgagcatggaccagagactgctgaaacttatcctgcagaatcacatcttgaaggtgaaagtgggcttaaacgaactatataacgggcagatcttagagacaatcggtggcaaacaactacgtgtctttgtctataggactgccgtctgtattgagaatagctgcatggagaagggttccaaacagggcaggaatggggctatacatatctttagggagatcattaagcctgcggagaaatcactccatgaaaaactgaagcaagacaaacgatttagcaccttcctgtctctgctcgaagcggctgacctcaaggagctgctaacccagccgggtgattggacactattcgtcccgacgaatgacgcgttcaaaggaatgaccagcgaagagaaagagattctgatcagagacaagaatgccctgcagaatattatcctgtatcatctgacccctggggtcttcataggcaaaggtttcgaacccggtgtgactaatatcctcaaaaccactcaagggtctaagatctttttgaaggaggtgaacgatactcttctggtgaacgaactcaaatccaaagaatcagacatcatgaccactaatggagtgattcacgttgtggataagctactgtatcctgcagacaccccagtgggaaatgaccagctgttagaaatactgaacaagctgattaaatacattcagatcaagtttgtgcgcggtagcacctttaaggaaatcccggtcactgtatacacaactaagattatcaccaaagtggttgagcctaaaattaaagtgattgagggcagcttgcaaccgatcataaaaaccgagggaccaactttgaccaaagtcaaaatcgagggtgagcctgagtttcggctgatcaaagagggggagacaatcactgaagtgatccacggcgagcccatcatcaaaaagtatactaagattatcgatggcgttccagtggaaatcacggagaaggaaactagagaagagcggataattacggggcctgagattaagtacacacggataagcactgggggtggcgaaacagaggagaccctaaagaaactccttcaggaagatacacccgtcaggaaactacaggctaacaagaaggtccaaggcagcagaaggaggctaagggaggggagatcacaatag

SEQ ID NO: 234356 - DNA, 834 bp, synthetic construct
  misc_feature 1..834: note = Description of Artificial Sequence: Synthetic coding sequence
  source 1..834: mol_type = other DNA
atgcggatggaagggatgaaaggctgcccagcggtgcttccaatagaccacgtatacggtaccctgggtatcgtcggcgctacaaccacccagcgatactccgacgcatcaaaacttcgggaagaaatcgagggaaaagggtccttcacctacttcgctccttccaacgaggcctgggacaacctggactcagatatcagaagaggcctggagagtaatgttaacgttgagctcctgaacgctctgcactcccatatgattaacaagcgcatgctgacgaaagatcttaagaatggcatgattattccctcaatgtataacaatctcggtcttttcataaaccattatccaaatggggtggttacagtcaactgtgcgagaattatccatggaaaccagattgccacaaatggtgtggtccatgtgatcgacagagtactcacacagataggtaccagcatccaggattttatcgaggcagaagacgacttaagctctttcagggccgcagccatcacatccgatatcctggaggctctagggagagacggacacttcactctgtttgcgccaactaatgaagcatttgagaagctgcccaggggggtgttagaaaggatcatgggagataaagtcgcgtcagaggccctgatgaaataccacatcctgaatacgctgcagtgcagtgaaagcattatgggcggagcagtgttcgaaactctggaaggtaataccatagagataggttgcgatggagactccatcacggtgaatggcattaaaatggtcaacaagaaggacatagtgactaattggtgtgacccatttgactag

SEQ ID NO: 234357 - DNA, 2346 bp, synthetic construct
  misc_feature 1..2346: note = Description of Artificial Sequence: Synthetic coding sequence
  source 1..2346: mol_type = other DNA
atgatccccttcctaccgatgtttagtctgctgctccttttgatcgtgaacccaatcaacgccaacaaccattacgataaaatcctcgcccacagcaggatcagaggtagggaccagggacctaatgtttgcgccctccagcaaatcttaggcaccaagaaaaagtatttcagtacatgcaaaaattggtataagaaaagcatttgcggacaaaagaccacagttctctacgaatgctgtcccggatacatgcggatggaagggatgaaggggtgtcctgcggtgcttccaatagaccacgtgtacggaacactcgggattgtcggggctactacaacacagaggtattctgacgcctcgaaactacgggaggagatcgaagggaaaggcagttttacgtatttcgccccttctaacgaagcatgggataatctcgactcagacatcagacgcggtctggaatcaaatgtgaacgtcgagctgctgaacgccctacattctcacatgattaacaagaggatgcttaccaaagacttgaagaatggaatgataattccctctatgtacaataatctcgggctcttcatcaatcactaccctaacggtgtagtgaccgtaaattgtgcacgcataatacacggtaatcagattgctacaaatggggtggtgcatgtgattgaccgagtgttgacccaaatagggacctccattcaagatttcatcgaagccgaagacgacttatcctcatttagagccgctgccataaccagcgacatcctggaggcattgggccgagatgggcatttcactctgtttgcgcctaccaatgaagccttcgagaaactgccacgcggagtgttggagcgaatcatgggcgataaagtggccagcgaagcactgatgaaatatcatatccttaacacccttcagtgctccgaaagtatcatgggaggagcagtgtttgagaccctagaaggcaatacaattgagattgggtgtgacggggactctatcacggtgaatggtatcaaaatggtaaataaaaaggatattgtgaccaacaatggcgttattcacctgatcgaccaggtgcttataccagatagtgcaaaacaagttatagagcttgcgggaaaacagcagactacatttaccgatttggtggcccagctcggtttggcatctgcattgaggcctgacggggaatatactctgctggccccagtgaacaacgctttctctgatgatactctgtccatggaccagcgcctgcttaaattaattctgcagaatcatatcttaaaagtcaaagtgggcctaaacgagctttacaacggccagattctagagaccatcggaggcaagcaactccgggtcttcgtctatcgcaccgccgtctgtattgagaactcctgcatggaaaaagggagtaaacaagggcgtaatggggcaatccacatcttcagagagattatcaaaccggctgagaaatctttgcatgaaaagttgaaacaagacaagcggttttcaacctttctttccctcctggaagccgctgacctgaaggaacttttgacacagcctggggactggacactatttgtgcccacaaacgatgcgtttaaaggtatgacttccgaagaaaaagagatcttaatcagggacaaaaacgcccttcagaacattatcctttaccacctgacccccggtgtgttcataggaaaaggcttcgaacctggagtcaccaatattttaaagactactcaggggtctaagatcttcttgaaggaggtaaatgatacccttcttgtgaacgagttgaaatccaaagagagtgatatcatgacaactaacggtgtgatccacgtggttgacaagctgctctaccccgctgacactcctgtcggaaacgaccagctgcttgagatcctcaacaaacttattaaatacattcaaatcaagtttgtgcggggatcgacctttaaggagatcccagttacagtctaccgacccactctgacaaaggttaaaattgaaggagaacccgagttcagattaattaaagaaggagagacaataacggaggtcatccatggagaacctatcattaagaagtacaccaaaatcatcgatggagtaccggtggagataacagagaaggagaccagggaagaaagaatcatcactggtcctgagatcaaatatacgcgaatatcaaccgggggaggggagacggaagaaacattgaagaagctactgcaggaagacacgcctgtcaggaaattgcaggctaacaaaaaggttcaaggttctcgcagacggctgagagaagggcgaagccagtag

SEQ ID NO: 234358 - DNA, 2250 bp, synthetic construct
  misc_feature 1..2250: note = Description of Artificial Sequence: Synthetic coding sequence
  source 1..2250: mol_type = other DNA
atgattccctttctccccatgttctcattgctgctgctccttatcgtgaacccaattaacgctaacaaccactacgataagatactcgctcatagtcgaatccgcggtagggaccagggtccaaatgtgtgcgcgctgcagcaaatcttgggcactaagaagaagtacttttccacttgtaaaaattggtataaaaagtcaatctgcggacagaaaaccaccgtcctgtacgaatgctgtcccggatacatgaggatggaagggatgaaggggtgccccgcagttttgccgattgatcatgtttacgggactctcggcattgtgggtgccacgacgacccagaggtacagcgatgcatccaagttgcgggaagagatagagggcaagggcagctttacctactttgcacccagtaatgaggcctgggataatctcgactctgatatcagacgagggctagaaagtaatgtaaatgttgaactactcaatgcactccacagccatatgatcaacaagaggatgctcactaaagatttaaaaaacggcatgatcatcccatctatgtataataatctcgggctgttcattaatcattaccctaacggggtagtaaccgtaaattgcgctcggataatacatggaaaccagatcgccaccaatggagtggtgcacgttatcgatagggtgctgacacagatcggtacttccattcaagacttcatcgaagccgaggatgatctttctagttttcgtgcggcagcaatcaccagtgacatattggaagcactgggccgtgatgggcactttaccctttttgctcctacgaacgaagctttcgaaaaactccccaggggcgtgttggaacggatcatgggagacaaagtcgcatccgaagcattgatgaagtaccacatccttaacacattgcaatgcagtgagagcataatgggtggagccgtatttgaaaccctcgagggaaatactatcgaaataggctgcgacggggacagcattactgtcaacggcataaagatggtgaacaagaaggatatagtcactaacaatggagtgatccatctaattgaccaggtgttgattcctgactccgccaaacaagtgattgaactcgcaggcaaacagcaaactacattcactgatctggtagctcaactcggcctcgcatcagctctgagacctgatggtgaatatacactactcgctccagtgaacaacgctttttccgatgatactcttagtatggatcagcgattactgaaactgattcttcaaaaccacatcctgaaagtgaaggtgggcctcaatgagttgtacaatggccagatcttagagaccattggtggaaagcaactacgtgtttttgtgtatcgaactgcagtgtgcattgaaaattcttgcatggaaaagggttctaaacagggccgtaacggggctatacatatctttcgggagataattaaacctgcagaaaagtcgctccacgagaaactcaagcaggataagcgattctccacttttttgtcattgttggaggctgcagatcttaaggagctgctcacacagccaggagactggacgcttttcgtccctacaaatgatgctttcaaggggatgacttcagaagagaaagagatcctcatccgagacaagaacgcactccaaaacattatattgtatcatctcacacctggcgtcttcattgggaaaggctttgaacctggggtaacaaatatactaaagacaactcaagggtccaagatcttcctcaaagaagtaaatgacactctgctggtgaatgagctcaagtcaaaagagtctgatatcatgactacgaatggggtcatccacgtggttgataagcttctatatcctgccgatacaccggtgggcaatgatcagttactcgaaattctgaacaagcttattaaatatattcagattaagtttgtaagagggagcacgttcaaagaaatccccgtgaccgtttatagccctgaaatcaaatacacccgtatctcgacagggggtggagaaaccgaggaaactctgaagaagctcctccaagaggaagtgacaaaggtaacgaaattcatcgagggaggcgatggccatctgttcgaggacgaagagataaaaaggctcctccagggcgacactcctgtgagaaagttgcaagcgaataaaaaggtacagggaagcaggcgcagactgcgagagggacgatcacaatag

SEQ ID NO: 234359 - DNA, 399 bp, synthetic construct
  misc_feature 1..399: note = Description of Artificial Sequence: Synthetic coding sequence
  source 1..399: mol_type = other DNA
atgtctaacaagttcctcggaacctggaaattggtgagctctgagaactttgacgattacatgaaggctctgggagtgggcctagccacacggaagctcgggaaccttgcaaagcccacggtgatcatctccaagaagggtgacatcatcacgatcaggactgaatctacgtttaagaacaccgagatctcctttaaactcggccaagagttcgaagaaaccaccgctgataatcgcaaaacgaaatccattgtgacactacagcggggaagtctcaaccaggtgcagaggtgggacgggaaggagactaccattaagcggaaattggtcaacgggaagatggttgccgaatgcaagatgaaaggagttgtgtgcacccgtatctatgaaaaagtttag

SEQ ID NO: 234360 - DNA, 483 bp, synthetic construct
  misc_feature 1..483: note = Description of Artificial Sequence: Synthetic coding sequence
  source 1..483: mol_type = other DNA
atgctccttctgctcctcagcattatcgtgctgcacgtcgcagtgctggtgcttctgtttgtgtcaaccatagtgtcccagtggatcgttggaaatggccacgccaccgatctgtggcagaactgcagcacgagctcttccgggaatgtgcaccactgcttctcctcgagccctaatgagtggcttcagtcagtgcaggcaacgatgatccttagtattatcttttctatcttgagcctgttcttgtttttttgtcagttgtttacgctcaccaagggaggcaggttctacataaccggcatctttcagatcctggccggactttgtgttatgagcgccgctgccatttacacagttagacaccccgagtggcatctgaattcagattatagctacgggttcgcatacattttggcgtgggttgcttttcccttagcgctgctgagcggagtcatctatgttattcttagaaagagggagtag

SEQ ID NO: 234361 - DNA, 357 bp, synthetic construct
  misc_feature 1..357: note = Description of Artificial Sequence: Synthetic coding sequence
  source 1..357: mol_type = other DNA
atgctattgctgttgctgtccattatcgttcttcacgtcgccgtgttggtcctgctctttgtttccaccatagtctctcagtggatcgtcggaaatggccacgcaacggacttgtggcaaaattgctctacaagttcgtcaggcaatgtgcatcactgcttctcatcctctcccaacgaatggctgcaatccgtgcaggcaaccatgatattgtccataatctttagtatcctgtctttattcctgttcttctgtcagctctttacgctcacaaagggtgggagattctatataacaggaatcttccaaatccttgctgaaagtaatagtagccagatgtgcgggtaccgggattag

SEQ ID NO: 234362 - DNA, 483 bp, synthetic construct
  misc_feature 1..483: note = Description of Artificial Sequence: Synthetic coding sequence
  source 1..483: mol_type = other DNA
atgcttctcctgctactcagtatcattgtcctgcacgtagctgtgttggtgttgttgttcgtgtctacaatcgttagccagtggattgtgggcaacggtcatgctacagacctgtggcagaattgcagtacatcaagtagcggaaatgtgcaccactgttttagctccagcccgaacgaatggttacagtccgtgcaggccactatgatcctgtcaattatctttagcatccttagcctgtttttgttcttctgccagctgtttactctgacaaaggggggtcgcttctatatcacaggtattttccagatcctcgctgggctgtgcgtgatgagcgccgctgcaatctacactgttagacacccagagtggcatctgaactctgactactcatacggcttcgcctacatcctggcctgggtcgcgttccctctggctctgctgtctggggtgatttatgttattcttaggaaaagggaatag

SEQ ID NO: 234363 - DNA, 450 bp, synthetic construct
  misc_feature 1..450: note = Description of Artificial Sequence: Synthetic coding sequence
  source 1..450: mol_type = other DNA
atgctgctactgctcctgagcattatagttcttcatgttgccgttctagtccttctgtttgtatctacaatcgtatcacagtggatcgtgggcaatggccacgcaactgatctgtggcagaattgttccacctcctcctccggtaatgttcatcactgttttagttcatcgccgaacgaatggctgcagagtgtgcaggccaccatgatactgtccattatcttcagcatcttaagcctcttcctatttttctgtcagttgttcaccctgactaaggggggacggttttacatcactggaattttccaaattttagccggactgtgcgtgatgtctgccgctgccatttacaccgtccgacaccccgaatggcatctgaattccgattacagttttccactggcgcttctttccggggttatctacgttattctccgaaaaagggaatag

SEQ ID NO: 234364 - DNA, 1413 bp, synthetic construct
  misc_feature 1..1413: note = Description of Artificial Sequence: Synthetic coding sequence
  source 1..1413: mol_type = other DNA
atgagccatcatccttccggcctccgagcgggattttcctccacctcctatcgaagaactttcggccctcccccttccctgagtcccggagccttctcatacagctccagttcccggtttagtagtagtaggctgctgggtagcgccagtccctcctcctctgtgagattaggcagtttccggagcccacgggctggcgcaggggcattattgcgcctgcctagcgagcgactcgacttctccatggccgaagctctgaatcaggagtttcttgcaacacggtctaacgagaagcaggagttacaagaactcaatgaccgttttgcaaatttcattgagaaggtgcggtttctggagcagcaaaacgcagcccttcgtggcgagctgtcacaggcccgtggccaggagccagcccgtgccgatcagctgtgtcagcaggaactgcgcgaactgcggagagaattagaactgcttggaagggagcgagaccgtgtacaagtcgagagggacggcttagcggaagatctggctgctctcaaacagcgcctcgaagaagagactcggaaaagagaagatgctgaacataatcttgtgctcttcagaaaggacgtggatgacgctacgcttagtcgcctggagctagagaggaaaattgaaagccttatggatgaaattgagtttctgaaaaaacttcacgaggaagagctgcgtgatctgcaggtgtctgtggaaagtcagcaggtgcagcaggttgaagttgaagctaccgtgaagcccgaactgaccgccgctctgagggacattagagcccaatatgagagcatcgcggctaaaaacttacaagaggccgaagaatggtataaatctaaatacgccgatttatctgatgcagcaaaccgcaaccatgaagcactgcggcaggccaaacaggagatgaacgaatctcgcaggcagatccagtctttgacatgcgaggtggatggcctgaggggcaccaacgaggctctcctccgtcagctgagggaacttgaggaacagtttgccctcgaggctggtgggtatcaagccggtgctgctcggctcgaggaggagctgcgccagcttaaagaagaaatggcccgacacctgcgcgagtaccaggagctcctgaacgtcaagatggccttggatattgagatcgccacgtatagaaaattactggaaggagaggagagccgaatcagtgttcccgttcactcctttgcctctcttaatataaagaccactgtacctgaggtggagccccctcaggacagccattcacgcaagaccgttctgataaagaccattgagacacgcaatggggaggtagtgacggagtctcagaaagagcagagaagcgagcttgacaagtccagcgctcattcctactag

SEQ ID NO: 234365 - DNA, 603 bp, synthetic construct
  misc_feature 1..603: note = Description of Artificial Sequence: Synthetic coding sequence
  source 1..603: mol_type = other DNA
atgggtcaagagttctcatgggaggaagctgaagcagccggagaaatcgatgtcgcagaactgcaggaatggtacaaaaagtttgtcatggagtgcccatctggcacactgttcatgcacgaatttaaacgtttctttaaggtgaccgacgatgaggaagctagccaatatgtagaggggatgttcagagcatttgacaagaacggggataacaccatcgactttctggagtacgtcgcagccctcaatcttgtgctcagggggaccctggagcacaagctgaaatggacatttaagatttacgataaggacggaaatggttgtatcgaccgactggagctgcttaacattgtcgagggaatttaccagctgaagaaagcctgcaggcgggagctgcagactgaacaggggcagctgctgaccccagaagaagtggttgatcggatattcttactggtggatgaaaacggagatggccaactctccctcaacgaatttgtggagggtgccagacgcgataagtgggtgatgaagatgctccagatggatatgaacccttccagctggctcgctcaacagcgacgaaaatcggccatgttttag

SEQ ID NO: 234366 - DNA, 1104 bp, synthetic construct
  misc_feature 1..1104: note = Description of Artificial Sequence: Synthetic coding sequence
  source 1..1104: mol_type = other DNA
atgtggtcagagggtagatatgagtatgagcggatcccacgggaaagagcaccgccaaggtctcacccaagtgatggctacaaccgtttggtgaatatagttccaaagaaaccacctctcctggatagacccggagagggctcttacaatcggtactactcccacgtggactaccgcgactacgatgaaggcagaagcttttctcatgataggaggtccggccctccccaccggggagatgagtctggatacaggtggacccgggatgatcatagtgcatcccgccagccggagtacagggatatgcgcgacggctttcgtcgcaagtccttctattcttcccattacgcgcgtgaaagatccccctataagagagacaatacattcttccgagaatcgccggttgggcgtaaggactctccccatagtaggtccggatcatccgtgtcctcccgcagctatagccccgagagatccaagagttattcatttcatcagtcacaacaccgaaagtccgtgcgtccaggggcaagttacaagagacagaacgaaggaaatcctgagagggacaaggaaaggcccgtgcaaagcttgaagacctctcgcgacacatcacccagctccggttcagccgtttcaagcagtaaggtgctagataaaccctcgaggctcacagagaaagaactggccgaggcagcaagtaagtgggccgcagagaagctggaaaagagcgatgagtccaatctccccgaaattagtgagtatgaggctgggtccaccgccccactctttaccgatcagcctgaggagcctgagtcaaatacaacccacgggatcgagctttttgaggattcccaactgaccacaagatccaaagcgattgcttcaaagacaaaggagattgagcaagtttaccgacaggactgtgagacttttgggatggtagttaagatgttgattgaaaaggacccgtccttagaaaagagtatccaatttgctctgcgacagaacctccacgaaatcggagagcgctgtgtcgaagaactgaagcatttcattgcagaatacgacacctctacccaggactttggcgaaccattctag

SEQ ID NO: 234367 - DNA, 1377 bp, synthetic construct
  misc_feature 1..1377: note = Description of Artificial Sequence: Synthetic coding sequence
  source 1..1377: mol_type = other DNA
atgtggagcgaaggccgatatgagtacgagcgtatccctagggagagggccccacccagatctcacccttccgatggctataatcgcctggttaacatcgtgcctaaaaagcctccattgcttgataggcccggagagggatcttacaatcggtactattcccatgtggattacagggattatgatgagggcagatcgttttctcacgataggaggagcggacctccccacagaggagacgagtccggctatcggtggactcgcgacgatcattctgcctcccgacaacccgagtatagggacatgcgtgatggctttcggcgtaagtccttttattcctctcattatgccagggaacgctcaccttataagcgggacaacactttttttcgagaatcacctgtcggaaggaaggatagtcctcattctcgcagcggctcaagtgtaagcagcaggtcatacagccccgagaggtcgaaaagctacagtttccaccagtcccagcaccgaaagtccgtccgaccaggggcttcgtataagaggcagaatgaaggaaaccctgagcgtgataaggaacggcctgtccaatctctgaagacatctagggacacttcaccgtcaagtggctccgccgttagttcttcaaaagtgttagacaagccttcaagactgactgagaaggagctggcagaggccgcaagcaagtgggccgcagagaaactcgaaaagagcgacgaaagcaatctgccagagattagcgaatacgaggcagggagcacagcaccgcttttcaccgatcagcccgaggaacccgagtctaataccactcacggcattgagctatttgaggacagccagttgacgaccagatcaaaagctattgccagcaaaactaaagaaattgaacaggtttacagacaggattgtgaaactttcggtatggttgttaagatgttgatagagaaagatccatctcttgagaaatcaatacagtttgcacttcggcagaatctgcacgagatcgagagcgctggccagacgtggcagcaggtcccgcctgtcagaaataccgagatggatcatgacggcactcccgagaatgaaggagaggaaactgcacaatcagcgcctcagccgcctcaggctccacagcccctccagccacgcaaaaagagggtgagacgaactacccagctgcggcgaaccaccggggctcccgatattacttggggcatgctgaaaaaaacaacgcaggaggcagaaaggatcctgttgcgtacccagactccgttcacccccgagaacttgttcctcgcaatgctctctgttgttcattgcaactctaggaaagacgttaaaccagaaaataagcagtag

SEQ ID NO: 234368 - DNA, 1125 bp, synthetic construct
  misc_feature 1..1125: note = Description of Artificial Sequence: Synthetic coding sequence
  source 1..1125: mol_type = other DNA
atggcataccggagggacgagatgtggagcgaggggcgatacgagtatgagagaatcccacgggaacgcgctcccccaaggtctcatcctagcgacggctacaatcgtctggtcaatattgtgcccaagaagcctcctctcctcgacaggccaggtgagggaagctacaacaggtattattcccacgtcgattaccgcgattacgatgagggcaggtcctttagtcatgatcggaggagtgggccaccgcatcgaggagatgaaagtgggtatagatggacccgggatgaccacagcgcctctcgccagcctgaatatagggacatgagagatggatttcggcgtaaatcattttatagctcccactacgcacgcgaaaggtctccttacaaacgcgacaacacattctttagggaaagcccagtgggcagaaaagattccccccatagtagatcaggaagcagtgtgtctagccgaagttactctcccgagaggagcaagtcctattcttttcatcagtctcaacaccggaagagcgttaggccaggcgcaagctataaaaggcagaatgaaggcaaccctgaacgcgataaagagcgtcccgtgcagagtctgaagacctccagggacacatcgccatctagcggcagtgccgtctcatctagcaaggtgctggacaagccaagcagacttaccgagaaggagctggcggaggctgccagtaagtgggctgcggagaaattggagaagtccgacgaatcaaacttgccagagatcagcgaatatgaggcgggatccaccgccccactgttcacggatcagccagaagaacctgagtccaatacaactcacgggatcgaactatttgaggactcacagctgaccacacgctcgaaggctattgcaagtaaaacgaaagagattgaacaggtctatcgccaggactgcgagactttcggcatggttgtgaagatgttaatagagaaagacccgtctctggaaaagagtatacagtttgctcttcgccagaacttgcacgagataggggagaggtgcgtggaagagctcaaacatttcattgcggaatatgacacctctactcaggattttggagaacctttttag

SEQ ID NO: 234369 - DNA, 1305 bp, synthetic construct
  misc_feature 1..1305: note = Description of Artificial Sequence: Synthetic coding sequence
  source 1..1305: mol_type = other DNA
atgtggagtgaaggacgctatgagtacgagaggattccgagggaaagagcacctccccgttctcacccctccgatgagagcggatacaggtggacccgcgatgatcacagcgcctcccgacagccggagtaccgggacatgcgcgacgggttccggaggaaaagtttctattccagccattatgctcgggagagaagcccctataagcgagataatacctttttccgcgagagccctgttgggagaaaggatagtcctcacagtagaagcggctcgtcagtgagctctagatcttactctcctgaaagaagcaagtcttacagctttcatcaaagccagcatcggaagagcgtacgaccaggagccagttacaagcgccagaacgagggcaacccagaaagagacaaagaacggccagtgcagagtctcaagacgtccagggacaccagccccagttccggatccgccgtatcttcaagcaaagtgctcgacaaacccagccgtctgactgaaaaggaactggccgaggccgctagtaaatgggctgccgagaaactcgaaaaatcggatgagtcaaacctacctgagattagcgagtacgaagccggaagcaccgccccacttttcacagatcaaccagaagagcctgagagcaataccacccatggtatagagctctttgaagatagtcagcttactacgcggtccaaggctatcgccagtaagaccaaggagattgaacaggtttaccgtcaggactgtgagacattcgggatggtggttaaaatgctcattgagaaggatccctctctggaaaagagtatccagttcgccctgaggcagaacctgcatgaaatcgagagtgcagggcagacctggcagcaagtgccccctgttcggaataccgagatggatcacgatgggacgccagagaatgaaggcgaggagactgctcagagtgccttatttggctttcagcacgatgctagcaatcatactattgtggggcttggtcctaaccaggtgcctgagatgaaggagaccactcttcaagcaccacagcccccacaagcacctcagcctttgcagcctcggaaaaagagggtacgcaggactacccagcttcgtcggaccacgggagcaccggacattacctggggaatgctcaagaagactacacaggaggcagagcgcatcctgctgcgaactcagacacccttcacccccgagaacctattcctagcaatgcttagcgtggttcactgcaattctcggaaggacgttaaaccagagaataagcagtag

SEQ ID NO: 234370 - DNA, 1047 bp, synthetic construct
  misc_feature 1..1047: note = Description of Artificial Sequence: Synthetic coding sequence
  source 1..1047: mol_type = other DNA
atgtggagcgagggcaggtacgagtacgaacgaattcctcgcgagagggcccctccccgatctcaccccagcgacggatacaacagactcgtgaatattgtacctaaaaagccgcctttgctggaccgcccaggcgagggtagctacaacaggtactactcgcatgtagattaccgcgactacgacgaaggacgtagcttcagccatgaccggcgttctggaccaccgcaccgaggggatgagagcggctataggtggacgcgggacgatcactccgctagtcgtcaacctgagtacagggacatgagggacggcttcagacgcaaaagcttttactcttctcattatgctcgcgagaggtccccttacaaaagagacaacacctttttccgcgagtcccctgtggggcgaaaggacagtccccatagcagatccgggagtagcgtgtcgagtcggagctacagccctgaacggtcaaaaagttattcattccatcagagtcaacatcggaacaaagagcgccctgtgcagtcactcaagacatcccgtgacacgtcaccttcttccgggagcgccgtgagcagcagcaaagtgctggataagccatccaggctgaccgagaaagagctggccgaagctgcctccaaatgggctgccgagaagctcgaaaagtctgatgagtccaacttgcctgaaatctctgagtacgaggccggtagtaccgccccactgttcacagaccagccggaggagccggagtctaacactacacacggcattgaattattcgaggattcgcagttaactacgcgctccaaggcaatcgctagcaaaaccaaagaaattgaacaagtgtaccggcaggactgtgagacatttggcatggtggttaaaatgctcattgaaaaagatccttcactggaaaaatcaatacagtttgctctaagacaaaatctgcacgaaatcggcgagcgttgtgttgaagagctgaaacactttatcgccgagtatgatacctccacgcaggactttggggagcctttctag

SEQ ID NO: 234371 - DNA, 486 bp, synthetic construct
  misc_feature 1..486: note = Description of Artificial Sequence: Synthetic coding sequence
  source 1..486: mol_type = other DNA
atggcctacagaagggatgaaatgtggtctgagggacggtatgagtacgaacgcatcccgagagagcgggctccccctaggtctcacccaagcgatggatacaacagattggtcaacattgtacccaaaaaaccaccgctgctggaccgccctggcgagggctcctataataggtattatagccacgtcgactaccgtgattacgatgaaggtcgttcattctcacatgaccgacgaagcggccctccccatcgcggtgatgaaagtggctatagatggacccgcgatgatcactccgcttcccggcagcccgagtaccgagatatgcgcgatgggttcaggcgaaagagcttctacagtagccattatgcacgggaacgcagcccgtacaagcgggacaataccttcttcagggagtcaccagtgggacgtaaggacagcccccatagtcggtctggatcaagcgtgtcctctcgcagctattag

SEQ ID NO: 234372 - DNA, 507 bp, synthetic construct
  misc_feature 1..507: note = Description of Artificial Sequence: Synthetic coding sequence
  source 1..507: mol_type = other DNA
atgtggtccgagggaagatatgaatacgagagaatcccgcgagagagggcgcctccgcgatcccacccttcggatggctataatagactggtgaacatcgtgccaaaaaagcccccactgcttgaccgacccggtgagggctcttataatagatattacagtcatgtcgattacagagactacgatgaaggccgaagtttttctcacgacaggaggagcggaccacctcaccgcggtgacgaaagcggatacaggtggacccgcgacgaccactcggcttccaggcagcccgaatacagggatatgagagatgggtttcgtcgcaaaagtttctacagcagccattacgcaagggagcggtcgccttacaaacgcgataataccttctttagggaatcacctgtgggcagaaaggacagccctcacagccggtcagggagtagtgtctcatctagatcttacagccccgagcggtctaagtcttattctttccatcagtctcagtag

SEQ ID NO: 234373 - DNA, 960 bp, synthetic construct
  misc_feature 1..960: note = Description of Artificial Sequence: Synthetic coding sequence
  source 1..960: mol_type = other DNA
atggcgtaccggcgagacgaaatgtggagcgaaggtcgatacgagtacgagagaattcctcgagagagggctcccccacgctcgcatccatctgacgagagcggataccggtggactcgggatgatcattcggccagccgccagcctgagtatagagatatgcgagacggtttccgtcgaaagagtttctattcttctcattatgctcgcgagagatctccttacaagagagacaacacttttttcagggaaagccctgtggggaggaaggatagtcctcactcacggagtggaagcagtgtctcatcacgttcttactcgcccgagcggagcaagtcctattcattccatcagtcccaacatcgtaagtccgtgaggccaggggcttcatacaaaaggcagaacgagggaaatccggagagggataaagagagacccgttcagtctctgaagacttcaagagacacatcccccagcagcgggtcagcagtgtcctcgagcaaggtgctcgacaaacccagccggttgactgaaaaagagttggcggaggccgcttctaaatgggcggctgaaaagctggaaaaatctgacgaaagtaacctgccagaaattagtgagtacgaggcgggaagcactgcccctttattcacagatcaaccagaagaacccgagtccaacactacgcacggcatcgagctgttcgaggactcacagcttacaacacgctctaaagccatcgcctccaaaactaaggagattgagcaggtctatcgccaggactgcgaaacgttcgggatggttgttaagatgctgattgaaaaagatccaagcctggagaagagcatccagttcgcactcaggcagaacctgcacgaaataggagaacgctgtgtggaggagctgaagcacttcattgctgagtacgacacaagcacgcaggattttggcgaacctttttag

SEQ ID NO: 234374 - DNA, 5270 bp, synthetic construct
  misc_feature 1..5270: note = Description of Artificial Sequence: Synthetic coding sequence
  source 1..5270: mol_type = other DNA
atgaacagcctgtttagaaaaagaaataagggtaagtactccccaaccgtgcagacacggtcaatttctaacaaggaactatccgagctcattgaacagctgcaaaagaacgcagatcaggtcgagaagaatatagtggacacagaagctaagatgcaatccgaccttgccaggcttcaggagggacggcagcctgagcatcgggacgtgaccctgcagaaagtgctggactccgaaaaactcttgtatgttctcgaggccgacgcagccattgctaaacatatgaagcacccacagggtgatatgattgccgaagacattaggcagctgaaggagagggtgacaaacctccgcggtaagcacaaacagatctacagacttgcagtaaaagaggtggatccccaggtcaattgggccgcactcgtggaggaaaagctggataaactcaacaaccaaagctttgggacagacctgcccctggtggaccatcaggtagaagaacacaacatcttccacaacgaagtgaaggcaataggtccccaccttgcgaaggacggggacaaagaacaaaactctgagctaagggccaagtatcagaagctcttagccgcttcacaggctcggcagcagcacctgtcttcactgcaggactacatgcagcgctgcaccaacgaactctattggctggaccaacaagccaagggacgcatgcagtatgattggtcagatcggaacctggactacccttctcggcgaagacagtacgaaaacttcattaaccgcaatctggaggccaaagaagagcgtattaataagttacattccgaaggggaccaactgctcgctgctgaacaccctggccgaaactcaatagaagcacacatggaggcggtgcatgcagactggaaagaatatctgaaccttcttatatgtgaagagtcccacttaaagtatatggaagattaccatcagttccacgaggacgtgaaggatgcacaagagctcctgcggaaggtggactccgatctcaatcaaaagtacggcccagacttcaaggacaggtatcagattgaattactcctgcgggaacttgatgaccaagaaaaagtgcttgacaaatatgaggatgtggtgcaggggctgcagaaaagagggcagcaggtcgttcccctcaaatatcgtcgtgaaacacctttaaagccaattccggtggaggcactgtgtgatttcgaaggagaacagggccttatttcaagagggtatagttacactctgcagaagaacaacggagagtcatgggaactgatggactccgctgggaataagctgatagcccctgctgtgtgctttgtgatcccacctactgatcccgaggccctggccctggctgactcattgggttcacagtaccgcagtgtgcgacagaaggcagccggttcaaagcgtaccctccagcagcgctacgaggtgctaaaaacggagaacccaggcgacgcttccgaccttcagggaagacagctcctggctgggctggacaaagtggcgagcgatctggatagacaggaaaaagccatcactggaattctccgccctcccttggagcagggtcgtgctgtgcaagatagcgcagagcgcgctaaagacctaaagaatatcactaatgagctactgcggattgagccggaaaagactaggtctacggctgagggggaagcatttatccaggccctgccaggctctgggactacacctctgctgcggacccgcgtggaggacacaaacaggaaatacgagcacctgcttcagctgctcgacctggcacaagagaaggtggatgtggctaaccgcttggagaaaagcctccagcagtcttgggagctcttggcaacacatgagaatcacttgaaccaggacgacacagtccctgaatccagccgagtcttggactcaaaaggacaggaattggcagcgatggcctgtgagctccaagcacagaagagcctcctgggtgaagtggaacaaaatctgcaggcggcaaagcaatgtagctctacacttgccagccgtttccaggaacactgcccagacctcgagagacaggaggccgaagtccacaagcttggccagcgcttcaacaatttaaggcagcaggtcgaaagacgtgcccagtcgctgcaatctgcaaaggctgcttacgaacactttcatcgcggacacgaccacgttctacagttcttggtgagtattccctcctacgaaccccaggagaccgacagcctatcccagatggaaacgaaactcaagaaccaaaaaaacctgctggacgagattgcctcgagagaacaggaggttcaaaagatttgtgccaattcacagcagtaccagcaggcagtgaaggattacgaactcgaggccgaaaagcttcgttctttgctcgatctggagaacggccgaagatcccacgtttctaagcgggctagattgcaatctccagctactaaggtcaaggaggaagaggccgctcttgccgcaaaatttaccgaagtttatgcgatcaacagacaacggctgcaaaacctcgaattcgccttgaatcttcttaggcagcagccagaggtagaagtgacacacgagaccttgcagcgaaacaggcccgatagcggcgtggaagaggcttggaaaatccggaaggagctggatgaggaaaccgagcgcagaaggcagctcgagaacgaggtgaagtctacccaagaggagatctggaccctgagaaaccagggacctcaagagtcagtggtgagaaaagaagttctaaaaaaggttccagaccctgtgttggaggagtctttccagcagctgcagagaaccctggctgaggaacagcacaaaaatcaattgctacaggaagagctggaggcacttcaattgcagctgcgagcgttggagcaggagacccgagacgggggtcaggaatatgttgtgaaagaggtcttaaggatcgagccggatcgggctcaggcagacgaagtcctgcagttgcgggaggagctagaggctctgaggagacaaaagggggcaagggaagctgaggtgcttctcctgcaacagcgagtagcagccctcgcagaggagaagagcagagcccaggagaaagtgaccgagaaagaagtggtgaagttgcagaatgatccgcaattagaggccgagtaccagcagctccaggaagaccaccaaaggcaggaccagcttagggagaagcaggaggaagagctgtcgttcttgcaggataaacttaagcggctggaaaaagagcgggcaatggctgaaggtaaaatcacagtaaaagaggtgctgaaggttgaaaaggatgcagcgaccgaaagagaggtgagcgatctgactagacagtacgaggacgaggccgctaaggcgagagccagtcagagggagaagacggagttactacggaagatctgggccctggaggaggagaacgcaaaggtggtcgtccaggaaaaggtacgcgagatagtgaggccagatccaaaggcagagagtgaagtggccaacctgcgtctggagcttgtggaacaggaacgtaaatatcgcggtgctgaagaacagttacgaagttatcaaagcgaacttgaggcgctgagacggcgaggccctcaagtggaagtaaaagaggtgactaaagaggttatcaagtataagacagatccagagatggaaaaagagttgcaacggctacgcgaagaaatcgtggacaaaacacgcctcattgagcggtgtgatctggagatctatcagttgaagaaggaaatccaagcattaaaggataccaaaccacaggtgcaaactaaggaagtggtgcaagagatcctgcaatttcaagaagacccccagacaaaggaggaggttgctagcctaagagctaagctgtctgaggaacagaagaaacaggtagatttggagcgagagcgtgcgtcccaagaagagcagatcgccagaaaggaagaagagctgtccagagtcaaggaacgggtcgtgcaacaggaggttgttagatacgaggaggaacccggacttagggctgaagcaagcgcctttgccgagtcaattgatgtcgaactgcgccagatcgacaaactgagggccgagctcaggcggcttcagcgtagacggaccgagcttgagagacagctggaggagttagagagggagcgccaggcccgacgagaagctgaacgtgaagtccaaaggctccaacagagacttgctgcgctggaacaggaggaagcagaggcccgtgaaaaagtgacgcatacgcagaaagtcgttttgcagcaggacccacagcaagccagagagcacgccctgttgcggctgcagctcgaggaggagcaacatcggcgacagttacttgagggcgagttagagacgctgcggcgtaaactggccgctcttgagaaagctgaggtgaaggagaaggtggttctcagtgaatcagtgcaggtggaaaagggcgacacagaacaggaaatacagcggttaaaatcgtcactggaggaggagtcacgctcgaagagagaactagacgtggaagtgtctcgtctcgaggccagattgtccgaattggagttccacaattcaaagtcttcgaaagagctggacttcctgagagaggagaaccataagctccagctcgagagacagaatctccagttggagactcgccgactccagtccgagattaacatggcggcaacagaaaccagagacctacggaacatgacggtggcagattcggggaccaaccatgacagcaggctgtggtctcttgaacgagagttggacgaccttaagcgcctctctaaggacaaggacctagagatagatgaactgcagaagagacttggaagcgtcgctgtcaagcgcgagcaacgtgagaaccatttgaggcggagtatcgtagtgatacatccagatactggaagggaattgtcacctgaggaggcgcacagggcaggcctcattgattggaatatgttcgttaaactccgcagccaagaatgcgattgggaggaaatctcagtcaagggccctaatggcgaatcaagcgtgatacacgataggaagtctgggaagaaatttagcattgaagaagcgcttcagtcagggcgattgactcccgcacagtatgatagatacgtgaacaaagatatgtcgatccaagaacttgccgtgctcgtttcagggcagaaata

SEQ ID NO: 234375 - DNA, 4440 bp, synthetic construct
  misc_feature 1..4440: note = Description of Artificial Sequence: Synthetic coding sequence
  source 1..4440: mol_type = other DNA
atggctaagcggtctaggggacctggtcgtagatgtctgcttgctctcgtccttttttgcgcttggggcactctcgcggtggtggcccagaaacctggcgctgggtgtccctcaaggtgtctgtgctttcgcaccactgtccggtgtatgcacctcctgctggaagcagttcccgctgtagcccctcagacatccatcctcgatctcagattcaaccgtatacgcgagattcagcctggcgcttttcgaaggcttcgtaacttgaatactctcctcctgaacaacaatcagattaaacggattccaagcggcgcttttgaagatctggagaatttgaagtatctctatttgtacaagaatgagattcaaagcatcgaccgacaggccttcaagggcctcgctagcctcgagcagctctatcttcatttcaaccagatcgagaccctcgaccctgattcgttccaacacctgcctaaactcgagagactgttcctccacaacaatagaataacacaccttgttcctgggaccttcaatcacttggagagtatgaagcggctaaggctggatagtaacaccctgcattgtgactgcgagatcttgtggctagcggatctgctcaagacctacgccgaatcaggaaacgcacaggctgccgctatctgcgagtatccacgcagaattcagggcaggtcagttgcgacgatcacccccgaggagctaaactgcgaaagaccaaggattacatctgagcctcaagatgcagacgttacatccggcaacacggtgtacttcacctgcagagcagaaggcaaccccaagccggagattatatggctgagaaacaacaacgaactctccatgaaaacagactcaagactgaacctacttgatgatggcactcttatgatccagaatacccaagagactgaccagggcatctatcagtgcatggcaaaaaacgtcgcaggtgaggtgaagactcaagaggtcactttacgctattttggcagtcctgccagacctacatttgtgatacaacctcaaaacaccgaggtgctggtgggagagtccgttaccctggagtgtagcgcaactggacaccctccccctcggatcagctggacgagaggtgaccgcactccacttcccgtggaccccagagtcaatattacaccgtcaggaggcctgtatatccagaatgtggttcagggcgattctggagaatatgcttgctctgctactaataatattgatagcgtgcatgcaaccgctttcattatcgttcaggctttaccacagtttacagtcaccccacaagatagggttgtcatagaaggccagacagttgacttccagtgcgaggcgaaaggtaatccaccccctgtcatagcgtggactaagggtggctctcagctgtccgtggaccgtcgtcacctggtcttgtcgtcagggacactgcgcatatcaggggtggcccttcatgaccagggtcagtacgagtgtcaggcagtgaatataattggcagtcagaaggtggttgctcatctcactgttcaaccaagggtgactcccgtgtttgcctccattcccagcgataccaccgtcgaggtaggagcgaacgtccagttgccatgctccagtcagggcgaaccagagcctgcaattacttggaataaagatggggttcaggtcactgagagcggtaaatttcacatttcaccagagggattcctgacgattaacgatgtgggtcccgctgatgctggtaggtacgagtgcgtggcgagaaataccattgggtcggcgtctgtgtccatggtgctatcagtgaacgtgccagatgtatcccgaaacggagatccattcgtcgcgacctccattgtcgaggccatagctacagtggatagagccattaactcgacgcgaacacatctgttcgactctcgcccaagatcccctaacgacctactggctctgtttcgctatccacgtgatccctacacagtcgaacaagccagggcaggggaaattttcgagcggactctgcagctgatccaagaacacgttcagcacggactaatggtggacctgaacggaacctcctaccattataacgacctcgtcagtccacagtaccttaatttgattgcaaatctgagtggttgtacagcccacaggcgagttaacaattgtagcgacatgtgcttccaccaaaagtataggacccatgacggcacatgcaacaatctgcaacatccaatgtggggggcatcattaactgcattcgagagactcctgaagtcagtctatgaaaacggattcaatactcctcggggtataaacccacacagattgtataacggacatgccttgccaatgccccgtctcgtcagcacaaccctgatcggcactgagacagtgacacccgatgaacagtttacccacatgctgatgcagtgggggcaatttttagaccatgatctcgatagcactgtagttgctctgtcacaggcccgattctcagacggtcagcactgcagcaacgtgtgttctaacgaccctccatgttttagtgtgatgatcccccctaacgactccagggcgagaagcggagctagatgcatgtttttcgttagaagctcccctgtctgcggatctggaatgacgtcccttctgatgaatagtgtgtacccgagagagcagatcaaccagctgacctcatacattgacgctagtaatgtgtacgggtccactgagcacgaagccaggagcattcgcgacctggcaagtcatcggggattgctccgccagggaattgtgcagagatccgggaagcccctgctgcccttcgctaccggaccacctacagagtgcatgagagacgagaacgagagtccgatcccatgtttcctcgctggagaccatcgagcgaacgagcagctcgggctgacaagtatgcacaccctttggtttagagaacacaacagaatcgccactgagttgttaaagctgaatccccattgggatggcgataccatctattacgagacacgtaagatagtgggagccgagatccagcacatcacgtatcaacattggctcccgaaaatcctgggggaagtaggcatgcgaactctcggagagtatcacgggtatgaccctggaattaatgccggtatatttaacgcttttgccacagcagccttccgcttcggtcatacactggttaacccactgctgtacagattggatgagaattttcagccaatcgcgcaagaccaccttcctctgcacaaggcctttttctccccttttaggatcgtgaacgagggtggcatcgatcctctgttgagggggctctttggcgtagccggtaagatgagagttcccagccaactccttaatacagagctaacagaaagattgtttagcatggcacacacggttgcgctggatttggcagcgatcaacattcagagaggaagggaccacggcatcccaccctaccatgattaccgggtgtactgcaacctttccgctgcacacacgttcgaggacctcaagaatgagattaaaaatccagaaattcgagagaagcttaagcggctctacggaagtacgctgaatattgatttgtttccagctctcgtggtggaggatttggtccccggatcaaggctgggacctacccttatgtgcctgctgtccactcagttcaaacgactccgcgatggggatcgactgtggtacgaaaatcctggtgtgttctccccagcccaactgactcagattaaacagacctccttggcccgtatcttatgtgacaatgcggataacataacaagggtccagagtgacgtcttcagggtcgcggagtttccccacggatacgggagctgtgatgagattcccagagtggatctacgggtttggcaagattgctgcgaggactgcagaactagaggacagttcaatgccttttcgtaccatttccgaggtcggaggagcttggaattttcataccaagaggacaagcccactaaaaagacccggccacgcaaaattccctccgtgggcaggcagggcgaacatctatcaaacagtacatcggccttctccacacgcagcgacgctagcgggactaatgacttccgtgaattcgtgctggaaatgcagaagacaatcaccgacctgaggacgcagattaaaaagctcgaaagccgtcttagtaccaccgaatgcgtggatgcagggggagagagtcatgcaaacaatacaaaatggaagaaagatgcttgcactatttgcgagtgcaaagatggacaggttacctgtttcgtggaagcttgccctcctgcaacatgcgccgtgcctgtcaacatccctggggcatgctgccccgtatgtttgcagaagcgcgctgaggaaaaaccctag

SEQ ID NO: 234376 - DNA, 2172 bp, synthetic construct
  misc_feature 1..2172: note = Description of Artificial Sequence: Synthetic coding sequence
  source 1..2172: mol_type = other DNA
tgacgaggtcccggaaggcgctgcctcttggctctcgttctcttttgcgcctggggaacactggcagtggtggcccagaagccaggagctggttgtccctcacgctgcttgtgtttcaggacaacagtgcgctgcatgcaccttctactggaggcggttcccgctgtggcccctcagacctcaatcctggacctgcgcttcaaccggattagggaaattcaacccggagccttcagacggctcaggaacctgaacaccctgttactcaataataatcagataaaaaggatcccaagcggagcctttgaggatctagaaaacctgaagtacctctacctgtacaagaacgaaattcagagtatcgaccggcaggcattcaaaggtctggcgtccttagaacaactgtatcttcatttcaaccagatcgagacactcgatcctgacagcttccagcacttgcctaagctggagcgtctctttctgcacaataaccgcataacacatctagttccagggacctttaaccacttagaatctatgaagcggcttcgtctcgattccaacactttacattgtgactgtgaaattctgtggttagctgacctcttaaagacctacgctgaaagtggcaatgcccaagctgccgctatctgtgagtacccacggcgaatccaagggaggtcagtcgcaactattacccctgaggagttaaattgcgagcgaccacgcattacctctgagcctcaggatgcagacgtcacttctggaaataccgtatacttcacctgtagggctgagggcaatcccaaaccggagatcatctggctgcgcaataataatgagctgagtatgaagaccgattcccgcctgaaccttttggacgacgggacacttatgatccagaacactcaggagaccgatcagggaatctaccaatgtatggcaaagaacgtggccggagaagttaaaacacaggaggtgacactgcggtacttcggatcacccgctcgcccaacttttgtcatacagccccagaacacagaggttctggttggtgaatctgtgactctggaatgctccgccactggacatccgccaccaaggattagttggacacggggagacagaacgccactgcccgtggatccacgtgtgaatataacaccctctgggggtctgtatatccagaatgtcgtgcagggtgacagtggcgagtatgcctgctccgccacaaacaacatcgatagcgtgcacgcaaccgcattcatcatcgtacaggctctgccacagtttactgtcactccgcaggacagggtagtgatcgaggggcagaccgtggatttccagtgtgaagcaaagggaaacccgcctcctgtgatagcatggacaaaagggggaagtcagcttagcgtagaccgcagacacttagtcctctcaagtggcacattgaggattagtggcgtagccctacacgatcagggccagtacgaatgccaagctgtaaacataatcggctcacagaaggtggttgcgcacctcacggtgcagccacgggttacgccagttttcgcttccattcctagcgatactaccgtagaggtaggagcgaacgtacagctgccctgctcaagccagggcgagcccgagcctgcgattacttggaataaagacggggtccaggtgacggagtctggaaaattccatatttctcctgaaggatttcttaccatcaatgacgttgggcctgcagacgcaggacgatacgaatgcgtcgcccgaaacaccattggctccgcctcagtgtcaatggtcctcagtgttaatgttccagacgtttctagaaacggcgatccattcgtcgctacttccattgttgaagccatcgctactgtcgatcgcgcaatcaatagcacccgcacccacctttttgattctcgcccacggtcacccaacgacctgctggccctgttcagataccctcgggacccctataccgtcgaacaggcgagggctggagagattttcgaacggacactgcaacttatccaggagcacgttcagcatggtctgatggtggacctaaatggaacttcccaatgccaatccctgttcttcctgctccatggcctttccaatggggtcgagcatgcctctgtcaaaagccactcctag

SEQ ID NO: 234377 - DNA, 771 bp, synthetic construct
  misc_feature 1..771: note = Description of Artificial Sequence: Synthetic coding sequence
  source 1..771: mol_type = other DNA
atggctgccgcagtcgggagattgttacgcgcttccgtggccaggcacgttagcgccattccctggggcatatctgcaaccgcagccctcaggccagctgcctgtggtcgtacatcactcaccaacctactgtgcagtggcagcagtcaggccaagctcttttcaacctcctcaagctgccacgcacctgccgtgacgcagcacgccccatacttcaaaggaacagccgtggtaaatggcgagttcaaggatcttagcttagatgacttcaaaggcaaatacctggtgctattcttctaccctctcgattttacttttgtgtgtccaaccgaaatcgtggcttttagcgacaaagcgaacgagttccacgacgttaattgtgaggtagtcgctgtctctgtggatagtcacttcagccacctggcttggataaatacacctaggaagaacggtgggttggggcacatgaacatcgccttactatcggacctcacaaagcagatatcaagggattatggtgtactcttagagggtagcggtctggccctcagaggcctttttatcattgatcctaacggagtgattaagcacctgtcggttaacgacctgcccgttggcagatccgttgaagagaccctccggctcgtgaaggctttccaatacgtcgaaacgcacggtgaggtatgcccggctaactggacccccgatagtcctacaatcaaaccttcaccagccgcttccaaagagtactttcaaaaagtgaatcaatag

SEQ ID NO: 234378 - DNA, 717 bp, synthetic construct
  misc_feature 1..717: note = Description of Artificial Sequence: Synthetic coding sequence
  source 1..717: mol_type = other DNA
atggccgctgctgtcggccgtctattaagagccagtgtggcgcgacacgtctccgctattccgtggggtattagcgcaaccgctgccctacggccagccgcatgcggacgtacatccttgacgaacctgctatgtagtgggtcaagccaggcgccatacttcaaaggaactgccgtagtgaatggtgaattcaaggatctttcccttgatgatttcaaaggcaagtacctcgtgttgtttttttaccctctagatttcacattcgtgtgccctactgagattgtggcattctctgacaaggcgaacgagtttcacgatgtgaattgcgaggtagttgctgttagcgttgatagccacttttcccacctggcgtggatcaacactccgaggaaaaatggcggtctagggcacatgaatattgccttgctatcagatttaaccaagcaaatttcgcgtgattacggagtgctgttggaaggatcagggctggccctgaggggcttattcattatcgatcccaatggggtcattaaacatttgagcgtcaacgatttgcctgtcggcaggtccgtggaagagaccttaagactggttaaggccttccaatacgtcgagacccacggggaggtgtgcccagcaaactggactccagacagcccaaccatcaagccatcacctgccgcaagtaaggagtactttcagaaggtgaatcagtag

SEQ ID NO: 234379 - DNA, 645 bp, synthetic construct
  misc_feature 1..645: note = Description of Artificial Sequence: Synthetic coding sequence
  source 1..645: mol_type = other DNA
atgggactcgccggagtttgtgccctcaggcgaagcgctggctatattctggtcggaggtgccggtggacagtccgctgcagcggcagcgcgtcgatactcagagggggaatgggcaagtggtggcgtgcggagtttctcccgcgctgcggctgcaatggctcccattaaggtgggggacgctattcctgcggtcgaagtgtttgagggggaaccagggaacaaggtgaatttggcagaactgttcaagggtaaaaagggtgttttgttcggagtccctggagctttcacacccggatgttccaagactcatctgccaggctttgtcgaacaagcagaagctctaaaggccaaaggcgtgcaggtcgtggcgtgtttgtctgtcaacgacgctttcgtcactggcgagtgggggagggctcacaaggctgagggcaaagtgagactcctcgctgacccaaccggggcttttggcaaggaaaccgatctgctgctggacgactccttggttagcattttcggcaacaggaggctcaaaagattctcgatggtggtccaagatgggatcgtcaaggccttgaacgtggaaccagacggtacagggttaacctgcagcctagctccgaacatcatcagtcaactctag

SEQ ID NO: 234380 - DNA, 378 bp, synthetic construct
  misc_feature 1..378: note = Description of Artificial Sequence: Synthetic coding sequence
  source 1..378: mol_type = other DNA
atgggtctggcaggcgtctgcgccctgagacgttccgctgggtacattctcgtgggtggcgcaggcggacagtctgcagccgcagcggcacgtcggtactcagagggagagtgggccagcggcggagtgagatctttctcccgagccgcagccgcaatggctccaataaaggtgcggttgctggccgacccaacgggggcttttgggaaagagacggaccttttacttgacgattccctggtgtccattttcggcaaccggagattgaagagattttcaatggtggtacaggatggaatcgtcaaagccctcaatgtcgagcctgacggaacagggttgacgtgctcactcgctccaaacatcatttcacagctctag

SEQ ID NO: 234381 - DNA, 513 bp, synthetic construct
  misc_feature 1..513: note = Description of Artificial Sequence: Synthetic coding sequence
  source 1..513: mol_type = other DNA
atgggactggccggagtttgcgctcttcggaggagcgcagggtacattctcgtcggcggagctgggggtcaatccgctgcagccgcagcaaggcgctactcggagggtgagtgggcgagtggaggtgtgagaagttttagccgtgccgcagcggcaatggctcctatcaaagtgggtgacgccatccccgcagttgaggtcttcgagggggaacccggaaacaaagttaacctagccgagctgtttaagggtaagaagggggtgctctttggagtccccggagccttcacccccggttgctctaaagtgcgcttactggcagatccaaccggcgcattcgggaaggagactgatcttctactggacgattccctggtatccattttcgggaataggagattgaaaagatttagtatggttgttcaggacggtattgtgaaggccctcaacgtcgagccagatgggaccggattgacatgttctttagccccaaacattataagccaactgtag

SEQ ID NO: 234382 - DNA, 675 bp, synthetic construct
  misc_feature 1..675: note = Description of Artificial Sequence: Synthetic coding sequence
  source 1..675: mol_type = other DNA
atgcctgggggtctcctcctaggcgacgttgcacctaatttcgaggcaaatactacagtgggcaggattagatttcatgactttctgggagattcttgggggattctcttcagccacccaagagacttcacccccgtctgtactactgaactcggcagagccgcaaagttggctcccgaatttgccaaaaggaacgtgaaattgatcgcactcagtatcgatagtgtagaggaccatctggcctggagcaaagacatcaacgcctacaactgcgaagaacccactgaaaaactgccatttcccataatcgacgaccgcaacagggagctagcaattctgctggggatgttagatcctgctgagaaggatgagaagggaatgcccgttacggccagggtcgtgttcgtttttgggccagacaagaagctgaaactcagcatcctgtaccccgctactactggcaggaattttgacgagatcctgagagtagtcatttcactgcaactcacagctgaaaaaagagtcgctacccctgttgactggaaagatggcgatagtgtcatggttctgcccactatcccagaagaggaggcaaaaaaattattccctaagggcgtttttacaaaggagctgccctcaggaaaaaagtacctgcgctacactccccaaccatag

SEQ ID NO: 234383 - DNA, 3852 bp, synthetic construct
  misc_feature 1..3852: note = Description of Artificial Sequence: Synthetic coding sequence
  source 1..3852: mol_type = other DNA
atgtggggctctgacaggctggctggagcgggaggtggcggtgcagctgtgaccgtggcctttacaaacgccagggattgctttttgcacctgccccgtaggctggtcgcgcaactgcatctcctgcagaatcaagccattgaagtcgtctggtctcaccagccagccttcctctcctgggtggagggtcggcacttctctgaccagggtgagaacgtcgccgagattaacaggcaagtgggccaaaagctgggcctgagcaacggcggacaagtatttctgaagccctgcagtcacgttgtgtcttgccagcaggtggaggtggaacctttgagcgccgacgattgggagatcttggaattgcatgccgtttcattagaacaacatttactcgatcagatacgaattgtgtttcctaaagcaatctttcccgtctgggtggaccagcagacatacatcttcattcagattgtggccctgatccccgctgctagctacggtcgccttgagactgacaccaaactgctgatacaaccaaaaactcggagggccaaggagaacaccttttcaaaggcagatgctgagtacaaaaaactccactcatacggacgtgaccaaaagggtatgatgaaggaactccagactaaacagctgcagtctaacacagtagggatcaccgagtccaacgaaaacgagagtgaaatccccgtcgactcttcttctgtggctagcctgtggaccatgattggaagcatcttcagcttccagagtgagaagaagcaagagacgagttggggcttgaccgaaattaacgccttcaaaaacatgcagtccaaggtggttccactggacaatatcttcagagtgtgtaagtcccaaccaccgagcatttacaacgcttcagcaaccagcgtattccacaagcactgtgctatacatgtgtttccttgggatcaggaatactttgacgtcgagccctccttcacagtcacatacggcaaactcgtgaagcttctgagcccaaagcaacagcagagtaaaacgaaacagaacgtcctgtcacccgagaaagagaagcagatgtccgaaccgctggaccagaagaagatacgatcagaccacaacgaggaggacgaaaaggcttgtgtcctgcaggtggtgtggaacgggctggaggagctcaacaacgccattaaatacaccaagaatgtggaggtgttgcatctgggtaaggtatggatccccgacgatctcaggaaacgcttgaacatcgaaatgcacgccgtcgttagaatcacacctgtagaggttacccccaaaattcccagatctctgaagctgcagcctcgcgagaacttaccgaaggatatcagcgaggaagatattaaaactgtcttctattcctggctgcaacagtctacaacaacaatgctaccactggtgatcagcgaggaggaattcattaaactggagaccaaagacgggcttaaagaattcagcttgtccatcgtccacagctgggaaaaagagaaagacaagaatatcttcctcctgagccccaacctcctccagaaaactaccattcaagttctccttgatcctatggtgaaagaggagaatagcgaagagattgatttcatcttacctttcctgaagctctcttctttggggggtgttaactcgctcggggtctccagccttgagcacattactcacagtctcctaggcagacctcttagccggcagctgatgtcactggtggccggtcttcggaacggtgccttacttctgaccggcggaaaagggtctggtaagtccacgcttgccaaggctatatgtaaggaggccttcgacaaattagacgctcacgtggaacgggtggactgtaaggccttgcggggaaaacgcctcgaaaacatccagaaaactctggaggtggccttttccgaggctgtgtggatgcaaccaagtgtcgtgctgttggatgatctcgatctcatcgctggcctgcccgcagtgccagagcacgagcacagtccagacgctgtgcagagtcaacggctggctcatgccctgaatgacatgatcaaagagttcatctccatggggtccctcgtcgcactgattgccacgtcccagtcccagcagtccctccacccactccttgtatcagctcaaggcgtgcatatatttcagtgcgtgcagcacattcagcctccgaaccaagagcagcgttgcgaaatcctttgcaacgtcataaagaacaaactggattgcgatattaataaattcacagacctcgatttgcagcacgttgctaaagaaacaggcggtttcgtcgcaagagacttcaccgtgctggtggaccgtgctattcatagcagactgtcccgccagtccatcagtacaagggagaagctcgtcctgaccacactggatttccagaaggccctgagaggctttctcccagcatctttgcgctctgtgaacctgcacaaacctcgggacctgggatgggacaaaatcgggggtttgcatgaagtgagacagattctaatggacacaatccagctgcctgctaaataccccgagctattcgccaatctgccaataaggcagcgcactggcattcttctttatggtccaccaggcacagggaaaaccctgctcgcaggggtgatcgcaagagagagtcgaatgaacttcataagtgtaaaaggtcctgagctcctgagcaagtacataggagcttctgaacaggcagtccgcgatatttttataagggcccaagccgctaaaccttgtattctgttcttcgacgagttcgagtctatagcgccaaggcggggtcacgataatacgggagtgactgatagggttgtgaatcaacttctaacccaactcgacggcgtggagggcctccaaggggtttacgtgctcgctgccacttcaagacccgatctgatcgatccagccctcctcaggcctggaagactcgacaagtgtgtttactgccctcctcccgatcaggtgagccgactggaaattctgaacgtgctcagtgattcactgcctcttgcagacgacgtggatctccaacacgtcgcctcagtcacagactcattcaccggagctgacctaaaggccctgttatacaatgcacagctcgaagctctgcatggcatgcttctgtctagcggcctgcaggatggatcctcatcctctgacagcgatctgagcctctctagcatggtgtttctcaatcattcttccggtagtgatgattcagcgggagatggtgagtgcgggttggaccagtcgctggtctccctggaaatgagcgaaatcttaccagacgaatcaaagttcaacatgtacaggctgtatttcggatccagctacgaatcggagctcgggaacggaaccagctcagatttgtcaagtcagtgtctatctgccccttcatccatgacccaggatttacctggggtccctggcaaagaccagttgtttagccagcctcctgtcctgagaacagcgtcccaagagggctgccaagaactcacccaggaacaaagagatcagctcagagccgacatttccatcattaaggggaggtatagatcccaatctggagaggacgagagtatgaatcagccagggccaattaagaccagactggcaattagtcaaagccatctgatgactgcactgggtcacactcggccatccattagtgaggatgactggaaaaactttgccgagctatatgagagcttccaaaatcctaaacgccgaaaaaaccaatccgggaccatgtttcgccctgggcaaaaggttactctggcatag

SEQ ID NO: 234384 - DNA, 3681 bp, synthetic construct
  misc_feature 1..3681: note = Description of Artificial Sequence: Synthetic coding sequence
  source 1..3681: mol_type = other DNA
atgtggggatccgacaggctggctggcgcaggtgggggtggcgcagcagtcaccgtagctttcaccaacgcacgcgattgttttttgcacctgcctaggcgactcgtggctcaactgcatctacttcagaatcaggccatcgaggtggtgtggtcccatcagccagcctttctgtcctgggttgaaggcagacactttagcgaccaaggggaaaacgtggccgagataaatcggcaagtcggtcagaagctgggattgagtaacggcggacaagtctttttaaagccctgcagccatgtggtgagctgtcagcaggtcgaggtggagccgctgtctgctgacgactgggagattctggaactacatgccgtgtctctcgaacagcacttactggaccagatccggatcgtgttcccaaaggctatctttccagtttgggttgatcagcagacctacatatttatacagatagtagcgttgatccctgccgctagctacggacgcttagagaccgacaccaagctcttgatccagccaaaaacccgccgagcgaaggagaatactttctccaaagccgatgcagaatacaaaaaactccactcatatggtagggaccaaaaggggatgatgaaggagctccagaccaaacagcttcaatctaatactgtgggcatcaccgagtccaatgaaaatgaaagtgaaataccagtggacagtagctccgttgcttcactctggactatgatcggcagcatattctcgttccagtccgaaaaaaaacaagagacctcttggggcctgaccgaaataaatgcgttcaagaacatgcaaagcaaggtggtgcctcttgacaacatctttagggtgtgcaagtcccagccaccttcgatttacaacgcctctgccacctctgtgttccacaaacattgcgccatccatgtgtttccatgggatcaggagtactttgacgtggaaccttcttttaccgtaacttacggaaagttagttaagctgttatctcctaagcagcaacagagtaagactaagcaaaacgtgctctcgcccgagaaggagaagcaaatgtcagagcccttggaccagaaaaaaatcaggtccgaccataacgaggaggacgagaaagcatgcgtcctccaggttgtgtggaacggcctggaagagctcaacaatgcaatcaagtacaccaagaacgtggaagtactccacctcgggaaggtttggatcccagacgatttaagaaagagactcaacattgagatgcacgcagtggtgcgaatcacccctgttgaggtcacgccaaagatccctagatcacttaaacttcaaccaagagagaacctgcctaaggatatctctgaggaagatattaaaacggtcttctactcctggctgcagcaaagcaccaccactatgctgcccctggtgataagcgaggaggaatttatcaaactggagactaaggatgggctgaaggaatttagcctttccattgtgcattcatgggagaaggagaaagacaaaaatatcttccttctcagtccgaatttattgcagaagaccactatccaggtgctcctggacccaatggtgaaggaggagaattccgaggagatcgactttatcctcccatttttaaagttgtccagtttaggaggcgtaaattcactgggggtgtcgtcactcgaacacataacccattccttactgggcaggcctttatcacgacagctaatgagtctcgttgcgggattaaggaatggcgcactgctcctcacagggggaaagggaagcggcaagtctactttggccaaggcaatctgcaaagaggcctttgacaaattagacgcccacgtagagcgtgtagattgtaaggccctgcgtgcccttaacgacatgatcaaggaatttatctcgatgggctccctcgtagccctgatcgccacctcccagagccaacagtcactccacccacttttagtctccgcccaaggtgtccacatatttcagtgcgtccaacatatccagcctcccaatcaagagcagcggtgcgaaatcctttgtaatgtgattaaaaacaagctcgattgcgatattaacaagttcaccgacctggatctccagcacgtggcgaaagagaccggaggtttcgtcgctcgtgattttacagtgctggttgacagagctatccacagcaggctgtccagacagagtatatctaccagagaaaagctggttctgactacccttgatttccaaaaggcactgagggggttcctgcctgcctccctgcgctccgtgaacctgcataaacctcgagacctgggctgggataaaattgggggtctccacgaagtaaggcaaatattgatggacactatacaactgcctgccaaatacccagagttgttcgccaacctccctatcagacagcgcacaggtattctactgtacggcccacccggtactgggaaaaccttactggcaggagtcattgcccgtgaatcccgcatgaattttatctccgtgaaaggcccagaattgctcagtaagtacatcggcgcatccgagcaggctgtgcgggacatcttcatccgcgcacaggccgctaaaccctgcatcctgttcttcgatgagtttgaatccattgcccctcggaggggccatgataacacgggcgtcaccgatcgagttgtgaaccaactgctgacccagctggacggtgtggagggtcttcagggagtgtacgtgctcgctgcaacttcacgcccagacctgatcgatccagcccttctgaggccgggtagactggataaatgtgtgtactgtcctccacccgatcaggtgtcaagactggaaattctcaatgtcctcagtgattccctgcccctcgctgacgatgttgacctccaacacgtcgccagtgtgactgactccttcactggagccgatctgaaggcactgctgtacaatgctcagctggaagcgttacacgggatgctgctgtcgtcaggtctgcaggatggatccagttcatcagatagtgatctgtccttgtcttccatggtattcctgaaccatagtagtgggtctgacgatagcgcaggagacggggagtgcggattggaccagtccctcgtgtcgctcgagatgagtgaaatactgccagatgaaagtaagtttaatatgtatcgcctgtactttgggtcctcttacgaatctgaactgggaaacggtacgtcctcagacctgtcttcacagtgccttagcgctccctctagcatgacccaggatcttcccggagttcccggaaaggatcaactgttttcccaaccccctgtgttgcgtactgcgtcccaggagggctgtcaggagttgactcaagaacaacgcgaccagcttcgagccgatattagcattattaagggcaggtacagatcccagtcaggcgaggatgagtctatgaaccagccaggacctatcaagacacgtcttgcaatctctcagagccacctcatgaccgccctcggtcacacccggccatctatcagtgaagacgactggaagaatttcgcagagctgtatgagtccttccagaatccaaagaggaggaagaatcagagcggcacaatgttcagaccaggacaaaaggtgaccctcgcatag

SEQ ID NO: 234385 - DNA, 483 bp, synthetic construct
  misc_feature 1..483: note = Description of Artificial Sequence: Synthetic coding sequence
  source 1..483: mol_type = other DNA
atgtctctggtggcagggctgaggaatggggcattgctcttgactggaggcaaaggcagtggaaaaagcactcttgcaaaggccatctgtaaggaagcatttgataaactcgacgctcacgttgagagggttgactgcaaagcgctgagaggaaagcggctggagaatattcagaaaactcttgaagtcgccttctctgaggcggtatggatgcagccatctgttgtgttgctggacgatttagacctcatcgcgggactgccagccgtgcccgagcacgaacactcacctgacgctgtccagtcccagcgactcgctcatgcactgaacgacatgataaaagaatttatctctatgggttctcttgtggccctcatcgccacctctcagtcccagcagtcactccatccactgcttgtatctgcacagggcgtacatattttccagtgcgtgcaacacattcagccccctaatcagaattag

SEQ ID NO: 234386 - DNA, 1899 bp, synthetic construct
  misc_feature 1..1899: note = Description of Artificial Sequence: Synthetic coding sequence
  source 1..1899: mol_type = other DNA
atgtggggatcggaccggctggctggcgctggagggggaggcgcagcagtcactgtggccttcactaatgctcgcgattgcttccttcatcttcctaggcgcctggttgcacagctgcacctcttgcagaaccaggctatcgaggtagtctggtctcatcaaccagcattcctgtcatgggtggagggtcgccacttcagcgaccagggagaaaatgtggccgaaatcaatcggcaggtcgggcagaagttgggactcagtaatggcggtcaggtgttcctcaaaccctgtagccacgtggtctcgtgccagcaggtggaggttgagcccctgtccgccgacgactgggaaattctggaactccatgccgtgtcactcgaacagcatctcctagaccagatccggattgtgttccccaaggccatattcccagtctgggtggatcaacagacttatatcttcatccagattgtcgccctcattccagctgcgtcatacggaaggctggagaccgacaccaagctgctcattcagccaaagactaggcgggcaaaggaaaacacgttttcgaaggctgacgctgaatataaaaagctgcactcctatgggcgtgatcagaagggtatgatgaaagaactgcagaccaagcagctgcagtccaacacagtgggaattaccgaaagtaatgagaatgagtcagaaatcccagtggacagctcgtcagttgcaagcttgtggactatgatcggaagcatcttctctttccaaagcgagaaaaagcaggagaccagctggggactcactgaaatcaacgcatttaagaacatgcaatctaaggtggtgcctttagacaacatctttcgcgtctgcaagtcccaaccccctagtatctataacgcgtcggcaacaagcgtgttccataagcactgcgccattcacgttttcccttgggatcaggagtattttgacgtggagcccagcttcactgtcacgtacgggaagctggtcaagcttctcagtccaaagcaacagcagtcaaagaccaagcagaatgtgctgtcacctgaaaaggagaaacaaatgtcggagcccttggatcagaaaaagatcaggagcgaccataatgaggaggatgagaaggcctgtgttctgcaggtggtatggaacggcctggaagagctgaataacgcaattaaatataccaaaaacgtggaagtcttacatctgggaaaggtgtggatccccgacgacttgaggaagagactcaatatagagatgcacgctgtagtgcgaattacccccgtcgaagttacaccaaagatacctcgtagcctgaaactccagcctcgggaaaacctgccaaaggacatctccgaggaggacattaagacagtcttttattcttggctgcagcagagtaccaccacaatgctccctctagtcatttccgaggaggagttcattaagctcgaaacaaaagacgggcttaaggagttcagcttgagtattgttcacagctgggaaaaggaaaaggacaaaaacattttcctactgagtcctaatctgctccagaaaacgaccattcaggtactgctggatcccatggtcaaagaagaaaacagcgaggagattgacttcattcttccattcctcaaactgtcctcccttggtggggttaactccctgggggtgagcagcctggaacatatcacacactccctgctgggtaggcctctgtcaaggcagctcatgtctctggtggcgggactccgcaatggcgctcttttgctcacagggggaaaggggtccggcaagagtactctggcaaaggccatctgtaaggaagctttcgataaattggatgcccatgtcgagcgtgtggactgcaaggccctttag

SEQ ID NO: 234387 - DNA, 1041 bp, synthetic construct
  misc_feature 1..1041: note = Description of Artificial Sequence: Synthetic coding sequence
  source 1..1041: mol_type = other DNA
atggcacccgctgcagcatcccctcccgaagtgataagggccgctcagaaggacgagtactaccgaggcggacttcgttccgcagcgggtggagctctgcatagcctcgcaggcgctcggaagtggctggaatggcgaaaggaggtcgagttgctgagcgacgtcgcctatttcggactcacaacactggccggataccagactctgggtgaggaatacgtttctatcatccaggtggatccctcacgtatccacgttccttcaagtctaagaaggggggtgctcgtgacactacacgcggtgctgccatacttgctagacaaggccttattgcctctcgagcaagagctccaagcagacccggattctgggaggcctttgcaggggagtttaggacctggcggacgcggatgcagcggggcaagacgctggatgagacaccacactgctaccttgactgaacagcaaagacgtgcactgctgagagccgtgttcgtgttgaggcagggactcgcctgtttgcaacggctgcacgtggcctggttttatattcacggggtgttttatcacctggcaaagaggctgactgggatcacttaccaggcacttcggccagaccccttgagggtgcttatgtcagtggcaccatccgccctgcagctgcgagtgaggagtctccctggcgaggacttgcgggcacgggttagttaccgcctgttaggagtgattagcctgctgcacctggtcctgtcaatgggcctgcagctatacgggtttcggcagagacagagggctcgtaaggagtggcgactccatcggggattgagtcacaggcgggcttctcttgaggagcgcgcagtgagtcgcaacccactttgcacactttgcctggaggagaggcgccatccaacagccacaccgtgcggacatctgttttgttgggagtgtattaccgcgtggtgctcgtccaaggccgaatgtcctttatgtagagaaaaattcccccctcagaaactaatatacctgcgccactatcgatag

SEQ ID NO: 234388 - DNA, 981 bp, synthetic construct
  misc_feature 1..981: note = Description of Artificial Sequence: Synthetic coding sequence
  source 1..981: mol_type = other DNA
atggccccagccgctgcctctcctccagaggtcatcagggccgctcagaaggacgagtattataggggcggactacgcagcgctgctgggggagcactacatagcctggccggagcgcgaaagtggctggagtggcgcaaggaagtcgagctcttgagtgacgtggcttattttgggctcactaccctggcagggtaccagactctgggcgaagaatatgtatctatcatccaggtggatcccagccggattcatgtgccctcctccctgcgtagaggggtgctagtcacactccatgcagtgctgccgtatctgttagataaggctcttctcccactcgagcaggaactccaggccgaccccgacagcggtcgacctctgcaaggctcactagggcctgggggaaggggctgctcaggagctcggcgttggatgagacatcacaccgccaccctgacggagcagcaaaggcgggctttgctcagggcagtgtttgtccttaggcagggactagcatgcttgcagcggcttcatgttgcttggttttacatccacggcgtattctatcacttagccaagcggctgactggtatcacatacctgagagttcggagtttgcccggtgaggaccttcgggctagagtgtcgtatagactcctcggcgtgattagcctcctccatctagtgctgagcatgggcttacaactgtacggcttccgtcagaggcagcgagcccgaaaggagtggcgcttacaccgtgggctgtcgcatagacgtgcctccctggaagaaagagcagtgtctcggaatcccctgtgcacactctgtctggaggaaagacgccaccccactgctacgccttgcggtcacctgttttgctgggagtgtatcacggcttggtgctcgagcaaggctgaatgcccgctgtgccgtgaaaaattcccaccccagaagttgatttacctacgccattaccgctag

SEQ ID NO: 234389 - DNA, 744 bp, synthetic construct
  misc_feature 1..744: note = Description of Artificial Sequence: Synthetic coding sequence
  source 1..744: mol_type = other DNA
atggacgcgttcacccgatttactaatcagacacagggtcgggatcgactgttcagagccactcagtatacctgcatgttactgcggtacctgctcgagcccaaagctggaaaagaaaaggtagttatgaaactgaagaaactagagtcctctgtgagcacaggcaggaagtggttcagacttggcaatgtcgtgcatgccattcaagccacggagcagagcatccatgccaccgacctcgtccctcggctctgcttaactttggccaatctgaacagggtgatttatttcatatgcgacaccatcctgtgggtgcggtctgtgggactcacctccggaatcaataaggagaagtggcggacacgagccgctcaccattattactacagtcttctgttgagcttggtgcgcgatctgtatgagatcagtctgcaaatgaaacgggtcacctgcgatcgcgctaaaaaggaaaagagtgcctcacaggaccctctttggttcagtgtggccgaggaagagaccgaatggctacagagttttctccttctacttttccgctcgctgaaacagcaccctccgctgctcttagataccgtgaagaatctatgtgacattcttaatccccttgaccaactgggcatttacaagagcaatcctggtattattggcttgggtggtctggtttcaagcatagccggaatgattacagttgcctaccctcagatgaagctcaaaacccgttag

SEQ ID NO: 234390 - DNA, 1209 bp, synthetic construct
  misc_feature 1..1209: note = Description of Artificial Sequence: Synthetic coding sequence
  source 1..1209: mol_type = other DNA
atgccttggaagttatggcgaggaagtgttggctgcccaggagacctgagctctgacggcttactcttcagactcgggccacccaaaccacccaccgaactggaacccgagcccgagattgagggactgttaacacccgtcctggaggctggggacgtggatgaaggccctgtggcccgaccgctatcgcctacaagattgcagcccgcactaccgccagaggctcagtctgtccccgaactcgaagaggtggccagagttttagctgagatcccgaggcccttaaaaaggaggggctccatggagcaagccccagcggtggcgttacctcctacccacaagaagcaatatcaacagattatcagccggctgttccacagacacgggggtcccggtccgggtggtcccgagccagagctgtccccaatcactgaaggctctgaggccagggccggacctcccgctccagctcctccagcccctatccctccacctgccccttcacagtcctcaccccctgaacagcctcagtccatggaaatgcgctccgtcctccgtaaagccggttccccgaggaaagcaaggcgggcacgcctgaatccacttgtcctcttgctggatgccgcactcactggagaacttgaggttgtccagcaggcagtgaaggagatgaatgacccatcccagccaaacgaagaagggataaccgccctgcataatgccatctgtggcgctaactacagcatcgtcgactttctgataaccgctggtgccaatgtcaactcacccgactcacacggatggacccccctgcattgcgcagcatcctgcaacgacacggtcatttgcatggcgctggttcagcatggcgctgctatatttgctacaaccctttcggacggagccacggcctttgagaagtgcgatccttatcgagaaggctacgccgactgtgcaacgtacctggccgatgtcgagcaaagcatgggacttatgaattcaggtgctgtgtacgccctgtgggattactccgccgagtttggggacgaactgagttttagggaaggcgagtcagttactgtactgaggcgggatggccctgaggagacagactggtggtgggccgctctacacgggcaggagggttacgtaccccgaaactactttggccttttcccgagggtcaaacctcaaagatccaaggtctag

SEQ ID NO: 234391 - DNA, 507 bp, synthetic construct
  misc_feature 1..507: note = Description of Artificial Sequence: Synthetic coding sequence
  source 1..507: mol_type = other DNA
tgataccgaggacgggaccgactgatacgggtgctgggttattgttgccagcttgtgggtggggtgcttgtcgagcagtgccccgcaagaagtgaagtaggtacaagactgcttgtggttagcactcagttgtcccattgtcgaactattctgagactgtttgatgacttggccatgttcgtgtacacaaaacagtatggactgggcgcacaggaagaggatgctttcgtgcgctgcgtgtccgtgctagggaacttagctgaccagctctactacccttgcgaacatgtggcctgggcagccgatgcgagagtgctgcatgtggatagttctcgctggtggaccctgagcaccaccctgtgggcactttccctgcttttgggcgttgcgcgatcactgtggatgctgttgaagctccggcagcgactcagaagccccaccgctccctttactagtatgtaccaggctgcccgagccggtggacaggcagaggccaccaccccgtag

SEQ ID NO: 234392 - DNA, 1212 bp, synthetic construct
  misc_feature 1..1212: note = Description of Artificial Sequence: Synthetic coding sequence
  source 1..1212: mol_type = other DNA
atggctagccagcctcctcccccaccgaagccctgggaaacacggaggattcctggtgccggtcctggcccagggccaggcccaacattccaatccgctgacctcggacccacgcttatgacgcggccaggacagccggctttgactcgggtcccccctccgatcctgcctaggccgagccagcaaactggctcctcttctgttaacactttcaggccggcttactccagcttcagttcaggctacggtgcgtacgggaactcattttatggcggatatagtccctattcttacggctataacggactcgggtacaacagactgcgcgtggacgatctgcccccatcgcgattcgtccagcaggccgaggagtcctcccgcggagccttccagtcaattgaatcaattgtacatgcattcgctagcgtgtccatgatgatggacgctactttctccgccgtgtataactccttccgcgctgtactggatgtggcaaaccactttagccgactgaaaattcacttcaccaaggtgttctctgcattcgccttggtccggactatcaggtacctttatcgacgcttacagcgaatgctcggcctgcgcaggggctctgaaaatgaagacctgtgggctgagtcggagggcacagtcgcttgccttggcgctgaggatcgcgcagccacctcagcaaagtcctggcctatcttccttttcttcgccgttattctggggggaccctacctgatctggaaactgctgagcacacacagtgacgaggtgaccgattcaataaactgggcctccggagaggacgaccatgtggtcgcacgagcagaatacgatttcgctgccgtctcagaggaggaaatctcattccgcgctggtgatatgctgaatttggctttgaaagagcagcagccaaaagtgaggggttggctgttggcctctctggacggacaaaccaccggactaattccggcaaattatgtgaaaatcttaggaaagcgtaagggaagaaaaaccgttgagtctagtaaagtgagtaaacagcagcagtcgtttaccaacccaactctgacaaagggggctacggtggctgacagcctcgacgaacaggaggccgcttttgagtccgtctttgttgagaccaataaggtccccgtcgcacccgattctatcggcaaagacggggaaaaacaggatctatag

SEQ ID NO: 234393 - DNA, 1134 bp, synthetic construct
  misc_feature 1..1134: note = Description of Artificial Sequence: Synthetic coding sequence
  source 1..1134: mol_type = other DNA
atggcttctagcgagcaagctgagcaaccaagccagcccagctccacaccaggctctgagaacgtgctccctcgagaaccgctgattgcaactgctgttaagttcttgcagaattcacgcgtgagacaaagcccgttagctacacgtagggcattccttaagaagaagggactcacggacgaagaaatcgatatggcttttcagcagagcggcacagcggctgatgaacccagttccctcggccctgccacacaggtagttccggttcaaccccctcatctcatctcccagccatactccccagctggctcgcggtggcgcgattacggagctctggccatcatcatggccggaatcgccttcggtttccaccagctgtacaagaagtatctgcttccattgattctgggaggcagagaggaccggaaacagctggaaagaatggaagcaggcctcagcgagctttcaggaagcgtcgcacaaacagtaacacagctccaaacaactctcgcctcagtacaggagctccttatccagcagcagcaaaagatccaggagcttgcacacgagttagcagctgcgaaagctaccacgagtacgaattggattctggaatcacaaaacataaatgagctcaaatccgaaatcaactctctgaaaggattactgttgaacaggcgccagttccccccatcccctagcgcacctaaaatcccgagctggcaaattcctgtcaaaagcccttctccttcctccccagctgccgtgaatcaccactctagcagtgacatcagtcccgtgtctaatgaatctacctcttctagccctggcaaggaaggacattcacccgagggctccaccgtgacctaccacttgctgggtccccaagaggaaggcgagggagtagtcgacgtcaaagggcaggttcgtatggaagtgcagggggaagaggagaagagagaggataaggaggatgaagaggacgaggaggacgacgatgtcagccacgttgatgaggaggattgcttgggagttcaacgcgaagacagaagaggaggcgatgggcagataaacgagcaagtagaaaagctgcgcaggccagaaggcgctagcaacgaatcagagcgcgattag

SEQ ID NO: 234394 - DNA, 942 bp, synthetic construct
  misc_feature 1..942: note = Description of Artificial Sequence: Synthetic coding sequence
  source 1..942: mol_type = other DNA
atggcctttcagcagagcggaacagcagccgacgaaccatccagcctggggcctgcgacccaggtggtgcctgtccaacctccccacctcatttcacagccttatagccccgcaggctcacggtggcgggattacggggcacttgcaataatcatggcagggatcgcctttggatttcaccagctctacaagaagtacctcctgcctctgattctgggaggcagggaggacagaaaacagctagagcggatggaagcgggtctctccgagctgtcgggttcggtggctcagaccgttactcaacttcagacaacactggcaagcgtgcaggagctactgatccagcaacagcagaagatacaagagctcgctcacgagctggccgctgccaaggctacaacctctacaaattggattctcgaatcgcagaacataaatgaacttaagtccgaaatcaattctctgaaaggcctccttctgaatcgccgacagttccccccttccccatccgctcccaagattccaagttggcagatacctgttaaatctcccagcccctctagtcctgccgctgttaaccaccactccagtagcgacatcagcccagttagtaacgaaagcacatccagcagtcccggtaaggaagggcattcccccgaggggtctaccgtgacataccatctgctgggtcctcaggaggagggcgaaggcgtcgtcgacgtgaaggggcaggtcagaatggaagtccagggggaggaagagaagcgagaggataaggaagacgaggaggatgaggaggacgacgatgtgtcacacgtcgatgaagaggattgtctaggcgtgcagcgagaagatagaagaggcggtgacggccagattaatgagcaggtcgagaagctccggagacccgaaggcgcatctaacgagtccgaaagggattag

SEQ ID NO: 234395 - DNA, 1041 bp, synthetic construct
  misc_feature 1..1041: note = Description of Artificial Sequence: Synthetic coding sequence
  source 1..1041: mol_type = other DNA
atggaaaaactgaggctgctcggcctgagatatcaggaatatgtgacacgccatcccgcagcaaccgcccagctagaaacagccgttcgcggatttagctacctgctggccggaagatttgccgattcgcatgaactgtcagagctcgtctactcagcctccaaccttcttgtgctgctgaatgacggcatactgcgcaaagagttgaggaaaaaattacccgtaagtttgagtcaacagaaattactcacttggctatcagtgctggaatgtgtggaagtctttatggagatgggtgctgcaaaggtttggggggaagtgggcaggtggttggtcatcgccctcgttcagctcgccaaagctgtccttcgtatgttgctgctgttatggtttaaggctgggttgcagacctctccacccatagtgcccttggaccgcgaaactcaagcacagccaccggatggagatcactctcctggcaatcacgagcaatcatacgtcggaaagcggtctaaccgggttgtgaggactctgcagaatactccatcccttcactctagacactggggggctcctcagcagcgcgaaggaaggcagcagcagcatcatgaggagctctccgcaactcctactccattagggctgcaggaaaccatagcagagtttttgtatattgctaggcccctgctgcatctgctgagcttgggactctggggccagaggagctggaaaccctggcttctggccggagtggtggacgtgactagtctctccctgctcagtgatcggaaggggttaacccggcgagagcgccgagaactgagacgccgtacgattctcctgctatactacctcctgcggtctcccttctacgatcggtttagtgaggccaggatcttgttcctgttgcaattgttagcggaccatgtccctggggtgggcctcgtcacaacatcccagagagctgcatccccatgtctccctgctcggccacatacccagccgtggagtcctccagcgtttctccccggtcacccctag

SEQ ID NO: 234396 - DNA, 1011 bp, synthetic construct
  misc_feature 1..1011: note = Description of Artificial Sequence: Synthetic coding sequence
  source 1..1011: mol_type = other DNA
atggaaaaactgcggttactgggcctgcggtatcaggagtatgtgacacggcaccccgctgctacagcccagctcgaaactgccgtgcggggattctcctacttattggccggacgcttcgctgattcccacgagctgagtgaattagtctattcggctagtaacctgcttgtcctgctcaacgatggaatcctaagaaaagaactgcggaagaaactgcccgtttcactcagccagcagaaattacttacctggctgagtgttctcgagtgtgttgaagtgtttatggagatgggggcagccaaagtttggggtgaggtgggcaggtggttggtgatcgctttagtccaactggccaaggcagtgctaagaatgctccttctgctttggtttaaggctgggctccagaccagccccccaattgtccccctggacagggagacacaggcacagccacctgatggagatcattcccctgggaatcatgaacaatcatatgtaggcaaaaggagtaatagagtggttagaaccctgcagaatacccctagccttcatagcagacactggggggcaccccaacaacgcgagggcagacagcagcagcatcatgaggaattgagcgctacgccaacgcccctcggacttcaagagacaatcgcagagtttctttatatagccagaccactgttgcacctcctgagccttggtctctggggtcaaaggagctggaaaccttggttgctggccggtgtggtggacgtgacatccctgagtttgctttcagataggaaagggctgacacggagggagcggagagaattgcgaagacgcacaatcctgctactctactacctgttgagatcccccttctatgacaggttctccgaggcacgtatccttttcctgctccaactcctggctgatcatgtgcccggagttggcctggtcacacgacccctgatggactatctaccaacatggcaaaaaatctatttttattcctgggggtag

SEQ ID NO: 234397 - DNA, 900 bp, synthetic construct
  misc_feature 1..900: note = Description of Artificial Sequence: Synthetic coding sequence
  source 1..900: mol_type = other DNA
atggctgccgctgaggaaggttgctccgtcggggctgaggcagacagggagctcgaagagctgttagagtcagcccttgacgatttcgataaggcgaagccttcaccagctcctccaagcaccacaacagctcctgatgcatcaggcccacagaaaagatcccccggtgacaccgccaaggatgcccttttcgccagccaggagaagtttttccaagaactatttgattcagagttagccagtcaggccaccgctgagtttgagaaggccatgaaagagctcgcggaagaggagccccatcttgttgaacagttccagaagctgtcggaagccgcaggtagagtaggctccgatatgacctcacaacaggagtttacttcctgcctgaaggagactctgtccggcttagcaaaaaatgcaaccgatctgcagaattcatcgatgtccgaggaagaactgacaaaggccatggaaggacttggaatggatgaaggagacggcgaggggaacattttacctattatgcagtccatcatgcagaatctgctgtctaaggacgtgctctacccttcgttgaaagagatcacagaaaagtacccagaatggctgcaatcccatcgagagagtctgcctccggagcaattcgagaagtaccaagaacagcattctgtcatgtgcaagatttgcgaacagttcgaagcggagactcctactgacagcgaaactacccagaaggctaggttcgagatggtactggacttgatgcagcaactccaggatctgggtcacccacctaaagagctcgccggagagatgcctccgggtctgaattttgatctagatgccctgaacctaagtgggccacccggagcctccggagaacagtgtctcattatgtag

SEQ ID NO: 234398 - DNA, 708 bp, synthetic construct
  misc_feature 1..708: note = Description of Artificial Sequence: Synthetic coding sequence
  source 1..708: mol_type = other DNA
atggagagcggagctctcgatgactttgacaaggcgaaaccaagtcccgcaccaccgtctacaaccacagcccctgatgcatccggaccccagaagcgatcccctggagatactgcaaaagacgccctctttgctagtcaggagaagtttttccaggaattgtttgactccgaactggcttcacaggccactgcagaatttgaaaaggcaatgaaagagctggctgaggaggagccccacttggtcgaacagttccagaagcttagcgaggccgctggcagggttggctccgacatgacctcccagcaggagttcacttcttgtctgaaggaaaccctcagcggactagctaagaacgctacagacctgcaaaactccagcatgagcgaagaagagcttacgaaagcgatggaggggttgggaatggatgagggcgacggtgaaggcaacattctaccaatcatgcagtccattatgcagaatctgttgtcaaaggatgttctttacccaagcttaaaggaaataacagagaagtaccccgagtggcttcagagccatagagagagcctgccacctgagcagttcgaaaaataccaggagcagcattccgtcatgtgcaaaatttgcgagcagttcgaagctgagactcctacggatagtgaaacgacccagaaagcgcgattcgagatggttctcgacttgatgtag

SEQ ID NO: 234399 - DNA, 840 bp, synthetic construct
  misc_feature 1..840: note = Description of Artificial Sequence: Synthetic coding sequence
  source 1..840: mol_type = other DNA
atggagtctggcgcactggatgactttgataaagctaagccctcccccgcaccgccatctaccacaactgccccagacgcctcggggccacagaaaaggtcccccggagacactgcaaaggacgccctattcgcctctcaggaaaagttcttccaagagctgttcgatagtgagttagcctctcaggccaccgccgagtttgagaaagccatgaaggaattggcggaagaggagcctcatcttgttgagcagttccagaaactctcagaagccgctggccgagtgggctccgacatgacttcccagcaggagtttactagctgtctgaaagagacactgagcgggcttgccaaaaacgctactgacctgcagaacagctccatgtcagaggaagagcttacgaaagcgatggaaggcctgggcatggatgaaggagacggcgaagggaacatcctccctatcatgcaaagcattatgcagaaccttttgagtaaggatgtgctctacccctcactgaaggagataacggagaaataccccgaatggcttcagtcgcatagggagtcccttccaccagagcagtttgaaaagtatcaagaacagcattccgttatgtgcaagatttgcgaacagtttgaggccgagactcctacagattccgagactacccagaaggcccgattcgagatggtgctggatctaatgcagcagcttcaagatctgggacatccacccaaagaactagcaggcgaaatgccccctgggctcaacttcgacctggacgcactcaacctttccggcccacccggagcatctggtgaacaatgcctcattatgtag

SEQ ID NO: 234400 - DNA, 630 bp, synthetic construct
  misc_feature 1..630: note = Description of Artificial Sequence: Synthetic coding sequence
  source 1..630: mol_type = other DNA
atgaaggaactggccgaagaagaacctcacctggtggaacagttccagaaattaagcgaggctgccggtagggttggcagcgacatgactagccagcaggaatttaccagttgtctgaaagaaaccctgtccggtctggctaaaaacgcaactgacttgcagaactcctccatgtctgaagaggaactgaccaaggccatggaaggcctgggcatggacgagggcgacggggaaggcaatattcttcccatcatgcagtctattatgcagaatttgctgagtaaggacgtgctgtacccctctctgaaggagatcactgaaaagtatcctgagtggctgcaaagtcacagagagtccttgcccccagagcagttcgaaaagtatcaagagcagcacagcgtgatgtgcaagatctgtgagcagtttgaggccgaaaccccaaccgactccgagacaactcaaaaggcacgatttgaaatggtgctggatctgatgcagcagctccaggatctgggtcaccctccaaaggagttagctggggaaatgccacccggattgaacttcgatctggacgctctcaatctgagtgggcctcctggggcatctggcgagcagtgcttgatcatgtag

SEQ ID NO: 234401 - DNA, 561 bp, synthetic construct
  misc_feature 1..561: note = Description of Artificial Sequence: Synthetic coding sequence
  source 1..561: mol_type = other DNA
atggccgcagccgaagagggctgctctgttggggctgaagccgaccgcgagttggaagaactgctggaatccgctcttgacgactttgacaaagctaaacccagccccgcacccccttccactacgaccgccccagacgcatccggtcctcagaaaagatcacccggagataccgccaaggatgcattgttcgcttctcaggaaaaattcttccaggagctgtttgacagcgagctcgccagccaggctacagcggagttcgagaaagcaatgaaggagttggccgaggaagagccccatcttgtcgagcagttccagaaactatctgaagccgcagggagagtcgaactccagcacgtgggtagacgggcagatcaggggcacgggggagcccgacatggcagaagaggatggggacgcgaacatccacctcatcacgcagaatattatgccgaaccaacacttcaggggtgtgctgtgcccatcactgagggtgatcatagaaaggtttcaagaatggtggccgaatcgagtgggatctcgacatccagagccgtgtag

SEQ ID NO: 234402 - DNA, 918 bp, synthetic construct
  misc_feature 1..918: note = Description of Artificial Sequence: Synthetic coding sequence
  source 1..918: mol_type = other DNA
atggcctctcggaaggagaatgcaaagtccgcaaatcgagtgctgaggattagccagcttgacgcattggagctcaacaaggcactcgaacagttagtgtggagccagtttacgcagtgctttcatgggttcaagcctggattactggctagatttgagcccgaggtaaaggcttgcctctgggtgtttctctggaggttcactatctactctaaaaatgcaaccgtcgggcagtccgtcctaaatataaagtataagaatgacttcagccctaatttgcgctaccaaccaccatctaagaatcagaagatttggtacgccgtatgtacgatcgggggacgttggctggaggagagatgttatgacctgttccgtaaccatcacctggcttcatttggaaaggtgaagcagtgtgtgaactttgtgatcggactgcttaagctcgggggtttaataaatttcttgatatttctgcaaagaggcaaatttgctaccctcaccgagaggcttctggggatccactccgtcttttgtaagcctcagaatatttgtgaggtcggtttcgaatacatgaacagggaactgctttggcatgggtttgctgagttcctaatctttctcctgcccttgattaacgtacagaaattgaaggctaaattatcctcatggtgtatccccctgactggcgcaccaaacagcgataatacgctggcgacatccggaaaggagtgtgcactgtgcggcgaatggccaaccatgccgcacactatcggttgtgagcacattttctgttacttctgcgccaagtcctcgttcctgttcgacgtctactttacctgtcccaagtgcggcacagaagtgcactcactacagcctctgaaatccggtatcgagatgtcggaggttaatgcgctgtag

SEQ ID NO: 234403 - DNA, 918 bp, synthetic construct
  misc_feature 1..918: note = Description of Artificial Sequence: Synthetic coding sequence
  source 1..918: mol_type = other DNA
atggcttctaggaaagaaaacgctaagagtgctaacagggtactcaggatctcgcagctcgatgcactcgagttgaacaaggcccttgagcagctggtgtggagtcagtttacacagtgcttccatggattcaagcccggacttctggcgaggtttgaaccagaggtaaaagcgtgcttatgggtcttcctgtggagattcactatttattctaaaaacgctactgtcggacagtctgttcttaatataaagtacaagaatgacttttcccctaacctgcgctaccagccaccttctaagaaccaaaaaatctggtacgccgtttgcacaatcggcggacgttggctggaggagcgttgttacgatctcttcagaaatcatcatctcgcatcttttgggaaggttaagcagtgtgtaaacttcgtgataggccttcttaaactgggaggcctgattaacttcctgatatttctacagcggggtaagtttgccactctaaccgaaaggttgctcggcatccatagcgtgttctgcaagccgcagaacatctgcgaagtgggatttgagtatatgaaccgcgagctactttggcacggcttcgcagagtttctgatttttttactgccgcttataaatgtgcaaaaactcaaggccaagctctcttcttggtgcattcctctgaccggcgcaccgaattccgacaacacactggcgaccagcgggaaagagtgtgcactgtgtggcgaatggccgacaatgcctcataccatcgggtgtgagcatattttctgttatttttgcgccaagtcttcgttcctttttgacgtctactttacctgcccaaagtgcgggactgaagtccatagccttcaacccttgaaaagtggaattgagatgtcagaagtgaatgcgctctag

SEQ ID NO: 234404 - DNA, 543 bp, synthetic construct
  misc_feature 1..543: note = Description of Artificial Sequence: Synthetic coding sequence
  source 1..543: mol_type = other DNA
atggcatccaggaaggagaacgcaaaaagtgccaaccgggtgctgaggatcagccaactcgatgcactcgaactgaacaaagcgctggaacagcttgtatggagccaatttacccagtgcttccacgggttcaagccaggcctgctggcacgcttcgaacccgaagtgaaggcttgtctctgggtttttctgtggcggttcactatatacagcaaaaacgctactgtgggccaaagcgtgctgaacattaaatacaaaaatgacttctcacccaacctccgatatcagccgccttccaagaatcagaaaatatggtatgctgtgtgcactatcggcggtagatggctagaggaacggtgctatgacttgtttcggaatcatcacttggccagttttgggaaggttaagcagtgcgttaacttcgttattggcctgttaaaactgggaggcctcatcaactttctgatatttttgcagcgtggaaagttcgccaccctcaccgaaagactcctggggatccattctgtgttctgcaaaccatag

SEQ ID NO: 234405 - DNA, 12 bp, synthetic construct
  misc_feature 1..12: note = Description of Artificial Sequence: Synthetic coding sequence
  source 1..12: mol_type = other DNA
atggcttcctag

SEQ ID NO: 234406 - DNA, 918 bp, synthetic construct
  misc_feature 1..918: note = Description of Artificial Sequence: Synthetic coding sequence
  source 1..918: mol_type = other DNA
atggcctcacggaaggagaatgccaagtcagccaaccgagtgctgcgtataagccagctggacgctctggaactgaacaaggcactggagcagcttgtatggtcccagttcacgcaatgcttccacggctttaaacccggactcttggctcggttcgaaccggaggttaaggcgtgtttgtgggtgttcctctggcgattcaccatctactctaaaaatgctaccgtcgggcagagcgtcctgaatattaagtataaaaacgattttagtcccaatttgaggtaccagcccccttcaaagaaccagaaaatctggtacgccgtgtgtacaattggaggtcgctggctggaagagagatgttacgatctattcaggaatcatcaccttgcctcattcgggaaggtgaagcagtgtgtgaatttcgtgattggcctgctgaagctgggaggtttgattaattttctgatctttttgcagagggggaagtttgccaccttgacagagcggttgctcggtattcacagcgttttctgtaaaccacagaacatctgcgaggttggattcgaatatatgaatcgcgagctactatggcacggattcgccgagtttctcatttttctcctcccgcttataaacgtgcagaaactgaaggccaagctgtctagctggtgtattccgttaaccggggcacctaattccgacaacacattggcaacctctgggaaggaatgcgctctttgcggcgagtggccaaccatgccacacacaatcggctgcgagcatattttttgttacttctgcgctaaaagcagcttcctgttcgatgtgtactttacctgtcctaaatgtggcaccgaagtacactccctccaacccctgaaatctggaattgagatgagcgaagtaaacgcattatag

SEQ ID NO: 234407 - DNA, 918 bp, synthetic construct
  misc_feature 1..918: note = Description of Artificial Sequence: Synthetic coding sequence
  source 1..918: mol_type = other DNA
atggcctctagaaaagagaatgcaaaatctgcgaatagagttctaaggatatcacaactggacgctctcgaacttaacaaggcactggaacagcttgtttggtctcagttcacgcaatgttttcatggatttaagccgggacttctggcaagatttgaacctgaggtgaaggcttgtctgtgggtcttcctgtggagattcaccatctactccaagaacgcaaccgttggccagtccgtgctgaatatcaaatacaaaaacgatttctcacctaacctgcggtaccaacctcctagtaagaatcagaagatctggtatgccgtatgtaccatcggcggacggtggctcgaagagcgttgctatgatttattcagaaatcatcacctagccagctttggtaaggtgaaacagtgcgtgaattttgtgatcggtttgttgaagctgggcggtctgatcaacttcttaattttccttcagaggggtaaatttgccactctcacagagagacttttaggaatccattcagttttttgtaagcctcagaacatctgcgaggtcggtttcgagtacatgaaccgcgagctgctgtggcacggattcgccgagtttctcatatttctattgcctttgataaacgtccagaaactcaaggcaaaactttcttcatggtgcattccactgaccggagcgcctaactcagacaacaccttagcaacctcaggcaaagagtgtgctctgtgcggcgagtggccgaccatgccacacacaattggttgtgagcacattttttgttacttttgtgcaaaatccagcttcctgtttgacgtatattttacgtgtccaaaatgcggaaccgaagtgcattccttgcagcctctcaaaagcggaattgaaatgtctgaggttaatgcactgtag

SEQ ID NO: 234408 - DNA, 918 bp, synthetic construct
  misc_feature 1..918: note = Description of Artificial Sequence: Synthetic coding sequence
  source 1..918: mol_type = other DNA
atgaaaagcgacagtagcaccagcgccgctcccctaaggggcctgggcggaccactcagaagtagcgaaccggtccgagctgtgcccgctcgagctccagccgttgatttgctggaggaagctgccgatttgcttgtagtccacctggatttcagagccgctttggagacttgcgagcgcgcatggcagtctcttgctaaccatgccgttgcggaggaaccagccggaacctccctggaggttaaatgcagcctgtgcgttgttgggatccaagccctcgcggaaatggataggtggcaggaagtgctgtcatgggtgctgcagtactaccaggtgcccgaaaagctacccccaaaagtactcgagctgtgtatattgctgtattcaaaaatgcaggagcctggggctgtcttggacgttgtaggggcatggctgcaggatcccgctaatcagaatctgccagagtacggggcactggctgaatttcacgtccagcgggtgttgctgccgcttggatgcctaagtgaggccgaagagcttgtcgtggggtcagctgcctttggagaagagcggagactggatgtgcttcaagcgatccacaccgcaagacagcagcagaagcaggagcattcggggagtgaagaggcacaaaagcccaacctagagggctccgtctctcataaattcttatcactacccatgctcgtgaggcagctctgggacagtgcggtctctcacttcttttctctgcctttcaagaagagcctcctcgctgccctcatcctctgcctgctggtcgtgcggtttgaccctgcttctcctagctcattacactttctttacaagcttgcccagctcttcagatggattaggaaggccgcttttagccgactttaccagctgcgcatccgggactag

SEQ ID NO: 234409 - DNA, 918 bp, synthetic construct
  misc_feature 1..918: note = Description of Artificial Sequence: Synthetic coding sequence
  source 1..918: mol_type = other DNA
atgaaaagcgactcctccacatccgcagcccctctacgcggactagggggtcctctgcgcagcagcgagcccgtccgcgcagttccagcccgagccccagcagtggatctgctggaagaagctgctgacttgctggtggtccatctcgatttcagggcagctctggaaacctgtgaacgcgcatggcaaagtctcgccaatcatgctgttgcagaagagcctgctggtacctctcttgaagtgaagtgcagcttatgcgtggtcgggattcaggccctggcggaaatggacaggtggcaggaggtgctctcttgggttcttcaatattatcaggtgccggagaagcttccacctaaagtgttagaactgtgtatcttactttattcaaagatgcaggagccaggtgcagtgctggacgttgtaggggcttggctacaagaccccgcaaaccagaatctgcccgaatatggagctttagccgagtttcacgtacagcgcgtgttgctgccactgggatgtctgtccgaggcagaggagctggtggtggggtccgccgcatttggcgaggagcgacgtctggacgtgctgcaggcaatccatacagctagacaacagcaaaaacaggaacatagcggctcagaggaagcacagaagccaaacctcgagggctcagtctcccacaagttcttgagcctgcctatgctggtgagacagctctgggattccgcggtctcacactttttcagcctgccattcaaaaaaagcttgctcgccgcactgatattgtgcttactggtcgtgagatttgatccagccagtcccagcagccttcatttcctctacaagttagcgcagctgttccggtggatccggaaggcagcctttagccgcttatatcagctacgaattcgggactag

SEQ ID NO: 234410 - DNA, 1098 bp, synthetic construct
  misc_feature 1..1098: note = Description of Artificial Sequence: Synthetic coding sequence
  source 1..1098: mol_type = other DNA
atgaagagtgatagtagtacctcggccgcacctctgagaggacttggaggcccactgcgaagctctgagccggtcagagctgtccctgcacgtgccccagctgtcgacttactggaggaggcagctgatctcctggtcgtgcatctggattttagggctgccctcgagacctgcgaacgggcttggcaatctctcgccaaccatgctgttgcggaggaacctgcgggtacttcactggaagtcaaatgttctctgtgcgtcgttggcatacaagctctggccgagatggatcgctggcaggaggtgctgtcatgggtgctgcagtactaccaagtaccagagaaactcccacctaaagttctggagttgtgtatacttctatacagcaaaatgcaagagcctggcgctgtgcttgacgtcgtgggggcttggctgcaagaccccgctaatcagaacctacccgagtacggggctctggctgagtttcatgtgcagagagttttgctgcctctgggatgcctgagcgaagctgaggaactggttgtagggtctgcggcatttggagaggagcggaggctcgacgttctgcaggctatccacacagcacgacagcagcagaaacaggagcattctgggtctgaggaagctcagaagccgaacctggaggggagtgtgtcccacaaattcctgagtctgcctatgctggtgcggcaactctgggactctgccgtgagtcattttttcagcctgccttttaaaaagtccctgctcgccgcactcatcctgtgcctcctagtcgtaagattcgatcccgcatctcctagcagcctacacttcctgtacaagctggcccaactgttcgccggatcgggcaggctccatttcttagccagcacatctagtgctagtgtcaccgaaggaccatgcgcacctcaaccactttgttcttctcgcccttggccccagaagcagagtgatcgggcaacacatcctcaagctccactgggcaagtgggaccaaccaaatctcgccgagtgtaccgtatcttgctgccttggcgctctatcctttgccccttacttcggctggtctcgctag

SEQ ID NO: 234411 - DNA, 771 bp, synthetic construct
  misc_feature 1..771: note = Description of Artificial Sequence: Synthetic coding sequence
  source 1..771: mol_type = other DNA
atgaagtcagattcttccacctctgcagcccctctgcggggattgggtggcccactgaggtctagcgaacctgttagggccgtgcccgcaagggcccctgccgttgacctgctagaggaggccgctgacctgttagtggtacatcttgatttccgtgccgctctggagacttgtgaacgcgcttggcagtcgctggccaaccatgccgtcgccgaagaaccggcaggaactagtctggaggttaagtgttctctctgcgtagtaggcattcaggcccttgccgagatggaccgttggcaagaagtgttgagctgggtgctgcagtactatcaggtcccagagaaactccctcctaaggttctggagctgtgcatccttctgtactccaagatgcaggagccaggagcagtcctagatgtcgtgggagcatggctccaggaccctgctaatcagaacctccctgagtatggcgctctggccgagttccacgtccagagggtgctgctcccccttggttgtttatccgaagccgaggagttggtcgttggatctgctgcttttggagaagagaggaggctcgatgttttgcaggcgatccacaccgcacgacagcaacagaagcaggaacactctggatccgaagaagcccagaaacctaaccttgaggcttctccctcctctttgcactttctgtataaactcgcacaattatttcgctggataagaaaagcagccttctcacgtctgtatcaactacgcatccgcgattag

SEQ ID NO: 234412 - DNA, 549 bp, synthetic construct
  misc_feature 1..549: note = Description of Artificial Sequence: Synthetic coding sequence
  source 1..549: mol_type = other DNA
atgctcagatcggtctggaatttcctgaagcgccacaagaaaaagtgtatcttcctgggcaccgtactgggagtgctctccatgcttccaacactgagagaggccctgatgcagcagctgaactcagaatccctaaccgccctattaaaaaacaggccaagcaacaaattagaaatctgggaagacctgaaaattatcagttttacacgcagcaccgttgctgtttatagcacctgcatgctcgtcgtcctgctccgcgtccaactcaatatcatcggaggctacatttacctggataacgcagctgtcgggaagaacggaacgactatacttgctccaccagatgtccagcagcagtacctctctagcatccagcacttactgggtgacggtctgacagaactcatcaccgtgataaagcaggccgtgcagaaggtgctgggctcagtgtctctcaagcatagcctttccctcttggacctggagcagaagctgaaagaaattaggaaccttgtcgagcaacacaaatccagctcatggattaattag

SEQ ID NO: 234413 - DNA, 1122 bp, synthetic construct
  misc_feature 1..1122: note = Description of Artificial Sequence: Synthetic coding sequence
  source 1..1122: mol_type = other DNA
atgctccggagcgtgtggaacttcctcaagcgacacaagaagaagtgtatattcctgggaactgtcctcggcggagtctatattctcgggaaatacggccagaagaaaatccgcgaaatccaggaacgcgaagcggcagagtacatagctcaggccaggcgccagtatcactttgagagcaatcagcgcacgtgcaacatgaccgtgctctcaatgttgccaaccctcagagaagcgctgatgcagcagcttaactcagaaagcctgactgctctgttgaagaaccgtccgagcaataaactggagatttgggaagatctcaagataatcagcttcactcggtctaccgttgcagtatactccacatgtatgcttgttgtgctgctgagagtgcagctcaacataattggagggtatatctatttagataacgctgccgtaggcaagaacggcactaccatcctggctcctccagatgtacagcaacagtatctctcttccatccagcacttactgggtgacggcttgaccgaactgataacggtgatcaagcaggcggtccagaaggtgctgggatctgtaagcctcaagcactcactgtcactccttgatctggagcaaaagctgaaggaaattcgcaatctggtggagcagcacaagtcaagctcatggatcaataaggatgggtccaaaccccttctgtgtcactacatgatgcccgatgaggaaaccccacttgccgtacaagcttgtggcctgtctccacgcgacattactacaataaaactgctaaacgaaacacgggatatgctggagtcgcctgatttctccaccgtgctgaatacatgtttgaatcgcggattttctaggttgctggataacatggcagaattttttaggccaaccgagcaagacctccagcacggtaatagcatgaattctttgtcctcagtgagtctgcctctggccaaaatcatccctatagtcaacggtcagattcactctgtctgcagcgagacaccctcccattttgtacaggatctgctcacaatggaacaggtaaaggacttcgcagccaatgtctatgaagcctttagtacgccccaacaactcgagaagtag

SEQ ID NO: 234414 - DNA, 549 bp, synthetic construct
  misc_feature 1..549: note = Description of Artificial Sequence: Synthetic coding sequence
  source 1..549: mol_type = other DNA
atgctgcggagcgtctggaacttcctgaaaagacacaagaaaaaatgcatctttctgggaacggtgctgggagtactcagcatgctgcctactttacgcgaagccctgatgcaacagttaaatagcgagtccctcactgctctactgaaaaatagaccctccaataagctggaaatttgggaggatctgaagattatttccttcacacgcagtaccgtagccgtgtattctacttgcatgctcgtcgtgctcctccgagtccagctcaatatcatcggtggttatatctacttagacaatgctgcagttgggaagaacgggacaaccattctggcccctcctgacgtgcagcaacaatatctgtcaagcatccagcacctccttggggatggactgactgagctgatcacagttatcaaacaggccgtccagaaagttctggggtctgtgagcctcaagcactctctgagtctcttagacctggagcagaagctcaaggagatccgcaacctggtggagcaacacaaatcaagttcatggatcaactag

SEQ ID NO: 234415 - DNA, 1809 bp, synthetic construct
  misc_feature 1..1809: note = Description of Artificial Sequence: Synthetic coding sequence
  source 1..1809: mol_type = other DNA
atggccatgcgagagctggtcgaagccgaatgtggcggtgcaaatccactaatgaagctggctggacattttactcaggataaagctctgaggcaggagggcttgagaccaggaccatggccccctggagcgccagctagcgaggccgcatcaaagcccttaggggtcgcctcagaggatgaattggtagccgagttcctccaagaccagaacgctccgctggtatctcgagctccacagacatttaagatggacgatctgttggccgaaatgcagcagatcgagcagagcaattttagacaggcaccacagcgcgctccaggagtggcggatctcgcactgtcggaaaactgggctcaggagtttctcgccgcaggcgatgctgtcgacgtcactcaagattacaacgaaactgactggtctcaggaattcattagcgaagtgacagatccactaagcgtatccccagccaggtgggccgaagagtacctggagcaatccgaagaaaagttgtggctgggcgaacctgagggcacagcaaccgacagatggtacgatgagtatcaccctgaagaagacctccagcacacggctagtgacttcgttgctaaggtcgatgatcctaagctggccaattccgagggcacatccgatgcttgggtggaccagttcactcgaccagtgaacacgtccgctttagacatggaatttgagcgagctaaaagtgccatcgagagcgacgttgatttctgggataaactacaggcagaacttgaggaaatggctaagagggatgccgaagcccatccctggctatctgactatgacgatcttacttcagcgacatacgacaaggggtatcaattcgaagaagagaatccgctgcgcgaccacccgcagccttttgaagaagggctaaggcggttacaggagggtgatctgccaaacgcagtcctgctgtttgaagcggctgtacaacaggatcctaagcacatggaagcatggcaatatctcgggaccacacaggctgagaatgagcaggagttgctggccatcagcgcattacgccgttgtctggagcttaaacccgataaccagaccgcccttatggccctggctgtgtcctttaccaatgagagcctccagaggcaagcctgtgagacactgagggattggctgaggtacaccccagcctatgcccatttggtgacccccgctgaggagggagccggaggggctggactcgggcctagtaagcggatcctgggatcactcctctctgatagtttatttttggaggtgaaagagctgttcctagccgcagtgcgactggatccaacatcaattgaccctgatgtgcagtgcggtttaggggtgctgtttaacctgtcaggtgagtacgacaaggccgtggactgttttaccgccgctttaagcgtgaggcctaatgattacctcctctggaataaattgggtgccactctcgccaacggcaatcagagtgaggaagccgtcgccgcatacaggagggcgctcgagctccagcccggatatatccgcagccgctataatctgggcatcagttgtattaacttgggtgctcaccgtgaagcggtggagcacttcctggaggctctgaacatgcagcgcaagtcccggggaccaaggggggaggggggagccatgagtgaaaatatctggtctaccttgaggctggccttgagcatgctgggccagtccgacgcatatggagctgctgacgcccgagaccttagcacgctcttgacaatgttcggcctgccccagtag

SEQ ID NO: 234416 - DNA, 1896 bp, synthetic construct
  misc_feature 1..1896: note = Description of Artificial Sequence: Synthetic coding sequence
  source 1..1896: mol_type = other DNA
atggccatgcgcgagcttgtagaggccgaatgcggcggtgccaatcccctcatgaagttagccggacatttcacacaggacaaggccctgcgacaagagggactcaggccaggcccatggcccccaggagctccggcatcagaggccgcttccaagcccctgggtgttgcttccgaggatgaactggtggccgaattcctgcaggatcagaacgctcctctggtctctcgcgctccacaaacatttaaaatggacgatctgctggcagagatgcagcagatagagcagtccaacttccggcaggcccctcagagggcccctggagtagccgatctagccctgtctgagaattgggcccaggaattcctggcagcaggagatgccgtggacgttacccaggactataatgagacagattggagccaagaatttataagcgaggtgactgatcccttgtcggtgtccccagccagatgggcagaagaatacctggagcagtcagaagagaaactgtggcttggcgaaccggagggcactgctaccgacagatggtacgatgagtatcaccccgaggaggatttacaacataccgcttcggatttcgtcgccaaggttgatgaccctaaactggccaattccgaatttctaaagtttgttcggcagatcggtgaagggcaagttagcctggagtctggtgcaggctccgggagagcccaggcggagcagtgggctgctgaattcattcagcaacaggggacctccgacgcatgggttgaccagtttacaagaccggttaatactagtgcgcttgacatggagtttgagcgtgccaaaagtgccatagagctccaggctgagctcgaagaaatggccaagagggatgcagaggcccatccatggctttcagactacgacgatctaacatccgcaacctacgacaaaggttaccagtttgaggaggagaatccactaagggatcacccgcagcctttcgaagaggggcttcgtcgactgcaagagggcgacctgcccaacgccgtcctcctgttcgaagccgcagtccaacaggatcctaaacatatggaagcgtggcagtacctgggtacgacgcaggcagagaatgagcaggaactgcttgccatctctgccctgaggcgttgtctagagctgaaaccagataatcaaaccgccttgatggccctggctgttagcttcactaacgaaagcctacaaaggcaagcctgtgagactttgcgcgactggctcagatacacacccgcatacgcccatttagtgacccctgctgaggagggggcaggcggtgccggactggggccttcaaaacgcatactcggtagtctgctgagcgactcgctctttctggaagttaaagagctttttcttgctgcagtcaggctggatccaacgtctatcgacccagacgtgcaatgcggcttaggagtgttgtttaacctctccggggagtacgataaggccgtggattgttttacagccgctctaagtgtgagaccaaacgattacctcttatggaacaaacttggcgctaccctggctaacgggaaccagagcgaggaagccgtggccgcataccggagggctctagaactgcagccagggtacataaggtcacgttacaatctgggaatttcctgtatcaacctgggagcgcacagagaagcagtcgaacatttcttggaggcactgaacatgcaacgaaaatccagagggccaagaggtgagggcggagccatgtccgaaaacatctggagcaccctccgactcgccctaagcatgctgggccagagcgacgcatacggagctgctgacgcccgagatctgtccacgttgttgacaatgttcgggctccctcaatag

SEQ ID NO: 234417 - DNA, 1233 bp, synthetic construct
  misc_feature 1..1233: note = Description of Artificial Sequence: Synthetic coding sequence
  source 1..1233: mol_type = other DNA
atggccatgagagagctggtcgaggcggaatgtggtggcgcaaatccattgatgaagctggccggacacttcacccaggacaaagctcttcgccaggaaggtcttcgcccaggtccgtggccgccaggcgctccggctagtgaggcagtgtcagtattggaggtcgaatcccccggtgccgcttccgaagccgcatcaaagcccctgggtgtggctagtgaggatgaactcgtggctgagttcctgcaggaccaaaacgcacctctggtgtcccgcgcaccacagaccttcaagatggacgatctgctggcggagatgcagcagatagagcagtctaactttagacaggcacctcaacgcgctcccggagtcgccgacctagcattgtccgaaaactgggcacaggagtttctggcggcaggagatgctgtggatgttacccaggattataacgagaccgattggtcccaggagtttatttcagaagtcacagatcccttgtcagtatccccggcacgatgggcagaggagtaccttgagcagtctgaggagaaattgtggctaggtgagcccgagggcactgctacggacaggtggtacgatgaataccaccctgaggaggatctgcagcacaccgccagtgactttgtggcgaaagtggatgacccaaagctggcaaattctgaaggcaccagtgacgcgtgggtggaccaatttactcgcccagtgaacacaagcgccctcgacatggaattcgaaagggccaagtcagcgattgaactgcaggcggagctcgaggagatggcaaagcgcgacgcagaagcacacccctggctctctgactacgacgatttaacaagtgccacatacgacaaagggtatcagtttgaggaagagaatcctcttcgggaccacccgcaaccgtttgaggagggcctaaggcgtctgcaggagggagacttgcctaatgcagtgctgctgttcgaggcagccgtccagcaagacccgaaacacatggaagcctggcagtatctggggacgacccaggccgagaacgaacaggagctactggccatctccgctcttaggcgctgccttgagcttaaaccagataatcaaacggcattgatggctctggctgtgagctttacgaatgaatctctccaaaggcaggcctgcgagaccctgagggactggctgcgctataccccagcatatgctcacctggtgtag

SEQ ID NO: 234418 - DNA, 1983 bp, synthetic construct
  misc_feature 1..1983: note = Description of Artificial Sequence: Synthetic coding sequence
  source 1..1983: mol_type = other DNA
atgctactgtgcagagctcatcgagtgcttggcctcagaggcgctcgagagttggccgtgaccatggctatgagggagctggtggaggctgagtgcggcggagccaaccccctgatgaagctggcaggccacttcactcaagacaaggcgctgcggcaagaaggccttagacccggaccatggccgccaggcgcaccagcctccgaggcagcttcaaaacctttaggcgtagccagtgaagatgagttggttgccgaattcctccaggatcaaaacgcacccctcgtgagcagggcccctcagaccttcaaaatggacgatcttctcgcagagatgcagcagattgagcagtctaattttcggcaggccccacagagggctccgggagtggctgatctcgcgttaagcgagaactgggcacaagaatttctcgccgctggcgatgccgtggacgtgactcaggattacaatgagactgattggagtcaggagtttatctccgaggttaccgaccccctatccgtctctccagcgaggtgggctgaggagtacctagaacagagcgaggaaaaactgtggttgggagagcccgaagggacagctactgatcggtggtatgatgaataccatccagaagaagatctgcagcatactgcctctgactttgtggcgaaggtggacgatcccaaactggctaacagtgaattccttaaatttgtgagacagattggagaagggcaagtgagtctggaaagcggagcagggtctggcagagcacaagcagagcagtgggccgctgagtttattcaacaacaaggtacgtcagacgcgtgggtcgaccagtttacccgcccagtgaataccagcgccctggacatggagtttgaacgcgctaagtcagccattgagtccgacgtggatttctgggacaagctgcaggctgagctagaagagatggccaagagagatgccgaggcacacccatggctcagcgactacgacgacctaacaagcgccacctatgataaggggtatcagtttgaagaagagaatcctctgcgtgaccatccacagccatttgaagagggcctccggcgactgcaagaaggcgacctccctaatgcggtgctgctgttcgaggcagccgtgcagcaggatcctaagcacatggaagcatggcagtacctcggaactacccaggcagaaaacgagcaggaattattggccataagcgccctgcgaaggtgcctggagttaaaacccgataatcagacagccctgatggccctcgctgtgagcttcacaaatgagagtttacaacgacaggcatgcgagaccctgagggattggttgcgctatactcctgcttatgctcacttagtcacccctgcagaagagggtgccggaggggctgggttgggcccttctaagcggattttgggctctctgctctcggactctctcttcctcgaggtcaaagagctttttctggccgctgtgcgactcgaccccacatcaatcgatcccgatgtacaatgtggacttggggtgttatttaatttgtcgggagagtacgataaagcagttgattgcttcacagccgctctcagtgtccggcctaacgactatttactctggaacaagttgggcgcaacattggccaacggcaaccaaagcgaagaagcggtagccgcataccgaagggctttggagctgcagccagggtacatccgttcccgatacaatcttggtatttcttgtatcaatctgggggctcacagagaagctgttgaacactttttagaggcactgaacatgcagcgcaagagccgaggacctcgcggtgagggaggagctatgagtgagaatatctggtccacactccggttggctctttcgatgctcgggcagagcgacgcctatggcgctgcggatgcacgcgatctctctacactactgacgatgttcggtctgccacaatag

SEQ ID NO: 234419 - DNA, 1920 bp, synthetic construct
  misc_feature 1..1920: note = Description of Artificial Sequence: Synthetic coding sequence
  source 1..1920: mol_type = other DNA
atggccatgcgggaactggtcgaggcggagtgtggcggtgccaaccccctgatgaaactggcaggacacttcactcaggacaaagcactgaggcaggaaggtttgagacccggaccctggccacccggtgcccctgccagcgaagctgccagcaagccgctcggcgtcgcttcagaggacgagctagtggccgaattcttacaggatcagaatgcacccctcgtatcccgggctcctcaaacttttaagatggacgacctcctggctgagatgcagcagatcgaacaaagcaatttccggcaggccccacagagggcccctggggttgcagacttggccctcagtgaaaattgggcacaggaattccttgcggcaggtgacgcggtggacgtgacccaggactataatgaaactgattggtcacaggagttcatatcagaggtgacagatcccctcagcgtgagtcccgctagatgggccgaggaatatctggagcagtccgaggaaaaactgtggctgggagagccagaagggacagccacggaccgatggtacgatgagtatcatcccgaggaagacctgcagcacactgcctctgactttgttgccaaggtcgatgatcccaaactggctaactccgaattcctcaagtttgtccgccaaatcggcgagggccaggtcagcctcgaaagtggagcaggaagcgggagggcccaggccgagcagtgggctgcggagtttattcagcaacaggggaccagcgatgcttgggtggatcaatttaccaggcctgtgaacacatcggctcttgacatggagttcgagagagccaaaagcgcaatcgaaagtgatgtcgatttctgggataagctgcaggcagagctggaagagatggccaagagggatgccgaagcccatccttggctgagcgactacgacgacctcacatctgctacatacgataagggctaccagtttgaagaggagaatccactgcgtgatcacccacagccgtttgaggagggccttagacgcctgcaggagggcgacctgccaaacgccgtgctcttgtttgaagctgcagtgcagcaggatccgaagcacatggaagcctggcagtacttgggcaccacccaggctgaaaacgagcaggagctgctcgccattagcgctctacgaagatgtctggagctgaagcctgataatcagaccgctctcatggcgttagcggtgtcttttacgaatgagtcattgcagcgccaggcttgtgagaccttacgcgactggctgaggtacacgccagcctacgctcacctggtcacacccgcagaggaaggagccggaggcgctgggttgggcccttctaagcgcatccttggttctttattgagtgactccctgttcctggaggtgaaggagcttttcctcgccgctgttcgcctcgatcctaccagcatcgaccccgatgtgcagtgcgggttaggggtgctattcaacttaagtggtgagtacgataaagctgtagactgctttacagccgctctgtccgtgcggccaaatgattacctcctctggaataagctcggggctacgctggccaatgggaaccagtccgaggaagccgtagcagcataccggagagcgctggaactccaacctggatacatccgcagcagatacaatcttggcatttcttgcatcaaccttggggctcatagagaggcggtcgagcactttctggaggctcttaatatgcagagaaaaagccgagggcctaggggggagggcggagcaatgagcgagaatatctggagcacattgagattggcgctgtctatgttaggtcagtcagacgcttatggcgctgctgacgccagagacctatccactctgctcaccatgttcggtttgccccagtag

SEQ ID NO: 234420 - DNA, 1965 bp, synthetic construct
  misc_feature 1..1965: note = Description of Artificial Sequence: Synthetic coding sequence
  source 1..1965: mol_type = other DNA
atggcgatgagggaactcgtggaagctgagtgcgggggagccaacccactcatgaagctcgctggccacttcacacaagataaagccctgcgacaggaggggctgcgcccaggtccctggcctccaggagcacctgcatctgaagcagtgagtgtgcttgaagtcgagagccccggagctgctagcgaggccgcaagtaaacccttaggcgtggcctcagaagacgagctggtggccgaattcctgcaggatcaaaatgcacccctcgtaagccgggcaccgcagactttcaagatggacgatctccttgcggaaatgcagcagatagagcagtcgaatttcaggcaggcaccacagagagcccctggggtcgccgatctggccctgtcagagaactgggctcaggagtttctggcggcaggtgacgcggttgacgttactcaagactataacgaaaccgattggagccaggagttcatcagcgaggtaactgatccactctcagtgtcacccgctcgatgggccgaggagtatctggagcaaagtgaggaaaaactttggctgggtgaaccagagggtaccgcgaccgataggtggtatgacgagtaccacccagaggaggacttacagcatactgcgagcgattttgttgccaaggtggacgaccccaagctggccaattccgaattcctgaagttcgtgcgccagatcggggagggccaagttagcctcgagagtggagccggaagtggacgtgctcaagccgagcaatgggctgccgaattcatccagcagcagggcacttcggacgcttgggtcgatcaattcaccaggccagtgaatacctccgctctagacatggaatttgagcgggcaaagagcgccattgaatcagatgtggacttttgggacaagctgcaagcagaattggaggagatggcgaaaagggacgcagaggcccatccctggcttagcgattacgatgacctgacctctgctacctacgacaagggctaccagttcgaagaagagaaccccttgagggaccaccctcaacccttcgaggaagggctgagaaggctccaggaaggtgatctgccaaatgctgttctcctgtttgaggccgcagtgcagcaggatcctaagcatatggaggcgtggcagtacctaggaaccacccaggccgaaaacgaacaggagttgctcgccataagcgctttgcggagatgtttggagctcaaacctgataaccagacagcacttatggcgctggctgtctcgtttaccaacgagtctctacaacgacaagcttgtgagaccctgcgtgactggctcaggtatacgcctgcctatgcccacttagtgacacccgcagaggagggagcagggggtgccggacttggcccttccaagcgcatcctaggatccttgctctccgatagcctgtttctggaggttaaggagctgtttcttgccgctgtcaggttagaccccacaagcatcgatccagacgttcagtgtggactgggcgtgttgtttaatttgtctggggagtatgataaggccgtagactgcttcaccgccgctttatccgttagaccgaacgactatctgctttggaataagctaggtgcgaccctggctaatgggaatcagtccgaggaagccgttgccgcatacaggcgcgcactggagctccagcccggatacatcagaagcaggtacaacctagggatttcttgtattaatctaggcgcacacagggaggctgtggagcattttctggaggccttaaacatgcagaggaagagtagggggcctagaggagagggcggtgccatgtctgagaatatctggtcgacccttagacttgcactgtctatgctcggtcagtccgacgcttacggggctgccgacgctagggacctgtccactctgcttaccatgtttggcctgccccagtag

SEQ ID NO: 234421 - DNA, 1920 bp, synthetic construct
  misc_feature 1..1920: note = Description of Artificial Sequence: Synthetic coding sequence
  source 1..1920: mol_type = other DNA
atggctatgcgagaattagtagaagccgaatgcggaggcgcaaacccactaatgaaattggcaggccacttcacccaggacaaagccctgcgacaggagggtctccgacccggaccatggccccctggcgcacccgctagcgaggcagcttcaaaaccactcggtgtcgcttcggaggacgagttagtggctgagttcctgcaggaccaaaacgctccactcgtgagccgcgctcctcagaccttcaaaatggacgatttgctggctgaaatgcaacagatcgaacagagcaatttccgccaggcacctcagcgggcaccaggagttgcggatctcgccctgtccgaaaattgggcccaggaattcctggctgcgggagatgcggtggatgtcactcaggattacaatgagactgactggtcccaggagtttatctcagaagtcaccgatccgttgagtgtatcccccgcaaggtgggccgaggagtacctggagcaatcagaggaaaaactctggcttggtgaaccagagggaaccgccaccgataggtggtacgacgaatatcatcccgaagaagaccttcagcatactgcctcagatttcgtggcaaaagtggacgaccctaaattggcaaatagcgagttcctgaaatttgtacgccagattggtgagggtcaggtgtctcttgaaagcggggcaggcagcggcagggctcaggcagagcagtgggctgccgagttcatacagcagcaagggaccagcgatgcatgggtggaccaattcactaggcccgtcaatacaagtgctttggacatggagtttgaacgtgccaagtcagcgatcgaatccgacgtcgacttctgggataagctgcaagctgaactcgaggagatggccaaaagagacgcagaagcccacccctggctcagcgattacgacgatcttacttctgccacgtatgataaagggtaccaattcgaggaagagaaccccctccgggatcatcctcagccctttgaggagggcctgcggcgtctgcaggagggtgacctgccaaacgctgtactgctttttgaggccgcagtacagcaggacccaaagcatatggaggcgtggcagtacttaggcacaacacaggccgaaaacgagcaggaactgttagctatcagcgcactccggcgatgccttgaattgaagcccgacaaccagaccgccctgatggctctcgcagtgtctttcacaaacgagtccctacagcggcaggcctgcgagaccttgagagactggttgagatacaccccagcttatgcccatctcgttacaccggctgaggagggtgccggaggtgccggattggggcctagcaagcgcatacttggaagtctgctttccgactccctgtttttggaggtgaaagaacttttcctcgcagcagttaggctcgaccctaccagcattgatccagatgtccagtgtggcttaggagtcctcttcaacctgtctggcgaatatgacaaggccgtagattgcttcacagctgccctgtccgtgcggccaaatgactatctgctgtggaataagttgggagccaccctggcaaacggcaatcagtctgaggaagctgtcgccgcatacaggcgggcacttgaactgcagccgggttacatccgatcacgatataatttgggcatttcatgtattaacttaggagctcaccgagaggctgtggaacacttcctcgaggctctgaacatgcaacgcaagagcaggggacccaggggagagggcggagcgatgagtgagaacatctggagtacattacgcctagccttatccatgttggggcagagcgacgcatacggcgcagctgacgctcgggatctctcaaccctcctaactatgttcgggctgccccagtag

SEQ ID NO: 234422 - DNA, 345 bp, synthetic construct
  misc_feature 1..345: note = Description of Artificial Sequence: Synthetic coding sequence
  source 1..345: mol_type = other DNA
atggctatgagggaattggtcgaggccgagtgcggcggagccaaccctctcatgaagctcgcaggccatttcacacaggacaaggccctgagacaagagggcctcaggcctgggccatggcctcctggcgcacccgcaagtgaggcagctagcaaacccctgggagtcgctagtgaggatgagctggtggccgagtttttgcaggaccaaaatgcgccactggtctcccgggctccccaaacctttaaaatggatgatctgctggctgaaatgcagcagattgaacagtctaatttcaggcaggcgccacaaagagccccaggcgttgcagacttagcgctctag

SEQ ID NO: 234423 - DNA, 309 bp, synthetic construct
  misc_feature 1..309: note = Description of Artificial Sequence: Synthetic coding sequence
  source 1..309: mol_type = other DNA
atggccatgagggagctggtggaagcagagtgcggcggtgctaatccgctgatgaagttggccggacattttacccaggacaaggccctcaggcaagaaggattaagacctggcccatggcctcctggggctcctgccagtgaagccgcttcgaagcccttgggcgtggcatctgaagacgaactcgtagcggaatttcttcaggatcagaacgccccactggtgtctagagcacctcagacctttaaaatggacgacctgctagctgagatgcagcaaatagagcagtcgaactttagacaggcctag

SEQ ID NO: 234424 - DNA, 747 bp, synthetic construct
  misc_feature 1..747: note = Description of Artificial Sequence: Synthetic coding sequence
  source 1..747: mol_type = other DNA
atggcaatgcgcgagctcgtcgaggcagagtgtgggggagcaaaccctctcatgaaactggctgggcacttcactcaagacaaagctctgaggcaggagggattacgccctggtccatggccaccaggagcccctgctagcgaggctgcctccaagcctctgggcgtggcctcggaggacgaactcgtggctgaatttctgcaagatcagaacgctccactggtttccagggccccacaaacatttaagatggatgacctcttggcagaaatgcagcagattgaacagtccaactttagacaggctccccagcgcgctcccggtgtggctgacttggcactgtctgaaaattgggctcaggaatttttagccgctggcgacgctgtcgacgtgacacaagattacaacgaaaccgactggtcacaggaattcatttctgaggtgacagacccgctctccgtcagcccggcacggtgggccgaagagtatttagaacagtcggaagaaaagctgtggctcggggaacccgagggcaccgccacggaccgatggtacgatgaataccatcccgaagaggatctgcagcataccgcgagcgacttcgtcgccaaggtggatgatccaaagttggccaatagtgaatttctgaagtttgtgcggcagattggggaaggacaggtgtccctcgagagtggcgctgggtcaggaagggcgcaggctgagcagtgggctgccgagttcatctag

SEQ ID NO: 234425 - DNA, 315 bp, synthetic construct
  misc_feature 1..315: note = Description of Artificial Sequence: Synthetic coding sequence
  source 1..315: mol_type = other DNA
atggcgatgagggaattagtggaagctgaatgcgggggtgccaaccccctgatgaagcttgcgggtcacttcacccaggacaaggccctgagacaggagggactgcgtcctggtccttggccccctggtgccccagctagtgaggcagcttctaagccattgggagtggcttcagaggacgagctggtcgccgagtttctgcaggaccagaatgcacccttagttagccgcgcaccgcaaacctttaaaatggatgacctgctggccgagatgcagcagattgagcagtccaactttagacaggctccccaatag

SEQ ID NO: 234426 - DNA, 1875 bp, synthetic construct
  misc_feature 1..1875: note = Description of Artificial Sequence: Synthetic coding sequence
  source 1..1875: mol_type = other DNA
atgtaccagggccatatgcaagttgttggggttacattgaagaagaagtggcattgtttgcagaagtccgatctgactctcgctctgggaaagggatcccgggcagcagacaaagccgtggctatggtgatgaaagagatccccagggaagagtcggcggaggagaaacccttgctgacaatgacaagtcagcttgtgaacgaacagcaggagtccaggcccctactgtcccctagcatagacgacttcttgtgtgagacaaaatccgaagccatcgcccgtcccgtcacaagcaatactgcagtgctgaccaccgggttggacttgttagatctgagtgagcccgtgagccagactcagacaaaggcgaagaagtctgaaccaagctcaaaaactagctccttgaagaaaaaagcagatggatccgatctgatctctactgatgccgagcagagggggcaacccctgcgggttcctgaaacctccagcctagatctcgacatccaaacacagctggagaaatgggacgatgtaaaatttcacggggaccgcaacactaaaggtcaccctatggccgaaaggaagagttcatcttctcgtactggctcaaaagaactcctctggagcagtgagcatcgctcccagccagagctatctgggggtaaaagcgccctgaactcagagagcgctagcgaactggaactcgtggcacctacccaggccaggcttacaaaggagcatagatggggctctgccctgctttctaggaaccactccctggaggaagagttcgagcgtgccaaagccgctgtcgaatccgatacagaattttgggacaagatgcaggctgaatgggaggaaatggcaagacggaattggatatcggaaaatcaggaagcacaaaatcaagtgaccatctcagcgtcggaaaagggttattatttccacaccgaaaatccttttaaagactggcccggagcattcgaagagggactcaagagactgaaggagggcgatctgccggtcactattctgtttatggaagcagccattttgcaggacccgggtgacgcggaggcatggcagtttctgggcatcacccaggcagagaatgagaacgaacaggcggctatcgttgccctccagcgatgccttgagttacaacctaataatcttaaagccctgatggccttagccgtgtcatacactaatacaggccaccagcaggacgcctgcgacgccctgaaaaactggatcaaacaaaaccccaagtacaagtatctcgtgaaatccaaaaaaggaagccctggcctcactcggcgtatgtccaagtctcccgttgattccagcgttttagagggagtgaaggaattatatctggaggctgctcatcagaacggagacatgatagaccccgaccttcaaactggcttgggggtgctgttccacctgtccggtgagttcaacagggcgatagacgcattcaatgctgccctgaccgtgcggcctgaggactactcgctgtggaaccggctcggagcaacacttgccaacggcgataggagtgaagaggcagtcgaagcttatactcgtgccctggagatacagcctggctttatcaggagccgctacaatctaggcatctcctgtattaacctaggcgcatacagggaggctgttagcaattttctcacagccctctccctgcagcggaagagtagaaatcagcagcaagtcccccacccagctatcagcggaaatatttgggctgctcttcggatcgctctgtctctgatggatcaaccagaactgtttcaagccgctaacctaggcgacctcgacgtactgctcagagccttcaatttagatccctag

SEQ ID NO: 234427 - DNA, 1875 bp, synthetic construct
  misc_feature 1..1875: note = Description of Artificial Sequence: Synthetic coding sequence
  source 1..1875: mol_type = other DNA
atgcaccagaacgggtcgcaagtcgttggcgtcactctgaagaagaagtggcattgcctgcagaaaagcgacctgacacttgctctgggcaagggttctcgggctgcagataaagccgttgccatggtgatgaaagaaatccctcgcgaagagtccgcagaagagaagccactgctcacaatgacatcgcagttggtgaatgaacagcaggagagcaggcctctgctgtccccatccattgatgattttctgtgcgaaacgaaaagcgaagccattgcacggccagtgacctccaatacagccgtcctgacgactggcctagaccttcttgatctgtcagaacctgtgagccagacacaaacaaaggccaaaaagtctgagcccagctctaagacatcatcactgaaaaagaaagccgatggatccgatttaataagtaccgacgccgaacagagaggccaacccttaagggtcccagagacatcatctctggacctcgatattcagacccagcttgaaaagtgggacgatgttaaattccatggggaccggaatactaaaggacaccctatggccgaaagaaagagtagttccagcagaacaggcagcaaggaactgctgtggtccagcgaacatagatctcaacccgaactcagcggcggaaagagtgctctgaatagtgagtctgcttccgagctggagctggtggcacccactcaggctcgcctgactaaagaacataggtgggggtccgcattgctatcaagaaaccacagtctggaagaggaattcgaacgagccaaagcagccgtggagtccgacaccgagttctgggacaagatgcaggcagagtgggaggaaatggccagacgtaattggatcagtgagaaccaagaggctcagaatcaggtgaccattagtgccagcgagaaagggtattacttccatactgaaaacccatttaaggattggcctggcgcattcgaggagggactaaaaaggctgaaggagggagacctgcccgttactattctgtttatggaagcggctattctgcaagaccctggcgatgccgaggcttggcagttcctcggcattacccaggccgagaacgaaaatgagcaggctgcaatcgtggcactccaacggtgcctggaattacaaccaaacaacctgaaggcactgatggccctggccgtatcctatacaaataccggacaccagcaggatgcatgtgacgctttgaagaattggatcaaacagaatccaaaatataagtatcttgtaaaaagtaagaaggggagccctggcctgacacgaagaatgtctaagtctcctgtggactcctcagtgctagaaggtgtaaaagaactgtatctggaggctgcccatcagaacggtgacatgatcgatcccgacctgcagacaggtctgggagtcctcttccatctgtctggggagtttaaccgggcaatcgacgcttttaacgccgcattgacggtgaggcccgaggattactccctgtggaataggctgggcgcaaccctggcaaatggcgacagaagtgaggaagctgtagaggcttacacgcgagctctcgaaatccaacccggtttcatcagatccaggtataacctgggtatcagctgtatcaatcttggcgcatatcgcgaggccgttagcaactttcttactgccttgagcctgcaacgaaaatctcgaaaccagcagcaggtcccgcatcccgcaatatcaggcaatatctgggctgctcttagaattgctctgtctctgatggatcagcccgagttgttccaggccgctaatctgggtgatctggacgtgctgctgcgcgctttcaaccttgacccgtag

SEQ ID NO: 234428 - DNA, 1557 bp, synthetic construct
  misc_feature 1..1557: note = Description of Artificial Sequence: Synthetic coding sequence
  source 1..1557: mol_type = other DNA
atggtcatgaaagagatcccccgtgaggagtctgctgaagagaagccgctgcttacaatgactagtcagttggtgaatgaacagcaggaatcacggcctctccttagcccctccattgatgactttctttgtgaaaccaaatctgaggctatagctaggcccgtgacctcgaacaccgcagacattcagactcagctagagaagtgggatgacgttaagtttcacggcgaccgtaatactaaaggtcaccctatggctgagcggaagtcatcgagtagcagaaccgggagcaaggaactcctctggtcctccgagcaccgatcacagcccgagttatccgggggaaaaagtgccctgaacagtgaaagtgcctcagaactagagctggtcgctcctacccaagctagactgacgaaggagcacaggtgggggtccgcactccttagtagaaatcactcccttgaggaagaatttgaacgtgcaaaggccgcagtggaatccgacactgaattctgggacaagatgcaggctgaatgggaagaaatggccagaagaaactggatctctgagaatcaggaagcccaaaaccaagtgaccatctcagcttcagagaaaggatattacttccataccgaaaatccatttaaggattggccgggagcgttcgaggaaggcttgaagagactgaaggagggagacttgcctgttaccatcttgttcatggaggcagctatcctgcaggatccaggagatgccgaggcatggcaattcctaggaattactcaggctgaaaacgaaaatgagcaggctgcaatcgtggccctgcagcggtgtctggagctgcagcccaacaatctgaaagcactgatggcgctggcggtgtcatatactaataccggccaccagcaggatgcctgtgacgcattgaagaattggataaaacagaatccaaagtataagtatttagtgaagtctaaaaaggggtcccccggactcaccaggcggatgtctaagagcccagtggatagcagcgtcctcgaaggcgttaaggagctgtacctagaggctgcccaccagaacggcgacatgattgatcccgatctccagaccggcctgggcgtgctgttccatctgtctggcgaatttaacagagcaatcgacgccttcaacgctgcactgaccgtgcgaccggaggactacagtctatggaacagattgggcgctactttggcaaatggcgatcggtcggaggaggctgtcgaggcttacacaagggctctcgagatacagcccggttttattcgttctaggtacaatttggggatttcttgtattaacctgggcgcatatagggaagccgtgtctaacttccttactgccttgtcattgcagaggaagtctagaaaccagcagcaagtgccccatccagctatcagcggaaatatctgggccgctctgcgaattgcgctctctttaatggaccagccagaactctttcaggcagccaacctgggcgatctggacgtgctgttgcgtgcattcaacctggacccctag

SEQ ID NO: 234429 - DNA, 1809 bp, synthetic construct
  misc_feature 1..1809: note = Description of Artificial Sequence: Synthetic coding sequence
  source 1..1809: mol_type = other DNA
atgtatcagggtcatatgcaggggaagggaagcagagcagcagataaagcggtggcaatggtgatgaaagagattccaagggaagaaagcgccgaggaaaaacctctgctaaccatgacgtctcagttggtcaatgagcagcaggagtcccgccctttgctctccccatcaatcgacgactttctctgcgaaactaaaagtgaggcgatagctcgcccagtgacatcaaacactgcagtattgacaacagggttagatttgctcgatctctctgagcccgtgagccagacgcagacaaaggctaaaaagtcagagcctagctcaaagacaagttccctgaaaaagaaagcagatgggagcgatctcatcagcacagatgcagagcagcgcggacagcctctgcgagtgccagagacttcatcactggacctcgatatccagacacagctcgagaagtgggatgatgttaagtttcatggagaccgcaacactaagggccacccaatggcagaaaggaagagctcttctagccgcaccgggagcaaggagctgttgtggagctctgagcaccggtcacagcccgagctgtccggcggtaagagtgccctgaatagtgagtctgcctcagagctggagctcgtggctcccacacaggccagattaactaaggagcacaggtgggggtccgccttgctgtcacgaaatcacagtcttgaagaggagttcgagcgggcaaaggccgctgtagaatcagatacagaattttgggataaaatgcaagccgaatgggaggagatggccagacgaaattggatctccgaaaatcaggaggcacagaatcaggtgacaatctccgcctcagaaaagggatactactttcatacggaaaacccattcaaagactggcccggagccttcgaagagggcttaaagaggctgaaagaaggggatctgccagtcactatcctatttatggaagctgccatcctgcaggacccgggagatgcagaggcctggcagttcttgggaattacccaagcggagaacgagaacgagcaggccgcaatcgtcgcccttcagcgatgcctggagctgcaacctaataaccttaaggcactgatggccctggcagtgtcctacacaaacaccggacatcaacaagatgcctgcgatgcgttaaaaaactggatcaaacagaatccgaaatacaaatacctcgtcaaaagcaaaaagggatctcccggtttgacccgtcggatgtccaaatctccggtggattcttctgtactggaaggagtgaaggaactgtacctggaggctgcccatcagaacggggatatgatcgacccggatctgcagactggtttaggggtgctgttccatctctcgggcgaattcaatagagcgattgacgccttcaacgccgcacttactgtgcgccctgaagattattcgctgtggaaccgcctgggagcaaccctggcgaatggggatcgcagcgaggaagctgttgaagcatacactcgagccctggagatccagcccggattcatcaggtcacgttataatctcggtatatcctgcattaatctgggagcttacagagaggcagtatcaaacttcctgactgcactaagccttcagcgcaagtcccgaaaccagcagcaggtaccacaccctgcgatttcgggcaacatctgggccgctcttcggatcgcactctctcttatggatcaacccgaattgtttcaggccgctaacttgggggaccttgacgtccttcttcgggcttttaatctggacccctag

SEQ ID NO: 234430 - DNA, 1545 bp, synthetic construct
  misc_feature 1..1545: note = Description of Artificial Sequence: Synthetic coding sequence
  source 1..1545: mol_type = other DNA
atgtccagcctgagcctcaagcccctcgtgcaggtgtctgtaggggcatttgtacagctcgtgaatgagcagcaggagtccaggccactcctgtcacctagtatcgatgactttctttgtgaaactaagtcagaggcgatcgcgaggcccgttaccagcaacactgctgatatccagacacaactcgagaaatgggatgacgttaagtttcacggagaccggaacactaaaggccatccgatggccgagcgtaaatcatctagcagtcgcacgggaagcaaggagttgctctggtcaagcgaacaccgcagtcagcccgagctgagcggtgggaagtccgcgctcaacagtgagtcagctagtgagctagaactggtggctccaacccaggctcggctcacgaaagaacacaggtggggatccgcactgctatcacggaaccatagcctcgaggaagaattcgagcgagctaaggcagccgttgaaagtgatacggagttttgggataagatgcaggctgaatgggaggagatggccaggagaaattggatatcggagaatcaggaggcgcagaaccaggtcacaatctcagcgtcagaaaaaggttattattttcataccgagaatcctttcaaagattggccaggggcattcgaggaagggctcaaacgactgaaggagggagacctgcctgttacgattctgttcatggaggcagccatcctgcaagaccccggtgatgccgaggcctggcaatttttgggaatcacccaagctgaaaacgagaacgagcaggctgccattgttgccttgcaacgctgtttggaactgcaaccgaacaacctaaaggccttgatggcgctcgccgtgagttatacaaataccggtcaccagcaagatgcctgcgacgctctgaaaaactggattaagcagaaccctaaatacaaatacttggtgaaatcgaagaagggctcccctggcctaactaggcgaatgtcaaagagcccagtggacagctcagtcttagaaggcgtcaaggagttatacttggaggctgcgcaccaaaacggagacatgatcgacccagacctgcaaactggactgggcgtactgtttcaccttagtggagaattcaatcgagctatagatgcattcaatgccgctctgaccgtccgacccgaagactattctctctggaacagactcggtgcaacactcgccaatggcgatcggtcggaagaagccgtcgaagcgtataccagggctttggagatacagccaggctttatccggtctagatacaatctggggatctcttgtataaatctgggtgcctatcgcgaggccgtctccaactttctgaccgcattaagtctccaacgaaagagccgaaaccagcaacaagtgccccatccggctatctccgggaacatatgggccgctctgaggattgcactcagcttgatggaccagcccgaattgtttcaggccgctaacctcggggatctggacgtgctcttgcgcgcttttaacttggacccttag

SEQ ID NO: 234431 - DNA, 1881 bp, synthetic construct
  misc_feature 1..1881: note = Description of Artificial Sequence: Synthetic coding sequence
  source 1..1881: mol_type = other DNA
atgtaccaggggcacatgcagaagtctaaggagcaaggctatgggaaacttagttctgacgaagacctagaaatcatcgtcgaccagaaacaaggtaaggggagccgcgctgccgataaggctgtagccatggtgatgaaagagatcccgcgtgaggagtcagccgaagagaaacctctattaaccatgacttcccagcttgttaatgaacagcaggagtcccggcctctcctctctccttcaatagacgatttcttatgcgagacgaaatccgaagccattgcgaggcccgtgacctctaacactgcagtcctgactacagggcttgatctgcttgacttgagtgaacctgtgtcccagacgcagaccaaggccaaaaaaagcgagccctccagtaaaaccagctccctgaagaaaaaagcagatggcagcgacctgatcagtaccgatgcggagcaaaggggtcaaccactacgagtgccagaaacctccagcctggacctggacatacaaacacagctcgaaaagtgggacgacgtgaaattccatggggaccgcaacactaaggggcacccaatggccgagcggaagtcttccagctcgcgcaccggttccaaagagctcctgtggtcctccgagcatagatcgcagcctgaactgtccgggggtaaatccgcccttaacagcgaatccgctagtgagctcgagctggtcgcccctacgcaggccaggctgaccaaggagcatcggtggggctctgccctgctgtctcgaaatcactcccttgaggaagagtttgaacgcgcaaaggctgcagtggagagcgatacggaattctgggataagatgcaggctgaatgggaggagatggctcgcagaaactggattagcgagaaccaagaagcccagaatcaggttacgatttcagcttccgagaaggggtattattttcacacagaaaatccattcaaagactggccaggtgccttcgaggagggattgaaacgcctgaaagaaggagatctaccagtgacgatcctgtttatggaggccgcaatcctgcaggaccctggagatgccgaagcatggcagttcctcggtattacacaagctgagaacgaaaacgagcaggcggcaatcgtggccctgcagcgctgcctggaactccagccaaataacctgaaggctcttatggctctggccgtaagctacacaaacacaggccatcagcaggacgcatgcgacgcactcaaaaactggatcaagcagaaccccaagtacaagtatctagtcaaaagcaagaaagggagcccgggtttgactcgtaggatgtcaaaatctcccgtggatagcagtgttctagaaggcgtcaaagaactttacctggaagccgcacaccaaaacggtgatatgatcgatcccgacctgcagacgggcctaggcgtgttatttcacctcagcggggagttcaatagggccatcgacgccttcaatgctgctctgactgtaaggccggaagattactccttatggaacagactcggcgctactttggcgaacggcgataggtccgaggaagcagttgaggcttacacaagagccttggagatccagcccggattcatccgttcccggtacaacctgggcatttcctgcattaacctcggcgcttaccgcgaggccgttagtaattttttgaccgccttaagtcttcagcgcaagagtcgaaatcagcagcaggtgccacaccccgcaatcagtggcaacatttgggcagccctaagaatcgccctcagcctaatggaccaaccagagttgttccaagccgctaatctgggcgacctagacgtgctgcttagggcttttaacctggatccttag

SEQ ID NO: 234432 - DNA, 1752 bp, synthetic construct
  misc_feature 1..1752: note = Description of Artificial Sequence: Synthetic coding sequence
  source 1..1752: mol_type = other DNA
atggttatgaaagagatcccacgggaagaaagcgcagaggagaagccgctcctgacaatgacatcacaactggtcaatgagcagcaggaaagccggccactcctgtctccctccattgacgacttcttatgtgagactaaatcagaggcaatcgcaaggcctgtaacttccaataccgcagtgctgacaaccggattagatctgctggatttgagtgaacctgtgtctcagacccagactaaggctaaaaaatccgaaccttctagcaaaacatctagcctgaagaaaaaagctgatggcagtgatcttatttctactgacgccgaacaacgcggacagcccctcagagttcctgaaacatcctccctagaccttgatatacagactcaattggagaaatgggatgacgtgaaatttcatggcgaccgaaacacaaaaggtcaccctatggctgaacgaaagagctcctcatcaagaacaggaagcaaagaactgttgtggagctctgaacacaggtctcaacctgagctgtcaggtgggaaatcagccctcaacagtgaaagcgcctcagagctggagctggtcgcccctacccaggctaggctgaccaaggaacaccgatgggggagtgcactgctctcccgtaatcattcgcttgaagaagagttcgaacgagctaaagccgcagttgagtcagacaccgagttttgggacaaaatgcaggccgagtgggaggaaatggctagaaggaattggatttctgaaaaccaagaggcccagaaccaagtcacaatctctgcctcggaaaagggctattatttccatacggagaatcctttcaaggactggccaggggcttttgaagaagggctgaaacgcctcaaggaaggtgatctgcccgtaacaatactgttcatggaagcggctatcctccaggacccaggcgacgcggaagcttggcagtttctgggaataacacaggcagagaacgaaaatgagcaggccgctatcgtggctctgcagcgctgtttagaactgcaacccaacaacttaaaggctctgatggcactggccgtttcctacactaacaccggccaccagcaggatgcttgtgacgcactaaagaattggatcaaacaaaatcccaagtacaagtacctggtcaaatccaagaaagggtcgccaggactgacgagacggatgtccaagagtcccgtggactcatcagtcttggagggcgtcaaggagttgtatctggaagctgcacatcagaatggggatatgatcgatccagacctgcaaaccggcctcggagttctatttcatctgtccggcgagtttaaccgggctattgacgcctttaatgctgcactgacagttagaccagaggattatagtctgtggaacagattgggggcaactctggcaaacggagaccggtcggaggaggccgtggaggcctacacacgggctctggagattcaacctggctttattagaagtcgatataatctgggtatttcttgcattaatctgggcgcataccgagaagccgtttctaattttctgaccgctctgtcattacaaagaaaatcgaggaatcagcagcaagtaccccaccccgcaatcagtggcaacatctgggctgcacttagaatcgctctctccctgatggaccaacctgaactgttccaggcagccaatctcggcgacctggacgtgcttctccgtgcgttcaatctggacccatag

SEQ ID NO: 234433 - DNA, 1776 bp, synthetic construct
  misc_feature 1..1776: note = Description of Artificial Sequence: Synthetic coding sequence
  source 1..1776: mol_type = other DNA
atgtaccagggccatatgcaaaaatccaaggaacagggttacggtaagttatcatccgatgaggatctcgagattattgtggatcaaaagcagctggtgaatgaacagcaggagagcaggccactactgtccccatcaattgacgacttcctgtgtgagacgaaatccgaggcaatcgctcgacctgtaaccagtaatactgccgtgctgactacaggattggacctcctggacctctctgagcccgtctcccaaacccagaccaaggccaaaaagtccgaaccctcttccaagaccagcagtctcaagaagaaggcggatggctctgatttaatctcgaccgacgccgagcaacggggacagccactcagggtgcccgaaacgtcaagcctggatctggatatacaaacccagttagagaagtgggatgatgtgaaattccatggagaccggaatactaaagggcacccaatggccgagcggaaatcttcctcatctagaaccggaagtaaagaacttttgtggtcctccgagcacagaagtcagcctgaactgtctggaggtaagtccgctctgaattccgaatcggctagcgagctcgaactggttgctcctactcaggcaaggcttaccaaagagcatcggtggggttcagcgctgctgtctcggaaccactctctggaggaggagttcgagagagccaaggcggctgtcgagagtgacactgagttctgggacaagatgcaagcagagtgggaagaaatggcaaggcgcaactggatcagtgaaaaccaagaggctcagaatcaggtgacaatatcagcctcagaaaagggttactactttcatacagagaatccgttcaaggattggcctggcgcttttgaggaggggctcaagagactgaaggagggcgacctgcctgtgactatattgtttatggaggcggctatcttgcaggatcccggtgatgctgaggcctggcaatttctgggcattacacaggccgagaatgagaatgaacaagccgctatcgtggcacttcaaagatgtcttgagctacagcccaacaatttgaaggctctcatggccctggcagtctcatatacaaatactggtcatcaacaggacgcttgtgatgcccttaaaaattggataaagcaaaacccaaaatataaatacctggtaaagagcaaaaaagggagtcccggactgacccgcagaatgtccaaaagcccggtggattcttctgtattagagggggttaaggaactgtacctggaggccgcacaccagaatggtgatatgatcgacccagacctgcagacgggcctaggcgtgctgtttcacctcagcggagagtttaatcgggctattgatgcctttaatgctgctctcaccgtgagacccgaggactactctctgtggaacaggttgggggcaacgctggctaatggggatagatcagaggaggcggttgaggcatacacaagagctcttgagattcagcctgggtttataagatcaaggtataatctgggcatctcttgtatcaacctgggcgcttatagagaggccgtgtcaaatttcctgaccgcgctgagcctacaacgcaagagtcgcaatcaacagcaggtgccccaccctgctatttcaggcaatatatgggccgctttacgtatagccctgtctttgatggaccagcctgagctcttccaggccgcaaatctgggggacctggatgtcctgctcagagccttcaatttagatccttag

SEQ ID NO: 234434 - DNA, 2217 bp, synthetic construct
  misc_feature 1..2217: note = Description of Artificial Sequence: Synthetic coding sequence
  source 1..2217: mol_type = other DNA
atggccttagctgtgcttagggtgcttgagccatttcctactgaaacacctcctcttgcggtattgttaccacctggcggaccctggcctgccgctgaattaggcctcgtgctggctctgagacccgctggagaatcgccagccggaccagcccttctcgtggccgcactcgagggccctgatgctgggaccgaggaacaaggacccggtcctccccagcttttagtttcaagggcattgctcagacttcttgcacttgggtccggtgcctgggtccgagctcgggcagtgaggcggcctcctgctctggggtgggccctgttgggcacttcgttgggccctggtctgggtcctagggtgggcccactcctcgttcgtaggggagaaactctgccagtgcccggaccacgagtactagagacccgccctgccctccagggtctgttggggcctgggactagactggcagtcacggaactgcggggtcgggctcggctctgtcccgagtctggagacagttctagaccccctcccccaccagtggtgagctcttttgctgtcagtggcacagtgaggagacttcaaggcgttctggggggtacaggtgattccttaggtgtgtcacgctcttgtttgcggggtctaggtctgttccagggcgagtgggtttgggttgcccaggcaagagagtcatccaacacctcccagccccacttggcccgagtgcaggtgctggagccgagatgggatctgtcagaccgactaggaccgggatctggaccactgggggaaccactggctgatgggcttgccctggtgccagctacccttgccttcaatctggggtgcgatcctctggaaatgggagagctgcgcatccagcgctacttagagggttccatcgctcccgaggataagggctcctgtagcctcctgcctgggcctccttttgcacgcgagctgcacatcgagatcgtctcatcaccccactacagcacaaacggtaactacgatggggtgctctatcgccatttccagatacctcgcgttgtgcaggaaggcgatgtcctgtgcgtgcccactatcgggcaggtagaaattcttgagggctcacccgaaaaactgcctagatggcgcgagatgttttttaaagttaaaaagactgtgggtgaggctcccgatgggccagcctctgcctacttggcagatacgactcataccagcctctatatggttgggtccacactgtccccggttccatggctgcctagcgaagaatccacactgtggtcaagcctcagtccgccaggcctcgaagctctggtgagcgaactgtgtgccgtcctcaagcccaggctacaacctggtggggctctcctcacgggcaccagtagcgtcttgctcagaggccctccaggctgcggaaaaacaaccgtagtagccgcagcctgttcccaccttgggctgcatcttctgaaggtcccatgcagctctctctgcgctgagtcctccggcgcagtggaaacgaaactccaggctatcttctctagggctcggaggtgtcggcctgccgtgcttctgctgaccgccgtggacctgttgggaagggaccgtgatggactcggggaggacgcacgcgttatggcagtgttgagacacttacttcttaatgaagaccctttaaactcctgcccaccactcatggtggtggccacaactagtcgggctcaggatttgccagccgatgtgcaaaccgcattcccccacgaattggaagtgcctgcgcttagcgagggacagaggttaagtattcttcgggcactgacagcacacctccctctggggcaggaggtgaacctggctcaactggccagacgctgtgcaggatttgtcgttggtgacctgtacgcactactcactcacagcagcagggccgcatgcacacggatcaaaaacagcgggttggccggaggcctaaccgaagaggatgagggagaattgtgtgccgcaggctttcctctgttggctgaggattttggtcaggcactcgagcagctgcagacagcccacagccaggctgtgggagcgcctaaagtcgaaactaaatccctcgagtgcctgcctggtcccggacttcagctccacgctctgtccagtctgatgaactggaccttgtggccacaggctggtggcgaggttgagattttagaagaatag

SEQ ID NO: 234435 - DNA, 2943 bp, synthetic construct
  misc_feature 1..2943: note = Description of Artificial Sequence: Synthetic coding sequence
  source 1..2943: mol_type = other DNA
atggccctcgcggtgctccgagtgctggagccattccctactgaaacgcctccactcgcggtgctgctccctcccggaggtccttggccggcagctgaactaggtcttgtgttagccctgagaccagcaggcgagtcccccgcaggacctgcactgttggtggcagccctggagggccctgatgcaggaacagaagaacaaggcccaggcccacctcagctgctggtgtctcgtgcacttctccgacttctggccctggggagtggggcatgggtccgcgctcgagcagtgcggagacccccagccctgggttgggccttgcttggtacatcccttggccctggtctggggccacgtgtggggccactgcttgtacggaggggtgagaccctgccagtgcctggacccagagtgctagaaaccaggcctgcgctccaagggttactcggacctggcactagactcgcagttactgagttaagggggcgagcccgtttgtgtccagaatctggggactcctctagacctcctccaccccctgtagtcagctctttcgccgtatcaggaactgtgcggaggctgcaaggcgtccttgggggtactggggactctctgggcgtgagtcggtcctgtctcagaggactcggactcttccagggcgaatgggtgtgggttgcacaagcccgtgaatcgagcaatacaagtcagcctcatttggccagagtgcaagtgctggagcccaggtgggacctctctgatcggctcggtccaggctccgggccactgggcgagccactggctgacgggctggccctggttccggctaccctcgctttcaatctggggtgtgatcccctggagatgggagaattacgtattcagcgttacttggagggctcaatcgcacctgaagacaaggggagctgtagtctcttacctggccctccatttgccagagagctacatatagagatagttagcagcccccactattccactaatggtaactacgacggcgtcctgtaccggcattttcagatccccagggtggttcaagaaggagacgtgctgtgtgtgcctacaattggacaagtcgagatcctggagggatcccctgaaaagttacccagatggagggaaatgttttttaaagtgaagaagacagtaggagaggctccggacgggccagcctctgcttacttagctgatacaacccataccagcctctacatggtggggtcaacccttagtcctgtgccctggctcccctctgaagagtcgaccttatggtcaagcctctcccccccaggcctcgaagccctcgtgtctgaactttgtgctgtgctgaaaccaaggctgcagcccggtggagctctgctcacagggacctcctcagtgctgctccggggtcctcctggatgtggcaagacaaccgttgttgcagccgcatgttcacacttggggttacacctgttaaaggtaccatgtagttccctgtgtgccgaatcgagcggagccgtggaaaccaaactgcaagccattttcagtagggctcggagatgcagacctgcggtgttgctcctcaccgccgtggacttactcggcagagaccgggacgggctgggggaggatgccagagtgatggcagttctgcggcacctcctgttaaacgaggatccgttgaacagttgtcctcctctaatggtcgtggctacaacaagtagggctcaggatttaccagccgacgtgcagacagctttcccacatgaactggaagtcccggctctgtctgaaggtcaacggctcagtatactgagagccttgaccgcccacttgcccttaggccaggaggtaaacctcgcacaactggcccgacggtgcgctggtttcgtggttggagatctttatgcactgctgactcacagcagcagagccgcatgcacccggatcaaaaattcgggattagccggagggctcaccgaggaagatgagggcgaattgtgtgcagcagggtttcccctgcttgctgaggactttggacaagccctggagcaactacagactgcccacagccaggccgttggcgctccaaagatcccaagcgtctcttggcacgatgtgggcggtcttcaggaggtgaaaaaggagatccttgaaactatacagcttccattagaacaccctgagctcctgtcactgggactccgtcgatccggtctgctgctgcacgggccaccaggcacaggaaagacattactggccaaagcagtcgccacagaatgcagtctcacgtttctgagcgttaaaggccctgaactgatcaacatgtatgtgggccagtcagaggagaacgtgagggaggtgtttgccagagccagggctgctgcaccctgcattattttcttcgacgagctggatagtctcgctccatccagaggacggagtggggacagtggaggtgtgatggaccgggtggtttcccaactattagccgaattggatggattacacagcacacaggacgtctttgtaataggtgccactaatcgacccgacctacttgatcctgccttattacgacccggtaggttcgacaagctggtgtttgttggggctaatgaggatcgggcatcccagcttagggtcctgtccgccatcactcggaaattcaagctcgagccatcagtaagcctggtgaacgtgctggactgctgccccccacagctgactggcgcagacctgtatagtctttgctctgacgccatgaccgcggcattgaagcgccgagtccacgacttggaggaagggctggaaccgggatcatccgcattaatgctgaccatggaagacctgctgcaagctgctgcacggttacagccatcagtaagcgagcaggagctcctacgctataagagaattcagcggaagtttgcagcatgctag

SEQ ID NO: 234436 - DNA, 972 bp, synthetic construct
  misc_feature 1..972: note = Description of Artificial Sequence: Synthetic coding sequence
  source 1..972: mol_type = other DNA
atgtccgcagtatgtggaggggctgccagaatgttacggacaccgggacgccacggctacgcggcagagttcagcccttacctgcccggacgtcttgcttgtgccacagctcagcactatggcattgctggatgtggaaccctgctgatcttggaccccgatgaggccggactgcgcctcttccggtccttcgattggaacgatggccttttcgatgtgacctggtcagagaacaatgagcatgtactcatcacttgttccggcgatgggtcactacaactgtgggatacagcaaaagccgctgggccacttcaggtgtataaagaacatgcacaggaggtgtattctgtggactggagtcagactcggggtgaacagttagtagtctcgggttcctgggaccagaccgtgaagctgtgggaccctaccgtcggtaaaagtctctgtacattccgcggacacgagagtattatttactcaaccatctggtccccacacatacctggttgttttgccagcgcatcgggcgatcagaccctgagaatctgggatgtaaaggctgctggtgtccgaatcgttattcctgctcatcaagctgagattctgtcctgcgactggtgtaagtacaatgagaatttactggtcacaggcgctgttgattgctccctgagggggtgggatcttaggaatgtgaggcagcccgtgtttgagctcctgggccatacctatgccatcaggcgggtgaagttttctccattccatgcatcggtgttggcttcctgctcttacgacttcaccgtgcgcttctggaacttttctaagcccgattcactgctggagacagtggagcaccacacggaatttacctgtgggcttgattttagcctgcagagtccgacccaggtcgctgactgctcgtgggacgagacgatcaagatctacgatcccgcatgtctaaccattcccgcttag

SEQ ID NO: 234437 - DNA, 369 bp, synthetic construct
  misc_feature 1..369: note = Description of Artificial Sequence: Synthetic coding sequence
  source 1..369: mol_type = other DNA
atgtcggccgtgtgcggaggagccgcaagaatgctccggacccccggaaggcatggatacgccgcagagttttcaccttacctacctggtaggttagcgtgtgccaccgcccagcactacgggattgccggatgtggtactttattaatcttagatcccgacgaagcaggattgaggctgttccgatccttcgactggaacgacggacttttcgacgtcacttggagtgagaacaatgagcatgtgcttatcacatgcagtggagacggatccctccagctttgggatacggctaaagccgcagggccactacaggtctacaaagagcatgcccaggagtatgtccaagggtcatgcgtagtcaagtag

SEQ ID NO: 234438 - DNA, 843 bp, synthetic construct
  misc_feature 1..843: note = Description of Artificial Sequence: Synthetic coding sequence
  source 1..843: mol_type = other DNA
atgtctgctgtttgtggcggtgctgctcgaatgctgcgaactcctgggaggcacggctatgcagctgagttctctccttatctgcctggaagactggcctgcgctacagcgcaacattacggcatcgcaggttgcggaacattactgatacttgaccctgatgaagctggcttgcgacttttcaggtcattcgactggaacgatgggctattcgatgttacgtggtccgagaataacgagcacgtgttgattacatgctcgggcgatggatctctccagctgtgggatacagccaaggccgctggccctctgcaggtctacaaggagcacgcacaggaagtgtattcagtggattggtcacagacgcgcggtgagcagctcgtagtgtccggatcctgggaccagactgtaaagttatgggatcccacagtgggcaagagcctatgcaccttccggggacacgaatccataatttactccacaatttggagcccccatattcctgggtgcttcgcctctgcaagtggggatcagactttacggatttgggatgttaaagcagcgggagtgcgtattgtgatcccggcacatcaggccgaaatcctgagctgcgactggtgtaagtacaatgagaacttgctggtcacgggtgctgtggattgttcccttcgaggatgggacctgcgcaatgttcgccaaccggtcttcgagctgcttggtcacacctacgcaattaggcgcgtgaagatggagagctgccccgtgacccagacccggtcacagctgacggctaccagcgcgttttgggttcaggcagtgcttctaccacagcctacagagtag

SEQ ID NO: 234439 - DNA, 912 bp, synthetic construct
  misc_feature 1..912: note = Description of Artificial Sequence: Synthetic coding sequence
  source 1..912: mol_type = other DNA
atggcatcttgggccaagggaagatcataccttgctcccggactcttacaggggcaggtggcaattgtgaccggcggagccactgggattggcaaagcaatcgtaaaagagttgctggagcttgggagtaatgtggtgatcgcctccaggaagctggagaggctgaaatctgctgctgatgagcttcaagctaatctgcccccaacaaagcaggccagagttattcccatccagtgcaatatcaggaacgaagaggaggtcaataatctcgtcaagtctactctggataccttcggcaagatcaacttcctcgtcaacaacggaggcggacagtttctttccccagcagagcatatctcgtcaaagggctggcatgccgtccttgaaaccaatctgactggcaccttctacatgtgtaaagcagtatattctagctggatgaaagaacacgggggatccattgtgaacataatcgtcccaactaaggcgggattccctttagcagtgcattctggggcagctagagccggagtgtacaacttaaccaaatcgctcgcgctcgagtgggcctgctctggcatcaggataaattgtgttgcccctggagtcatttactctcaaacagcagtggagaactacgggtcttggggccaaagcttctttgaggggtctttccagaagatccctgcaaagcgtattggcgttccagaagaggtgagctccgttgtttgcttcctgctcagcccagcagcctcctttatcaccggccagtcagtcgacgtggacggaggcaggtccttgtacacccattcctacgaggttccagatcatgataactggcccaaaggtgccggtgacctcagcgtggtcaaaaagatgaaagaaaccttcaaggagaaagctaagctgtag

SEQ ID NO: 234440 - DNA, 1407 bp, synthetic construct
  misc_feature 1..1407: note = Description of Artificial Sequence: Synthetic coding sequence
  source 1..1407: mol_type = other DNA
atggtggacacagagagcccactctgtcctctgtctccactcgaggctggggacctcgagtcgccactgtcggaggaattcctccaggaaatgggcaatattcaggaaatatcacagtccataggcgaggattcctccgggtcctttggattcaccgagtatcaatacctgggtagttgcccgggttccgatgggtccgtgatcaccgatacattgagcccggcaagctctccgagctccgttacatatccagtagtgcccggaagcgtggatgagagtccatcaggtgctctaaatatcgaatgcagaatatgcggcgacaaggccagtgggtaccattacggggtgcatgcgtgtgagggttgcaaggggttcttcagaagaacaataagactgaaactggtctacgataagtgtgatcggtcctgcaaaattcagaagaaaaacaggaacaaatgccagtactgtagatttcacaagtgtctctctgtcgggatgtcacacaacgcgattcgattcggaagaatgcctagaagtgagaaggcaaagctgaaagctgaaattctcacctgcgagcatgatatcgaggactccgagactgctgatttaaaatctctggctaaacgtatctatgaagcttacctaaagaacttcaatatgaataaggtgaaagctagggttattctctctggaaaagcatccaacaatccgccatttgtgatccacgatatggagaccttatgtatggccgaaaaaaccctggtggccaaactggttgccaacggcatccaaaataaagaagctgaggttagaatctttcactgctgtcagtgtacaagtgttgagaccgttaccgagctgacagagttcgcaaaggccataccaggattcgccaacctcgatttgaacgaccaagtgactctcttgaagtatggggtatacgaggccatcttcgcaatgctaagttccgtaatgaacaaagacggaatgctggtcgcgtacggaaacgggttcataacccgggagtttctcaagtcgttacggaaacctttttgcgacatcatggaaccgaagttcgactttgctatgaaatttaacgcgctggaactggatgatagtgacatttcactctttgtggctgccatcatttgctgtggcgataggccaggtctgctaaacgttggtcacatcgagaagatgcaagaaggtatcgtgcatgtgctgcggctccatcttcagtccaatcaccccgacgacattttcctttttcctaagctgctgcagaaaatggctgaccttcggcagctggtcactgagcatgctcagctggtgcaaatcatcaaaaaaaccgagagcgatgcggcattacaccctctactgcaggaaatctacagagacatgtattag

SEQ ID NO: 234441 - DNA, 1407 bp, synthetic construct
  misc_feature 1..1407: note = Description of Artificial Sequence: Synthetic coding sequence
  source 1..1407: mol_type = other DNA
atggtggacaccgaatcccctctgtgtcctttatcgcccttggaggcaggcgatctggagtctcccctgtccgaagaatttctgcaagaaatgggtaatatacaagagatatcacagagcataggggaagactccagtggttcctttggcttcaccgaatatcagtacctcggctcatgtcccggtagtgacggctccgtaataactgacacactatcccccgcttcaagtccgtctagcgttacttatcccgttgtgcccggatccgtcgacgaatcgcccagcggtgcactgaacatagaatgccgcatctgcggtgacaaggctagcggctaccattatggagtgcacgcctgcgagggttgtaaaggcttttttcggcgaaccattcgcctgaagctggtgtacgacaagtgcgaccgcagctgtaagattcagaaaaagaaccggaacaagtgtcagtactgcaggtttcataagtgcctcagcgtaggaatgtctcataatgctatacgctttggcaggatgcccaggagcgaaaaagccaaactgaaagctgagatcctgacatgcgaacacgacatagaagatagcgaaaccgcggacttgaagagcttagccaagcgcatttacgaggcttatctcaaaaacttcaacatgaataaggtcaaagctcgagtaattctgtccggtaaagcaagtaataatccaccctttgtgatacacgatatggagaccctgtgtatggccgagaagactcttgttgccaagcttgtggccaacgggatccagaacaaagaggccgaagtccggattttccactgctgtcagtgtacctctgtggagactgtcactgaactcaccgaattcgccaaagccatccctggattcgccaacctcgacctgaacgaccaagtgacgctactcaagtatggcgtgtacgaagctatcttcgctatgctctccagcgtgatgaacaaagatgggatgctcgtggcatatggcaatggattcattacacgggagttcctgaagtccctgcgcaagcctttttgtgacattatggagccaaagttcgactttgccatgaaattcaatgctctggaattggacgacagtgatatctcactcttcgtggctgctattatctgctgtggtgaccgacccggtctgctcaatgtgggtcatatcgaaaagatgcaggaagggatcgttcacgttctccggcttcacctccaatcgaatcaccccgacgatatctttcttttcccaaaactgctgcagaaaatggccgacctgcgtcagcttgtcaccgaacatgcccagcttgtacaaatcataaagaagactgaatcagatgcagctctgcatcccctgctccaagaaatttaccgtgatatgtattag

SEQ ID NO: 234442 - DNA, 1407 bp, synthetic construct
  misc_feature 1..1407: note = Description of Artificial Sequence: Synthetic coding sequence
  source 1..1407: mol_type = other DNA
atggttgataccgagagtccactctgccctctctcaccacttgaggcaggagacttggaatcaccactgtctgaggaattcctgcaggagatgggaaacattcaggaaatcagtcagtcaatcggcgaggatagttctgggtcattcgggttcacggagtaccaatatctcggaagctgtcccggttccgatggaagtgtcatcacagacaccttgagtccggctagcagcccttctagcgtcacttatccagttgtgcccggaagcgtggacgagtctccatccggggcactgaatatcgagtgtcgaatatgtggagacaaagcctccggctaccattatggcgtgcatgcatgcgaagggtgtaaggggttttttcgtcggacaatcagactgaagctcgtttatgacaagtgcgacagatcatgcaagatccaaaagaaaaaccgcaacaaatgccaatactgtcggttccataaatgcctgtcagtcgggatgtcacacaatgcgataaggttcggacgcatgcctcggagtgagaaggccaaattaaaggccgagatcctgacttgtgagcacgatattgaggactcagaaaccgccgacttgaaatccttggctaagcggatatacgaggcctatctgaagaactttaacatgaacaaagtgaaagccagggtcatcctgagcggcaaagccagcaataaccccccttttgtgattcacgatatggaaacactgtgtatggccgagaaaaccttagtggccaagctggtagcaaacgggattcaaaacaaggaggcagaggtccggatatttcattgctgccaatgtacttccgttgagaccgtcacagagctcaccgagtttgccaaggccattcctggctttgcgaacctggatctgaatgaccaggtcacactgctcaagtacggggtgtacgaggcaatattcgccatgttgagtagtgtgatgaataaggacgggatgctggtcgcttacgggaatgggttcattacaagagaatttctgaagtctctgcgaaaacccttctgtgatattatggagcctaagttcgactttgccatgaagtttaacgcattagagctggatgatagtgacatcagtctgttcgtagccgcaattatctgctgcggggaccggccaggactattaaacgtcgggcacatcgagaaaatgcaggagggaatagtccatgttttaagactgcacttgcaatctaatcacccagatgacattttcctgtttcctaaactgctgcagaaaatggccgacctgagacagcttgtgacagaacacgctcagctggtccagataatcaagaagactgagtctgatgctgcactccacccgctcttacaagaaatctacagagatatgtactag

SEQ ID NO: 234443 - DNA, 1407 bp, synthetic construct
  misc_feature 1..1407: note = Description of Artificial Sequence: Synthetic coding sequence
  source 1..1407: mol_type = other DNA
atggtggacacagagtcccccctgtgcccactgtcacctcttgaggcaggagatctggagagccctctgtctgaagagtttcttcaagagatgggtaacattcaggaaatcagccagtctatcggggaggactcctcaggctcctttgggtttaccgagtatcaatacctcgggtcatgtccaggtagtgatggctcagtcatcacagatacactaagcccagcctcctccccatcctccgttacttatcccgtcgtgcccggatccgtggatgaatccccctccggcgcactgaatattgagtgtagaatctgcggtgacaaggcctctggatatcactacggagttcatgcctgcgaaggttgtaagggcttcttcagaaggactatccgcctgaaactggtttacgacaaatgcgatagaagctgtaaaatccagaaaaagaacagaaacaagtgccagtactgtcgattccacaagtgtctgagcgtggggatgagccataatgctatccgctttggaaggatgcccaggtctgagaaggccaaacttaaggccgagatcctgacctgcgagcatgacatcgaggacagcgaaacagctgatctcaagagcctggccaagcgcatctacgaagcttacctcaaaaatttcaatatgaacaaggtgaaagcccgagtgattctgagtggaaaagcaagcaataatccgcctttcgtaattcacgatatggagaccttgtgcatggccgaaaaaactctcgttgcaaagcttgttgccaatggaattcagaacaaagaagcagaagtgaggatctttcactgctgtcagtgtacctcagttgaaacagtgaccgagctgacggagtttgctaaggccatacccggatttgcaaatctggacctgaatgaccaagtaacactcctcaagtatggggtctatgaggccatcttcgctatgctctcttctgtgatgaataaggatggcatgctcgttgcctatggcaacggttttatcactagggaattcttgaaatcactccgcaagcctttctgtgacatcatggagcccaaatttgattttgctatgaaattcaatgctcttgagctcgacgacagtgatataagtctctttgtggccgctatcatctgctgtggtgataggcctggcttattaaatgtaggccatatcgaaaagatgcaggagggaatagttcacgtgctgaggctgcaccttcaaagcaaccaccccgacgacatatttcttttccctaagctcctccagaagatggctgatctgaggcagctggtgaccgaacacgcccagctcgtacaaatcatcaagaaaactgaaagcgacgccgctctgcacccactcctccaggagatttatcgcgatatgtactag

SEQ ID NO: 234444 - DNA, 210 bp, synthetic construct
  misc_feature 1..210: note = Description of Artificial Sequence: Synthetic coding sequence
  source 1..210: mol_type = other DNA
atggtagatacagagtctcctctgtgtccactctcaccactggaagccggtgacttggaatctcccctgtccgaagagttcttacaagagatgggaaatatacaggaaatatcacaatctataggagaggactcttccgggtcatttggcttcactgaataccaatacctgggctcctgtcctgggtctgacggcagcgtcataacttag

SEQ ID NO: 234445 - DNA, 402 bp, synthetic construct
  misc_feature 1..402: note = Description of Artificial Sequence: Synthetic coding sequence
  source 1..402: mol_type = other DNA
atggtcgacaccgagtctccactctgtccactgtcacctctggaagccggagacctggagtctcccctgagtgaggagtttctgcaggaaatgggcaacatccaggagatcagtcagagcatcggtgaggattcttctggttccttcggctttaccgagtatcagtaccttggttcatgccctgggagcgatggcagcgtgattactgatacattatcacctgcttcatcaccgagctctgtgacatacccggtggtacctggttccgtagacgaatctcctagcggcgcactgaacatcgagtgcagaatttgcggagataaggccagcggataccattatggagtccatgcctgtgaaggttgcaaagtcgagggctcctggaatcgtgcatggtggtag

SEQ ID NO: 234446 - DNA, 525 bp, synthetic construct
  misc_feature 1..525: note = Description of Artificial Sequence: Synthetic coding sequence
  source 1..525: mol_type = other DNA
atggtagacacagaatcgcccttgtgcccactttccccattagaagcaggcgacctggaatcccccctcagcgaagaatttctccaagagatgggaaatattcaagagatttcacagtctataggcgaggactcttctggtagctttgggtttacagagtaccagtatcttggaagttgtccgggaagtgatggaagcgtaataactgatactctctcccctgcaagtagtccatcctcagtgacatatcctgtagtgcctggttcagtcgatgagtctccgtccggagctctgaacattgagtgtaggatttgcggagataaggcgagtggctatcattatggcgttcacgcatgcgagggctgtaagggcttcttccgtcgcaccattagactgaagctcgtgtatgacaagtgcgatcggtcatgtaaaatccaaaaaaaaaaccggaataagtgccagtactgcagatttcataagtgcctgtctgtgggaatgtcgcacaatgccttctgtcacacctag

SEQ ID NO: 234447 - DNA, 30 bp, synthetic construct
  misc_feature 1..30: note = Description of Artificial Sequence: Synthetic coding sequence
  source 1..30: mol_type = other DNA
atggtggataccgaatcacccctctgctag

SEQ ID NO: 234448 - DNA, 489 bp, synthetic construct
  misc_feature 1..489: note = Description of Artificial Sequence: Synthetic coding sequence
  source 1..489: mol_type = other DNA
atgaataaagtcaaggcacgcgtgattttgtcaggcaaagctagcaataaccccccttttgtaatccacgatatggagactttatgcatggcagaaaaaacactagtggcaaaactggtggctaacgggatccagaacaaagaggctgaagtacgcatctttcactgttgccagtgtaccagcgtagagactgtcacagaacttacggagttcgctaaggctattccaggcttcgccaacctcgatctcaacgaccaagtgacccttctcaagtatggagtgtatgaggcaatttttgccatgttgagttctgtgatgaataaagacggtatgttggtagcctatggcaacggattcattacccgcgaatttctaaagagtctgcggaaacctttctgtgacataatggagcccaaattcgattttgccatgaaattcaacgccttagaattggatgattcagacatctctcttttcgtcgcggcttag

SEQ ID NO: 234449 - DNA, 1326 bp, synthetic construct
  misc_feature 1..1326: note = Description of Artificial Sequence: Synthetic coding sequence
  source 1..1326: mol_type = other DNA
atggagcagccacaggaagaagcccctgaggtgcgtgaagaggaagagaaggaagaggtagctgaagcagagggagcccctgagctgaatggcggaccgcagcatgctcttcctagttcctcatataccgatttatctcggtcatcatcgcctccttctctcctggaccagttacagatgggctgcgatggggctagctgcgggtccttgaacatggagtgtcgggtctgtggagacaaggcatcagggtttcactacggagtccacgcctgcgagggctgcaaaggcttcttcagacggaccattcggatgaagcttgagtacgaaaaatgtgagcgcagctgcaagatccagaaaaaaaaccgcaataagtgccagtactgccggttccaaaagtgcctggccctcgggatgtcccataacgcaattcgattcggacgaatgcctgaagcggaaaagcgcaaactcgtagccggtctaaccgccaacgaggggagccaatataatcctcaggtggccgatctgaaggctttcagcaaacacatctataatgcttatctgaaaaactttaacatgacgaagaagaaagccaggtcgatcttgacagggaaggccagccataccgccccattcgtaatccacgacatcgaaaccctgtggcaggctgagaagggcctggtctggaagcagctagtgaacggactgccgccatacaaagagatctctgtgcacgtgttctaccgatgtcagtgtaccacggtagagaccgttcgcgagttaacagagtttgcgaagagcattccttcttttagtagcctgtttttgaacgatcaggtgaccctgttgaagtatggcgtgcatgaagccatctttgccatgttggccagtatagttaacaaggatggacttctggtggctaatggttccggcttcgtcaccagggaattcctcagaagtttgcgcaaaccattcagcgatataattgagccaaagttcgaattcgccgttaagttcaatgctctggagctagatgactctgacctcgccctattcatcgcagctattatcctttgcggcgataggccaggcttgatgaacgtgcccagagtggaagcaattcaggacacaatactgagagctctagaatttcacttgcaggctaatcacccagacgcccaatatctgtttcccaagttgcttcagaagatggccgatcttaggcaacttgtcacagagcatgctcagatgatgcagaggattaagaagacagaaacagaaaccagcctgcaccccttactgcaggagatctacaaagatatgtactag

SEQ ID NO: 234450 - DNA, 1086 bp, synthetic construct
  misc_feature 1..1086: note = Description of Artificial Sequence: Synthetic coding sequence
  source 1..1086: mol_type = other DNA
atggaacaacctcaggaagaagcaccagaggttcgtgaggaagaggagaaggaggaggtggctgaagctgagggtgcaccagagctgaacggcggaccacaacatgcactgcccagttccagctatactgatttgtctcggagttcgtcacctcctagcttgttggatcagttgcagatgggctgtgacggcgcaagctgcggatcactaaacatggaatgcagagtttgcggtgacaaagcatccggctttcattatggggttcacgcttgcgagggatgtaaggggttctttcgacggactatccgcatgaaattagaatatgaaaagtgtgaacggtcatgtaagatccagaaaaagaatcggaacaaatgccaatactgccgattccagaagtgtctggcgctaggcatgtcgcataatgctattcgttttggcagaatgcccgaggcggagaagcggaagctggtggcaggcctgactgccaatgagggtagccaatataatccccaggttgcagacctgaaagcgtttagtaagcacatctacaatgcctacctcaagaattttaatatgacaaagaagaaagccagatccattcttacagggaaagctagtcatactgccccatttgttatccacgacatcgaaacgctgtggcaggccgaaaaggggctggtgtggaagcaattggtgaacggactcccaccctataaggagatctcagtgcatgtgttctaccgctgtcaatgtactacagtcgagaccgtgcgggaacttacagaatttgctaaaagcataccatcttttagctccctgttcctcaacgatcaggtgactcttctcaagtacggcgtgcatgaggcaatctttgcgatgctcgcatccatcgtcaataaagatggactacttgtcgccaacgggtccggtttcgtgacaagagagttcctgagatctctgcgaaaaccctttagtgatattatcgagccgaagtttgagtttgccgtcaaattcaatgctttagagttggacgacagtgatttggcccttttcattgctgccatcatactttgcggaggtgagtag

SEQ ID NO: 234451 - DNA, 1326 bp, synthetic construct
  misc_feature 1..1326: note = Description of Artificial Sequence: Synthetic coding sequence
  source 1..1326: mol_type = other DNA
atggagcaaccccaggaagaagctccagaagttagggaagaagaggaaaaagaagaagtcgcagaggctgagggggctcctgagcttaatggtggccctcaacatgcgctgccatcgtcctcgtataccgacctgtcccgctcttctagccccccttctctcttggaccagttgcagatgggctgcgacggcgcttcttgcggctcactgaacatggagtgtcgcgtttgtggcgataaggcaagcggttttcactacggagttcatgcatgtgaagggtgtaaaggtttcttccgcagaacgataaggatgaagttagaatacgaaaagtgcgaaaggtcctgtaagatacaaaaaaagaatcgcaacaaatgccaatactgtaggttccagaaatgcttagcactgggtatgtctcataacgccatccggtttggcaggatgccagaagccgagaagcgcaagctagtggccggtctgactgcaaatgagggatcgcagtacaacccacaagtggcagacttaaaagctttttcaaaacatatctacaacgcctacctcaaaaattttaatatgaccaaaaagaaagcaagatcaattctgaccggcaaagcatcccatacagccccttttgttatccacgacattgagacattgtggcaggcagagaaaggccttgtgtggaagcagcttgtgaatggcctaccgccatacaaggaaatcagcgtgcacgtgttttacagatgtcagtgcacgaccgtggaaaccgttagggagcttaccgagtttgctaaaagcatcccaagcttctccagtctgttcctcaatgaccaagtgacactgcttaagtacggcgtacacgaggccatcttcgctatgctggcatccattgtgaataaagatggacttttggtagcaaacggatcgggcttcgtcacgagggagtttctccggagcttacgaaaaccttttagcgacattattgagcctaagtttgaattcgcagtaaagtttaatgcattggaactcgatgactcagacctggccctctttatcgccgctatcatcctctgtggcgacaggccagggctaatgaacgtccccagagtggaggctattcaagatacgattttgcgcgctctggaattccacctccaggccaaccacccagacgcccagtacctttttccaaagctgttacagaaaatggcagacctcaggcagctcgtaactgagcatgcccagatgatgcaaaggatcaagaaaacagagactgagacaagccttcaccctctgctacaggaaatatacaaagacatgtactag

SEQ ID NO: 234452 - DNA, 1032 bp, synthetic construct
  misc_feature 1..1032: note = Description of Artificial Sequence: Synthetic coding sequence
  source 1..1032: mol_type = other DNA
atggagcagccacaagaggaagccccagaagtaagagaggaggaggaaaaggaggaagtggcggaggccgaaggggctccggaactgaacgggggaccacaacacgccctgccttcatcgagttataccgctattcgctttgggcgaatgccggaagcggaaaagcgaaagctagtcgcaggcctgactgctaatgaaggttctcagtataacccccaggtggccgacctaaaggcatttagtaaacacatttataatgcatacctgaagaatttcaatatgaccaaaaagaaggcccgatcaatcctcacaggtaaggcaagtcacacagctccattcgtcattcatgacattgagacactctggcaggccgaaaagggtctcgtgtggaaacagttggttaacggccttcctccttataaggaaatttctgtacacgttttttataggtgccagtgtacaacagtagaaacagtgcgtgaactgacggagttcgccaaatccatcccgtccttcagctctctctttttaaacgatcaagttacactgctcaagtacggggttcacgaagctatcttcgccatgctcgctagtatcgtgaataaagatggactcctcgtcgcgaatggttctgggtttgtgacccgcgaattcttaaggtccctgaggaagcccttttctgatatcattgaaccgaaatttgaatttgccgtaaagtttaatgctctggaactagatgatagcgatctcgctctgttcatcgcggctattatcctctgcggcgatagaccgggacttatgaatgtgcctagagtggaagcgattcaggacacaattttaagggctctagaatttcacctccaagctaatcaccccgatgcacagtatctgttcccgaagctgctccagaaaatggcagacttaagacagttagtgacagaacatgcacagatgatgcagcgaatcaagaagaccgaaacagagacatcactgcatccactactgcaggagatttacaaggacatgtattag

SEQ ID NO: 234453 - DNA, 1086 bp, synthetic construct
  misc_feature 1..1086: note = Description of Artificial Sequence: Synthetic coding sequence
  source 1..1086: mol_type = other DNA
atggaacaacctcaggaggaggcaccagaagtgagagaggaagaggagaaagaggaggtggccgaggccgaaggggctcctgagctgaacggaggcccacaacacgccctgccgagcagcagttacactgatctttccagatccagctccccccctagtttactcgatcagttacaaatgggatgtgacggagcttcgtgtgggtccctcaacatggaatgtcgcgtgtgcggagataaggctagcggctttcactatggtgtccacgcgtgtgaaggctgtaaaggattctttagaaggacaattcggatgaaactcgagtacgaaaagtgcgaacgctcctgtaaaattcagaagaagaatcgcaacaagtgccagtattgccgattccaaaaatgtctggccctggggatgtcccacaatgctattagattcggccgtatgccagaggccgaaaaacgcaagttggtcgccggtctcacagcgaacgaaggatcacagtacaaccctcaggtggccgatctcaaagctttcagcaaacacatttataacgcctacctgaaaaatttcaacatgacgaagaagaaggcgcgttccatactgacagggaaagctagtcacacagctccttttgttattcatgatatcgagaccctctggcaagccgaaaaaggattggtgtggaagcagttggttaacgggctccctccatataaggagattagcgtccacgtcttttatagatgccaatgtacaaccgttgagaccgtgagagaactcactgaattcgctaaaagcatcccttccttttctagcttgtttctgaacgaccaggtgaccctgttgaaatacggtgttcatgaggccatcttcgcaatgttagcctccatcgtaaataaggatggtctgctcgtggcaaatggctccgggtttgtgacgagagagttcttgcggagtctccggaagcccttttctgacataatcgaacccaagttcgagttcgccgtcaagtttaatgctctggagctggacgatagcgacctagctctctttatcgcggctataattctttgcggcggagagtag

SEQ ID NO: 234454 - DNA, 1209 bp, synthetic construct
  misc_feature 1..1209: note = Description of Artificial Sequence: Synthetic coding sequence
  source 1..1209: mol_type = other DNA
atgcatcaacgagacctttcacgttcctcttcccccccatccctgctggaccagctacagatgggctgcgacggtgccagctgcggctcccttaatatggagtgcagagtttgcggagacaaagcttctggatttcattatggcgtgcacgcatgcgagggctgcaaaggtttctttcggaggactattagaatgaagctcgagtacgagaaatgtgagaggagctgcaaaattcagaagaagaatcgcaataagtgccagtactgccggttccagaagtgtcttgcacttgggatgtcacataacgccatccgcttcgggagaatgccggaagcggaaaaacggaagctagttgctggactgacggcaaatgagggctcacagtacaacccgcaagtggccgatctcaaagcttttagtaagcatatttataatgcatatctcaagaacttcaatatgacaaagaagaaagccaggagtattctaactgggaaagcttctcatactgctcccttcgtgattcacgatatcgaaactctttggcaggcagaaaagggactggtttggaaacagctggttaatgggctgccaccctacaaggaaatctctgtccacgtattctaccgctgtcagtgcactacagttgaaactgtgcgggaactgactgagttcgcaaagagcattccatccttttcatccctgttcctgaacgatcaggtcaccctcttgaagtacggggtacacgaggcaatcttcgccatgttagcttccattgtgaataaagatggcctcctggttgccaacggatcaggatttgtgacccgggagtttctgcgaagcttgcgaaagccattttccgacatcatcgagccgaagttcgagtttgctgtcaagttcaacgccctcgagctggatgactcggaccttgccctttttatcgccgctattatcctgtgcggcgaccgccctggactcatgaacgtgcctcgggttgaagccatccaggatacaatcttgcgagctctggagttccatctccaggcaaaccaccccgacgcacagtatctgttccccaagttgcttcagaaaatggcggaccttagacagctcgtgactgagcacgctcagatgatgcaacgtatcaagaagaccgagaccgagacatcgctccaccccctgctgcaggagatctataaggatatgtattag

SEQ ID NO: 234455 - DNA, 1017 bp, synthetic construct
  misc_feature 1..1017: note = Description of Artificial Sequence: Synthetic coding sequence
  source 1..1017: mol_type = other DNA
atgaaattagagtacgaaaagtgtgagcgtagctgcaagattcaaaagaaaaatcgaaataaatgtcaatactgtcgctttcaaaaatgcctggccctgggaatgagtcataacgccattcgcttcggccgaatgcccgaggctgagaagcgtaagttagtcgcgggtctgacagctaacgagggctcacagtataatccgcaggtggctgacctcaaagctttcagcaagcacatttacaacgcctacctgaagaattttaacatgacaaagaaaaaggcgagaagcatcctgactggcaaagcttcccacaccgcgcctttcgttatccatgatatcgagaccctgtggcaggccgaaaaaggacttgtgtggaagcagcttgtcaacggcctccctccctataaagagatttctgttcacgtgttctatagatgtcagtgtacaacagttgagacagtgcgagagctcactgagttcgccaagtctatcccatctttttcatccctattcttgaacgatcaggttaccctgctaaagtacggcgtgcacgaggccatcttcgcgatgttagcgagcattgtgaataaagacggtttactcgtcgccaacgggtctggattcgtaacccgcgaattcctgagatccttgcggaagccattcagtgatatcatcgagcctaagtttgagttcgctgtgaaattcaacgcccttgagctggacgacagtgacttagcactttttatagctgccatcattctttgtggggatcggcctggactgatgaacgtcccgagagttgaagctattcaggacaccattcttagggcactcgaatttcatttgcaggcaaaccatccagatgcgcagtacctattcccaaagctcctgcaaaaaatggctgatttgcggcaactggttactgagcatgcccagatgatgcagcgaattaagaagacagaaaccgagacgtcacttcatccactgctccaggagatatataaagacatgtattag

SEQ ID NO: 234456 - DNA, 1518 bp, synthetic construct
  misc_feature 1..1518: note = Description of Artificial Sequence: Synthetic coding sequence
  source 1..1518: mol_type = other DNA
atgggtgagacactgggcgatagccccatcgaccctgagtcggattctttcactgataccctgagcgcgaacatttcacaggagatgaccatggtcgataccgagatgcccttttggcctaccaatttcggcatctcctcagtcgatctatctgttatggaggatcactctcactcctttgatatcaagccattcaccaccgtcgactttagttccatcagcacgccacactatgaagacatcccattcaccagaaccgatcccgtggtggcagactacaagtacgacctcaaactgcaagagtatcagtccgcgattaaggtggaaccggctagtccgccttactatagtgagaaaacgcagctatacaacaagcctcacgaggaaccatcaaattctttaatggcaatcgaatgcagagtgtgtggggataaggctagcggttttcactatggagtccacgcgtgtgaggggtgcaagggatttttccgcaggacaatccgattaaaactcatttatgaccggtgtgatctgaactgccgtattcacaagaagtcaagaaacaagtgtcagtattgcaggttccagaagtgtctcgccgtggggatgagccataacgccattcggtttgggagaatgccacaggctgagaaggaaaaactcctcgctgagatcagtagcgatatcgaccaactgaatccggagtccgctgatctgcgagctcttgccaaacatctctacgacagttacatcaaaagctttccactaaccaaggcaaaggcaagagccatcttgacaggtaagactacggataagtcaccttttgtgatctacgacatgaacagtctgatgatgggcgaggataaaatcaagttcaaacatatcacgcccctgcaagaacaatcaaaggaagttgccattagaattttccagggctgccagttccgctccgtggaggccgtgcaagaaatcacagagtacgctaagagcatacccggattcgtcaaccttgatctaaacgaccaggtaaccctccttaagtatggggtgcacgaaataatctacacaatgctggcctcgctgatgaataaagatggggtgctgatcagcgaaggtcagggcttcatgactcgcgagttcctcaagtctttgcgaaaaccctttggcgacttcatggaacctaaatttgagtttgctgttaaatttaatgccctggagcttgacgactccgatctggctatttttatcgccgtgatcattctctcaggagatcgcccagggctgttaaacgttaaaccaatcgaagacatacaagacaatcttctgcaggccctggagcttcagcttaagcttaatcacccagagagctcccagctgtttgcaaaattactgcagaagatgaccgatctcaggcaaatagtgacagagcatgttcaattactccaggtgataaagaagaccgagactgacatgtctctgcaccctctgctgcaagaaatctataaggatctctactag

SEQ ID NO: 234457 - DNA, 1434 bp, synthetic construct
  misc_feature 1..1434: note = Description of Artificial Sequence: Synthetic coding sequence
  source 1..1434: mol_type = other DNA
atgaccatggttgacaccgaaatgccgttttggcctactaattttggcatcagttctgtcgatttatcagtcatggaggatcactcccatagctttgatattaagccgttcaccacagtcgacttttcgtctatttccacgcctcattatgaggatatacctttcaccagaactgaccccgtggtcgctgattataaatacgatctgaaattgcaggagtaccagagcgctatcaaagtagagcccgctagtcccccatattacagcgagaagactcagctttataacaagccacacgaggaacccagcaacagcttgatggctatcgagtgccgtgtgtgcggggataaggccagtgggttccactacggagttcatgcatgcgaaggctgcaagggattcttccggaggacgatccgcctcaagctgatttatgaccggtgcgatcttaattgccgtatccacaagaaaagtcgcaacaaatgtcagtattgtcggttccagaagtgcttagcagtgggcatgtcgcacaatgcaattcggttcggacgaatgccacaggccgagaaggaaaagctgcttgccgagatctcaagcgatatcgaccagctaaacccggagtccgcagacctccgggcactggcaaagcatctatatgatagttatattaaaagttttccattgaccaaagccaaggccagggcaatcctcaccgggaaaaccactgataaatctcctttcgtgatttacgatatgaactcactgatgatgggagaggacaagattaaattcaagcatattactcctctgcaggagcagtcaaaagaagtggccataaggatctttcaggggtgtcagtttagatccgtcgaagccgttcaagaaatcactgaatatgccaaaagcattccaggatttgtaaacttagatctaaacgaccaagttacactgctcaaatacggtgtgcacgaaattatctatactatgctagcatcccttatgaataaagacggcgtactcatttctgagggtcagggctttatgacacgggaattcctgaaatcattgcggaaaccgtttggagactttatggagccgaaattcgagttcgccgtgaagttcaacgccttggagctcgatgattctgatctggccatattcattgcagtgattatactgagcggcgacaggcccggactgcttaacgtgaagcccatcgaggacattcaagacaacctcctgcaggcactggagctgcagctcaaacttaatcaccctgaatcatctcagctttttgctaagcttctgcaaaagatgacagacctgaggcagattgtcacggagcatgttcagctgcttcaggtcatcaaaaaaaccgaaacagacatgagtcttcaccctctgctgcaggaaatatacaaggatctctactag

SEQ ID NO: 234458 - DNA, 753 bp, synthetic construct
  misc_feature 1..753: note = Description of Artificial Sequence: Synthetic coding sequence
  source 1..753: mol_type = other DNA
atgaccatggtggatacggaaatgccattctggcctaccaatttcggcatcagtagcgtggatcttagtgttatggaagatcacagccactcattcgatatcaagccctttaccacggtagacttttcttcaattagtactcctcattacgaggatatcccattcactaggactgatcccgtagtggctgattataagtatgatttgaaactgcaggagtaccagagcgcaatcaaggtggagccagcttctcccccatattattccgagaagacccagttgtataacaagccacacgaggagcccagcaactccctgatggctatcgagtgtcgggtctgcggtgataaagccagcgggtttcactatggggtgcatgcttgcgagggctgtaaggggttcttccgaaggacaattcggctgaagttgatttacgatcggtgcgacctgaattgtcggattcataagaaatcacgcaacaaatgtcaatactgcaggttccaaaaatgccttgcagtcgggatgtcccacaatgctattagattcggcaggatgccgcaggccgaaaaggaaaagctgctggccgagatttcctctgacatcgaccagctcaatcccgagagtgcagacctaagagccctcgcaaagcacctttatgattcctacattaaatcattccctcttacaaaagctaaggccagagctatcctcacagggaagaccactgataagagcaccgcccaggtttgctag

SEQ ID NO: 234459 - DNA, 1434 bp, synthetic construct
  misc_feature 1..1434: note = Description of Artificial Sequence: Synthetic coding sequence
  source 1..1434: mol_type = other DNA
atgaccatggtggacaccgagatgcctttctggccgacaaattttgggatcagttccgtggatctgagtgtgatggaagaccacagtcactccttcgatatcaaaccttttaccacagtagacttttcttctatatccacgcctcattatgaagacattccatttactcgcacagaccctgtggtggctgattataagtatgacttaaagcttcaagaataccagagcgccattaaagtggaaccagcctcacctccatactactcagagaaaacgcaactgtacaataagccacacgaagagccatcaaacagcctgatggcaatcgaatgtcgcgtgtgcggcgacaaagccagcgggttccattatggcgtccatgcctgcgaagggtgcaaaggcttcttcaggaggactatccgcctgaaactaatctatgataggtgtgacttgaactgcagaatccacaaaaaatcgaggaacaaatgccagtactgtcggttccagaaatgtctagcggtgggaatgtctcacaatgcgatcagatttggccgtatgcctcaggcggaaaaggaaaagcttttggcggagatcagctccgatattgaccagctgaacccagagtccgctgacttgcgcgctctcgcaaaacacctatatgattcctacatcaagtcattccctctaactaaagctaaagcccgtgccattttgaccggcaagactactgataaatccccgttcgtgatttatgacatgaattccctcatgatgggagaggataagatcaagtttaaacacatcacccctctgcaggagcagagtaaggaggtggccatacgtattttccagggttgtcagttccgtagtgttgaagccgtgcaggagatcactgagtatgcgaagagcatacctggattcgtcaacctggatctaaatgatcaggtgacacttctgaaatatggagtccacgaaataatttataccatgcttgccagcctgatgaataaggatggggtcctcatctccgaaggccagggattcatgactcgggaatttctgaaatctttaagaaagccttttggcgatttcatggaacctaaattcgaattcgcagttaaatttaacgccctcgagctcgatgactctgatctggccatctttatagccgtgatcattctctcgggggatcggcctggccttctcaatgtgaagcctatcgaagacatccaggacaatctgttgcaggcactagaactgcagctgaaactaaatcacccggagagcagtcagctcttcgctaaattactccagaagatgactgacctaaggcaaattgtgactgagcacgtgcaactcctgcaggtgatcaagaagactgagaccgacatgagcctgcaccctttgctgcaagagatctacaaggacctgtattag

SEQ ID NO: 234460 - DNA, 1434 bp, synthetic construct
  misc_feature 1..1434: note = Description of Artificial Sequence: Synthetic coding sequence
  source 1..1434: mol_type = other DNA
atgactatggtcgatactgaaatgcctttttggccgaccaatttcggtatcagttcagttgacctaagcgttatggaagatcattctcactcattcgatatcaagccttttacaaccgtggatttttctagcatcagtaccccccactacgaggacatcccttttacccggacagatcccgttgtggcagattacaagtatgatctcaaactgcaggagtaccagtccgctataaaggtggaacctgcctcacctccatattactctgagaagacgcaattgtataacaagcctcacgaggagccgtcaaacagcctgatggctatcgagtgtagggtttgcggagataaggctagcggctttcattacggtgtccacgcttgtgagggctgtaagggtttcttccgacgcactatccgactgaaactcatttacgatcggtgtgatttgaactgtcggatccacaagaagtcccgaaataagtgtcagtattgtaggttccagaaatgtttagccgttgggatgtcacataacgccatcagattcggcaggatgccccaagccgagaaagaaaagctgctggccgaaatttctagcgacatagatcagttgaatcccgagtccgccgacctccgagcactggccaagcatctgtatgattcctacatcaagtctttcccgcttacaaaggctaaggcccgagctatcttaaccggcaagacgacagacaagtcccctttcgtcatctatgacatgaatagtttgatgatgggcgaggataaaattaagttcaagcacatcacgccactccaggaacagagtaaagaggttgccatacgcattttccaagggtgtcagtttaggtccgtcgaagcagtgcaggagatcacagagtatgccaaatctattccagggttcgtgaacctggatttgaacgaccaagtgactctgcttaaatacggggtgcacgagatcatttacacaatgcttgcctcactcatgaacaaagacggcgtgctgatatctgaaggtcaggggttcatgacccgcgaattcctgaaaagtctgaggaagccctttggcgattttatggagcctaagttcgagtttgccgttaagtttaacgcgttagagctggacgatagcgatctcgcaatctttatcgctgtgatcatcctgtctggagatcgtcccggtctgctaaatgtgaagccaatagaagatatccaggataatctgctgcaggctttagagttacagctgaagcttaatcatccagagagctctcagctgttcgccaagcttctccagaagatgaccgatctgcgacagatcgtgacagaacacgtacagctgttgcaggtaattaaaaaaactgagaccgacatgagcctgcaccccctactgcaagagatttataaagacctgtactag

SEQ ID NO: 234461 - DNA, 1434 bp, synthetic construct
  misc_feature 1..1434: note = Description of Artificial Sequence: Synthetic coding sequence
  source 1..1434: mol_type = other DNA
atgaccatggttgataccgaaatgcctttctggccgactaacttcggaatttcttccgtagacttgtccgtcatggaagaccactcccacagctttgacattaagcctttcaccaccgtcgatttctcctccattagcactccccattatgaagatattccatttactaggactgatccagtcgtagccgactacaagtatgacctgaaactacaggaataccaaagcgcaattaaagtcgaacccgcatcccctccttactactctgagaagacccagctatataacaagccacacgaggagccttcgaactcattgatggcgatcgaatgccgagtttgcggggataaagcctcgggatttcactacggggtacacgcctgtgagggctgcaagggcttcttcagacggacaattaggctgaagcttatctatgatcggtgtgacttgaactgccgaatccacaagaagtctcgaaacaaatgccaatattgtcgattccagaagtgtctggctgtcggcatgagccataatgctatcaggttcggcaggatgccacaagcagaaaaggagaagttgctcgctgagatctcctctgacatcgatcagttgaaccctgagtctgcagatctgagggccctggccaaacatctatacgactcatatatcaagtcattccctctcacaaaggccaaggccagggccatactcacaggtaaaaccaccgataagtcaccattcgtaatttatgacatgaactcactaatgatgggcgaggacaagattaagttcaagcacatcactcctctgcaagaacagtccaaggaagtggctatcagaatattccagggatgccagttcaggagtgtggaagccgtgcaggagattacagaatacgcaaagagtattccaggatttgtgaacctggacctgaatgatcaagtgaccttgctaaagtacggcgtgcacgaaataatttacacaatgctggcgtccctgatgaacaaggacggcgttctgattagtgaggggcaggggttcatgactcgcgagtttctcaaatccttaaggaaaccgttcggcgactttatggaaccgaagtttgaattcgccgtgaaattcaacgctttggagctggacgattccgatctggcaatcttcatcgctgtgattatcctgtctggagacaggccaggcctgctgaacgtgaaacccatagaagacatccaggataatctactccaggccctggaattgcagctgaagttgaaccaccctgagagctcccagctgttcgcgaaactgctgcaaaagatgacggacctccgtcagatcgtcacagagcacgtccaacttttgcaagtgatcaagaaaacggagactgatatgtcactgcaccccctgctgcaggagatctataaagacctgtattag

SEQ ID NO: 234462 - DNA, 1452 bp, synthetic construct
  misc_feature 1..1452: note = Description of Artificial Sequence: Synthetic coding sequence
  source 1..1452: mol_type = other DNA
atgaagggattttccgaaatgacaatggtagacactgagatgcctttttggcctaccaatttcggtattagcagtgtagaccttagtgtgatggaagatcactcccactcgtttgatatcaaacccttcaccacagttgacttctcttccatctcaacaccacactacgaagacataccattcactaggactgaccctgtagtggctgactataagtacgatttgaaactccaggagtaccagtccgctatcaaggtcgagccagccagcccgccttactacagtgaaaagactcagctgtacaataaaccgcatgaggagccttccaattcgcttatggctattgagtgtcgagtttgtggcgacaaggcgagtggttttcactacggagtgcatgcatgcgaggggtgtaagggattcttccgccgaaccattagactcaaattgatctacgaccggtgcgacctcaactgtagaatacataagaagtcacgcaataagtgccagtactgtagatttcaaaaatgcctagcagtcggcatgagtcataatgctatccgtttcggtcgcatgccgcaggcagagaaggaaaaactcctggcagagatcagctcagatatcgatcagctgaacccggaatctgccgatctgagagctcttgcgaaacatctgtacgacagttacataaagagcttcccattgactaaggctaaagctcgagctatcctgaccggtaaaacaaccgacaagtcccccttcgtaatctatgacatgaattccttgatgatgggcgaagacaagattaaattcaagcatatcacccctttgcaggaacagtctaaagaggttgccatccgtattttccaggggtgtcagttccgaagcgtggaggcggtgcaagagatcacagaatatgctaagtccattcccggttttgtgaatctggacctcaacgatcaggtaactctcctgaagtacggagttcatgagattatatacaccatgctcgctagcctaatgaataaagacggcgtgctgatctctgaaggccagggctttatgacaagggaattcttaaagtcactcaggaaaccttttggcgatttcatggagccaaagttcgagttcgctgttaagtttaacgcgttagagctcgacgactctgatctggcgatattcatcgcagtcattatcctctctggagaccgtcccggtttacttaatgtcaagcccatagaggatatccaagataatctactccaggccctagagctacagcttaagctcaaccatccagagagctctcaacttttcgccaaactcctgcaaaagatgactgatctccgacagatagttacagaacacgtgcagcttttgcaggtgataaagaaaactgagacggatatgtcgctgcaccctctgctgcaggagatttataaggacctttactag

SEQ ID NO: 234463 - DNA, 399 bp, synthetic construct
  misc_feature 1..399: note = Description of Artificial Sequence: Synthetic coding sequence
  source 1..399: mol_type = other DNA
atgacaatggtcgatactgagatgcccttctggccaacaaattttggaatctccagcgtggacctgtcagtgatggaggatcattcacatagcttcgacataaaaccctttaccacagtagacttttcttctatcagtactccacactacgaggatataccctttactaggacagacccagtggtggccgactacaagtacgatttgaaactccaggagtaccaaagtgccatcaaggtggagccagcctctccaccatattactcagaaaaaacccaactgtataacaagccccacgaggaaccatccaattctcttatggcaattgagtgtcgggtctgcggcgacaaggcttcaggcttccactatggagtgcatgcatgcgagggatgcaagtag

SEQ ID NO: 234464 - DNA, 300 bp, synthetic construct
  misc_feature 1..300: note = Description of Artificial Sequence: Synthetic coding sequence
  source 1..300: mol_type = other DNA
atgactatggtcgacaccgaaatgcccttctggcccacgaattttggtatctcctctgtcgacctgagtgtcatggaagatcattcccattcttttgatatcaaaccattcaccacagtggattttagcagcatatccacacctcattacgaagatatcccttttacgcgaacagatcccgtggtggccgattacaagtacgatctgaaactgcaagagtatcagagcgctattaaggttgaacccgctagccccccttactactccgagaagacccagctgtataataagccacattag

SEQ ID NO: 234465 - DNA, 132 bp, synthetic construct
  misc_feature 1..132: note = Description of Artificial Sequence: Synthetic coding sequence
  source 1..132: mol_type = other DNA
atgaccatggtagatacagagatgccattttggccaactaacttcggaatctcctccgtagacctaagtgttatggaggaccacagccactcctttgacattaagccatttaccacagtggatttcagttag

SEQ ID NO: 234466 - DNA, 747 bp, synthetic construct
  misc_feature 1..747: note = Description of Artificial Sequence: Synthetic coding sequence
  source 1..747: mol_type = other DNA
atggttgatacagagatgcctttctggcccactaatttcgggatcagtagcgtagatctgtccgtgatggaagaccacagccactcttttgacattaaaccattcaccactgtagacttcagttcaatttcaacaccccattacgaggacatccccttcaccaggactgaccccgttgtggccgactacaaatatgacctcaaactgcaggagtatcagagcgccatcaaggtcgagccagcctcacccccttattattccgaaaaaacacagttgtataataagcctcacgaggagccgtccaattcgcttatggccattgagtgcagggtatgcggtgataaggcttctgggtttcactacggagtgcatgcttgcgaagggtgcaaaggctttttcaggcgcactattcggctgaaacttatctatgatagatgcgatctgaattgcaggattcacaagaaatctcgcaataagtgccagtattgtcggtttcagaaatgcttagcggtagggatgtctcataacgctatcaggttcggccgtatgccccaggcagaaaaggaaaagctgctcgctgagatcagctccgatatcgatcaactgaatccagaaagcgctgaccttcgtgcccttgccaaacatctttacgactcatacattaaaagcttcccactgaccaaagctaaggcccgtgctattctaaccggaaaaacgacagataagtccacggcacaggtttgctag

SEQ ID NO: 234467 - DNA, 2955 bp, synthetic construct
  misc_feature 1..2955: note = Description of Artificial Sequence: Synthetic coding sequence
  source 1..2955: mol_type = other DNA
atggctggcaacgactgcggagcactcctggacgaggagctgtcatcattcttcctgaactacctagctgacacgcagggcggaggcagtggggaagagcagctgtatgccgattttccggagttggacctctctcaactggatgcatcggatttcgactccgcaacctgcttcggagaattacagtggtgccccgagaactccgagacggagcccaatcagtactcccccgacgacagcgagctattccagattgattccgaaaatgaagcccttctcgcagaattgactaaaacgctggacgacatccctgaagacgatgtggggcttgccgcatttcccgcattagatgggggagatgccttgtcatgtacttccgcctcccccgcaccttcatccgcccctccatcccccgctccagaaaagccttccgcacctgccccagaggtggatgaactgagcctcgccgattcgactcaagataaaaaggccccaatgatgcaaagtcagagtcgatcatgtacagaattacacaaacaccttaccagtgcacaatgctgtctccaggatcgcggattgcagcccccttgtctgcagtcaccaagactgcccgctaaagaagataaggagcctggagaggattgtccttccccccagcctgctccggcttcccctcgtgatagtctcgctctggggcgtgccgatcccggtgccccagtgagccaggaagacatgcaggcaatggtccagctaatcagatacatgcacacatattgtcttccacagagaaagctacctcctcagaccccggagcctctgccaaaagcctgcagcaatccatctcagcaggtccggtctaggccttggtcacgccaccattcaaaggcttcttgggccgaattcagcatcctccgcgaattactggcccaggatgtgctgtgcgatgttagcaagccataccgattagccactcctgtgtacgcctctttgactccccgatcgagacctcgcccacccaaagattcgcaggccagcccgggtagaccctctagcgtggaagaggtgcggattgcagcatccccaaagtctactggcccaaggccttccttacggcctctccggctggaagtgaaacgggaggtgcggaggcccgcacgtctgcaacagcaagaagaggaagacgaggaagaagaagaggaggaggaagaggaggaaaaagaagaggaagaagagtggggccgtaagaggccaggccgaggtctgccttggaccaagctaggtcgaaagcttgagagttctgtctgcccagttcggaggagccgaaggttaaaccccgaactcggtccatggttgacatttgccgatgaacctttggtaccaagcgaacctcaaggcgcacttcctagtctgtgcctggccccaaaggcctatgacgtggagcgcgagctaggcagccctacagatgaggactcaggtcaagaccagcagttgctgcgcggtccacaaatacccgcactggaatcaccctgcgaaagcgggtgcggcgacatggacgaggaccctagctgtcctcagctccccccaagagacagcccccgttgtctaatgcttgcactttcacagagcgatccaacattcggcaagaagtcattcgagcaaaccctgacggtcgagctttgcgggactgcagggctcactccccctaccaccccaccgtataaaccgacggaggaagaccccttcaagccagacattaagcatagccttggaaaggagatcgctctttcactgccgagccctgagggcctgtcccttaaggctacccctggcgctgcacataagcttcctaagaagcaccctgagagaagtgagctgctcagccaccttaggcatgccaccgcgcagcccgcaagccaggccggtcaaaagcgccctttctcgtgcagtttcggcgatcacgactattgtcaggtccttagacctgagggcgtcctgcagagaaaggtgctcaggtcgtgggaaccttcaggggtccacttagaagactggccccagcagggagccccttgggcagaggcccaggcccctggcagggaagaagacaggagctgtgatgctggcgctcctcccaaagattcaacactgctgcgggaccacgagatcagggcaagccttaccaagcatttcggactgttagaaaccgctcttgaagaggaagacctcgcctcctgtaaaagtcccgagtatgatactgtatttgaggattcctcgtctagctcaggcgaatcctcctttcttccagaagaagaagaggaagaaggagaggaggaagaagaggacgatgaggaagaagattcgggagtgagtccaacatgtagtgatcactgcccctaccaatccccgccatccaaagccaataggcagttgtgttctcgaagtaggagctcaagcgggtcatctccttgccatagctggagccctgcaacccgccgaaacttcaggtgtgagagtcggggaccctgtagcgatagaaccccttccatcaggcacgccaggaagcgaagagaaaaagccataggcgaagggagagtggtctacattcaaaacctaagcagtgatatgtcctctcgtgaactcaagaggcgattcgaagtcttcggggaaatcgaggagtgtgaggtgctcacacgcaatcgtcggggtgagaaatatggcttcattacctacagatgttccgagcacgccgcactaagcctgactaagggtgcggctctgcgcaaaaggaacgaaccatcctttcaactcagctatggtggtcttagacatttctgctggccgaggtatacagattatgattccaacagcgaggaagcattgcccgcttccggcaagtcaaagtacgaagctatggattttgactctctgctgaaggaggctcagcagagtttgcactag

SEQ ID NO: 234468 - DNA, 2880 bp, synthetic construct
  misc_feature 1..2880: note = Description of Artificial Sequence: Synthetic coding sequence
  source 1..2880: mol_type = other DNA
atgggcggaggatccggtgaggaacagctctacgccgattttcccgaattggacctgtcccagctggatgcatcagatttcgacagcgctacgtgctttggtgagctccaatggtgtcccgaaaatagcgagacagagcccaaccaatattctcccgacgattcagagctctttcagatcgattcagaaaacgaagctctgctggccgaattaactaaaactctggatgacatccccgaagatgacgtggggctggccgcattccctgccttggacggtggggacgctctcagctgtaccagcgcaagccctgctccctccagtgcccctccctcacctgcccctgaaaagcctagtgcacccgctcccgaggtggacgaactgtccctcgcggactctactcaagacaagaaggccccaatgatgcagtcccagagccggtcatgcaccgagctccacaaacatcttacatccgcacagtgttgtctacaagacaggggattgcaacctccctgcctgcaatcccccagactgccagccaaagaggacaaggaaccaggcgaagattgtccttccccacagccagcccctgccagtcccagggattcactcgcgctcggcagggcagaccctggtgccccagtgagccaagaggatatgcaggccatggtccaattgatcaggtatatgcatacctactgcttgcctcagcgcaaactgcctcctcagactccagagccgcttcccaaagcctgcagcaacccctcgcaacaggtgaggagcaggccctggtcccggcaccattcaaaggccagctgggccgagttctccatcttacgggaactcctggctcaagacgtgttgtgcgacgtctccaagccctacagattggccacacccgtgtacgcaagcctgacgcctcgttctcggccacgccctcctaaggattcccaagcttcacccggtagaccctccagcgtggaggaagttcggatagcagcaagccctaagtcaacaggtccacggccttccctgcgccctttgagactggaggtgaagagggaggtgcgtcgcccagctagattacagcagcaggaggaagaggatgaagaggaggaagaagaagaggaggaagaggagaaggaagaggaagaagaatggggcaggaagcgccctgggagaggcctgccatggacgaagctcggcaggaagctggagtcatccgtatgcccagtgcgccgatcccggcgtttgaaccctgagttaggcccatggctcacatttgccgatgagccattagttccatctgagcctcagggggctctgccttcactgtgcctggcaccgaaggcttacgacgtggagagagaactggggtcaccaacagacgaggacagtgggcaggatcagcagttactcagaggcccacaaattccagcactcgaatccccttgcgaatctgggtgtggtgatatggatgaagatcctagctgccctcagctgccccctagagacagtccgagatgcctgatgttagcgttgtctcagtcagatcccacttttgggaagaagtcctttgagcagactctaactgtggaattatgtggaacagccggtctgaccccccctaccacccccccttataaacctacagaagaggatccattcaagccagacatcaaacactctctggggaaggaaattgctctgtccctcccctcacccgaagggctgtccctgaaggccactcctggcgctgcacacaagctgcccaagaaacacccggagcggtcggagctactgagccatcttcggcacgctacagctcagcccgctagtcaggcaggccagaagcgccctttttcctgttcctttggagaccacgactattgccaggttctgcgacctgaaggggtgctacaacgaaaagtactcagatcatgggaaccatcaggggtccacttagaagactggcctcagcagggtgccccatgggcagaggcccaggccccaggtcgggaggaggatcgttcttgcgacgctggcgctccaccaaaggattcgacactgctccgggaccacgaaatccgcgcatcactgaccaaacacttcggcctgctggaaacggctcttgaagaggaagatcttgcctcgtgcaagtcaccagaatacgacacagtatttgaggacagcagctcatcgagtggcgagtcctcattcctgcccgaagaggaggaggaggaaggggaggaggaggaagaagatgacgaagaagaggatagcggggtctccccaacctgctccgatcactgcccctatcagtcccctccatcaaaggccaataggcaactctgctctagatctcgtagtagctctggtagttccccatgccattcctggtctcccgctacccgccgtaactttcgctgtgagagccgcggaccttgtagtgaccgaactccgtccattcgccacgccagaaaacgtagagaaaaagccatcggcgagggcagagtcgtgtacatacagaacctgagcagcgacatgtcaagccgcgagctgaaaaggagattcgaagtgtttggagaaatcgaggagtgcgaggtgttgacgagaaatcgacgaggggaaaaatatggatttatcacttatagatgcagcgaacacgcggctctatctctcactaagggagcggctctgcgtaagcgcaatgagccgtccttccagctgagttatggaggtctgcgacatttttgttggcctcggtacaccgattatgattccaactctgaggaagcgctgcctgcttcaggcaagagcaagtatgaggctatggattttgacagtctgttaaaggaggcccaacagagtctgcactag

SEQ ID NO: 234469 - DNA, 2397 bp, synthetic construct
  misc_feature 1..2397: note = Description of Artificial Sequence: Synthetic coding sequence
  source 1..2397: mol_type = other DNA
atggcatgggatatgtgcaaccaagatagtgaatcagtgtggtccgacatcgagtgcgctgcgttggtgggcgaggaccagccactgtgccccgacctgccagagctcgatctgtctgagctcgatgtgaacgatctggacaccgattctttcctcggagggctgaagtggtgtagcgatcagtctgagatcatcagtaaccaatataacaacgagccaagcaacatcttcgagaagatcgatgaggagaacgaggccaacctcctggcagtcctgacagaaactcttgattccctgcccgtcgatgaggacgggttgccatccttcgatgccctcaccgatggcgatgtcaccaccgacaacgaggccagcccatccagtatgccagacggcacaccgccaccgcaggaggctgaggaacctagcctgctaaagaaactgcttctggctcccgctaatacacagctgtcgtacaacgaatgcagcggcctgtcaactcagaaccacgctaatcacaaccaccgcatacggaccaacccagccatcgttaagaccgagaacagctggtctaacaaggcaaagtctatttgtcagcagcagaagccccagcgtcggccttgcagtgaattgttgaaatacctcaccactaacgatgatccaccccataccaagccgacagaaaatcggaacagttcgcgcgacaaatgtacctctaaaaagaaatcccatacgcagtctcagtcgcaacacctccaggccaagccaacaaccctgtctcttcctttgaccccagaatcccccaatgaccccaaagggtcccctttcgaaaacaagacaattgagcgcaccctttctgtggagctcagtggcactgccggtctgactccacccaccacaccccctcataaagctaatcaggataacccattccgggctagtccaaaattgaaatcaagctgcaagaccgtggtgccgcctccctccaaaaagccccgatacagcgaatctagtgggacccaggggaacaattccactaaaaagggccctgagcaaagcgagctgtatgctcagctgtctaagagttccgttctgactggcggacacgaggagcgaaagactaagcgcccttcactccggctgttcggggaccacgactattgtcagagcataaattctaagaccgaaattttaatcaatatcagccaggagctgcaagacagtcgtcagctggagaataaagacgtgagctccgactggcagggccagatatgcagttccactgatagcgatcagtgctatctgagagaaaccctcgaggccagcaagcaggtgtcgccatgttctacccggaaacaactgcaggatcaggagattcgggctgaattaaacaagcatttcgggcatccgtcccaggccgtatttgacgacgaggctgacaaaaccggggaactgcgtgacagtgatttctcaaatgaacagttcagcaagttaccaatgttcattaactctggactcgccatggacggactgtttgatgacagcgaggatgaatccgataaactctcttatccatgggatgggacgcagtcctattctttgttcaacgtttctccaagctgtagttcctttaactcaccatgccgcgattcagtatctcctcctaagagcctcttttcacagaggccacagaggatgcgctcccggtcaaggtcttttagcagacatcgctcttgttcaaggtctccctatagtagatctaggagtcgcagcccgggatcccgatcatcatcaaggtcgtgctattactatgagtcatctcactaccgacatcgcacacaccgaaactctccactatacgtgagatccaggagtcggtctccttactcaagaaggccaaggtacgactcatacgaggagtatcaacatgagagacttaaaagggaggagtaccggcgagagtacgaaaaacgtgaaagtgagagagccaagcaacgcgaaagacagcgtcagaaagcaattgaggagcgcagggttatatacgtgggaaaaattaggccagatactactagaacagaactgcgagacaggtttgaagtgttcggggagatagaggagtgcaccgttaatctgcgcgacgacggtgacagttacggtttcattacatatcgatacacgtgcgatgcttttgcagcgctcgagaacgggtatacactcaggaggagcaacgagaccgatttcgagctgtatttttgtgggcgaaagcagtttttcaaatcaaattacgcagacctggatagtaattctgatgactttgacccagcttcaactaagtcaaaatacgactccctggactttgactctctcctgaaggaggcccaacggtctctccgccgatag

SEQ ID NO: 234470 - DNA, 3072 bp, synthetic construct
  misc_feature 1..3072: note = Description of Artificial Sequence: Synthetic coding sequence
  source 1..3072: mol_type = other DNA
atggcaggaaatgactgtggtgcgctgttagacgaggaactgtcctccttttttctcaattaccttgccgacacccaaggaggtgggagcggggaagaacaactctacgccgactttcctgaattggacctgtctcaactcgacgcctccgatttcgatagcgctacttgttttggggagctgcagtggtgtcctgagaactccgaaactgagcctaaccagtatagccccgacgactccgagctgtttcagatagatagtgaaaacgaggctctcctggccgagttaaccaagacccttgacgacatcccggaggatgacgtgggtctggccgcttttcctgccttagatgggggtgacgcactctcatgcacttctgctagtcctgccccaagctcagcaccaccatctccagcgccagaaaagccatccgccccagcaccagaggtagacgagctgagtttacttcagaagctgttgctggccactagctaccccacaagcagcagcgatacgcagaaggagggcactgcgtggagacaggctgggctacgaagcaagtctcaacgaccttgcgtcaaggctgatagtactcaggacaaaaaagcccctatgatgcagagccagtcacggtcatgcaccgagctgcataagcaccttacatccgcacagtgttgcttacaggaccggggattgcaaccgccttgcctccagagtcccagacttccagctaaggaggacaaagagcctggggaggattgtccatctccgcagccagcaccggctagtcctcgagacagcctcgcgctgggtcgggctgaccccggagccccagtgagccaagaagatatgcaggccatggtgcagttgatacgatacatgcatacttactgcttgccccagcggaaactgcccccacagaccccagagcctctgccaaaagcgtgttcgaatccttcgcagcaggtaagatctagaccttggtcacgtcatcacagtaaggcttcttgggctgaattttccatcctgagagaactgttggcccaggacgttctgtgcgacgtctctaagccatacagactggctaccccagtgtatgccagtctcacaccgagatcaagaccaaggccccctaaggattcacaggccagcccaggacgcccatcgagtgtcgaggaagttcggatcgcggcttcacctaagagcaccggaccccgtccgagcctgcgacccttgcgcctggaggtaaagcgcgaagtcagacgacccgcaaggctgcagcagcaagaagaagaagatgaagaagaagaagaggaagaggaggaggaggagaaggaagaggaggaagaatgggggagaaagcggccaggtagaggcctcccgtggactaagctgggccgaaaactggagagctcagtctgcccagtccgcagaagtcggaggctcaatcctgagttgggcccatggttgaccttcgctgatgagccgctggtgcctagcgagcctcaaggcgctttgccttcactgtgcctggcccctaaagcctacgacgtggagcgcgaactgggatcccctactgacgaagactctggccaggaccagcagctactcagaggcccacagattcccgctctcgagtcgccatgtgagagtggatgcggcgatatggacgaagaccctagttgtcctcagttgccccctcgggattctcctcgctgcctaatgcttgccctttcccagagcgaccctacatttggaaaaaaaagcttcgagcagacgctgacagttgagctctgtggaactgccggtctgaccccccctaccacccccccttataagccaacagaggaggacccttttaagccggatatcaaacatagcctgggaaaggagattgctctgagcctcccatcccccgaaggactgtcactcaaggctacacctggggctgctcacaagctcccaaagaagcaccccgaacgatctgaactactatcccacctacgccacgccacagcccagccagccagccaggctgggcaaaaacgacctttcagctgctccttcggtgatcacgattattgccaagttctcaggcccgaaggagtgttgcagcggaaagtgctcaggagctgggagccctccggcgtgcaccttgaagactggccccagcagggagctccctgggctgaggcgcaggcgccaggaagagaggaggaccggtcatgcgatgctggtgccccacctaaggacagtacgctgttgagggaccacgagatcagggcctctctgacaaagcactttggcctgcttgagacagctttagaagaagaggacttggccagctgcaagtccccagagtatgacactgtcttcgaggactcatccagctctagtggagaatcctccttcctcccggaggaggaggaggaggagggagaggaagaagaagaggacgacgaagaagaggacagtggcgtatcccctacctgcagtgatcactgcccatatcaatcccccccttccaaggccaatcgccagttatgttccaggtctaggtcctcttcgggatctagtccctgtcactcttggtccccagcgacccgaaggaacttcaggtgtgagtcccgaggaccctgcagtgatcgcactccttcaatcaggcatgcgaggaagcgcagggaaaaggctataggcgaggggcgtgtggtttacatacagaatctttccagcgacatgagcagtagggaactcaagcggcgatttgaggtcttcggcgagatcgaagaatgcgaggtactcactaggaaccggcgtggagagaaatacgggttcattacataccgatgttccgagcacgccgcactgtccctgacgaaaggtgccgctcttcgcaaacgtaatgaaccctcgttccagctttcctacggcggattgcggcatttttgctggcccaggtataccgattatgatagtaacagcgaagaagccctgccggcttcaggaaagtctaagtacgaagcgatggatttcgactcattgctgaaggaggcgcagcaatcgctgcactag

SEQ ID NO: 234471 - DNA, 3054 bp, synthetic construct
  misc_feature 1..3054: note = Description of Artificial Sequence: Synthetic coding sequence
  source 1..3054: mol_type = other DNA
atggccggtaatgactgtggggctctgctggacgaagagctttcgtctttcttcctaaattacttggcagacacgcaaggcggaggtagtggagaggagcagctatatgccgatttcccggaattagacttgagccaactggatgcaagtgatttcgacagcgccacatgtttcggggagctccaatggtgtcccgagaatagcgaaacagagcccaatcagtattctccggacgactccgaactttttcagatagattccgagaacgaggctctgctggccgaactgacaaaaaccctggacgatatcccagaggatgacgtaggcctcgcagccttccccgcactggacggtggggacgcactctcatgcacgagcgcaagtccagccccatcctcagctcctccaagtccagctcccgaaaagccaagtgcccctgcccctgaggtcgatgagctgtccctgctgcagaaattgctgctggctacttcttaccctacaagcagcagtgacacacaaaaggagggtactgcctggcggcaagcgggactgagatcaaagtcacagagaccatgcgtgaaggctgacagcacccaggacaaaaaggcgcctatgatgcagagtcagtcccgatcctgtactgaactccataagcatctgactagcgcccaatgctgtcttcaggaccggggattgcagcctccttgtctgcagagtccacggctgcccgctaaagaggataaggagccgggagaggactgcccatcaccgcagcccgctcccgcaagtccaagagattctctcgctttgggcagagccgaccccggtgcacccgtgtcacaagaggacatgcaggcaatggtgcagctcatacgctacatgcatacctactgtttaccacagaggaaattaccacctcaaactccagaacctctgcccaaggcctgttctaatccgagtcaacaggtccgctcacgaccttggagccggcatcactcaaaggcgtcctgggctgagttttcgatcctgagggaactcctggctcaggatgtcctgtgtgatgtctctaagccttatagactggctacaccggtatacgcttctttaacaccacgttcacggcctagaccccctaaggacagccaggcctctcccggacgaccatcctctgtggaggaagtgaggatcgccgcaagccctaagtcgactgggccaaggcctagcctgagacctctgcgcctcgaagtgaaacgagaggtgcgtcggccagcaagacttcagcagcaggaagaggaggacgaggaagaagaggaggaggaggaggaggaggagaaggaggaggaggaagagtggggacggaagcgtcccggaagggggctgccctggacaaaactggggagaaagctggagtcatccgtgtgtcccgttaggcggtctaggagattgaacccagagctcgggccttggctgacattcgccgacgagcctctcgtccctagcgagccccagggtgcgctgccttcactgtgtcttgcgcctaaagcgtatgacgttgagagagagttggggagccccactgatgaagacagcgggcaagatcagcagttgttgagaggccctcagattccagctcttgagagtccatgcgaatccggttgcggggacatggacgaggaccccagttgccctcagctgcctcctcgggacagccctcgctgtctcatgctggccctgtcccaaagtgaccctacttttggcaaaaagagcttcgaacagaccctgacggtcgaactgtgtggcacagccggacttacacctcccacaacaccaccctataagcctaccgaagaggatccatttaaaccagacataaagcactcccttggaaaagagattgctctgtctctgccctcccctgagggtttatcgcttaaggctacaccaggggcagctcataagctgccaaaaaagcaccccgagcggtcagaattgctaagccatcttcgtcatgcaactgcacagcctgcgtcccaggctgggcaaaaaaggcctttcagttgctcctttggagatcatgattactgtcaagtgttaagaccggagggagtcctccaaagaaaagtgcttcggtcctgggagcccagcggggtacacctcgaagactggccccagcaaggagccccatgggccgaggcacaagcacccggtagggaggaagaccgctcctgtgacgccggagcgcctcccaaggactccaccctgctccgggaccacgagattcgggcaagcctgactaaacacttcgggctattggaaactgccctagaagaggaggacctggcctcatgcaaaagtccagagtatgataccgtgttcgaggacagctcttccagtagcggagagagctcattcctccccgaggaggaagaagaggagggcgaggaagaggaagaggacgatgaggaagaggattccggggtgtctccaacttgctccgatcactgcccttaccagtctcctccgtctaaagctaaccgtcagctatgctcccggagccggtcttcgtccggcagttccccttgccactcctggtcccctgccacccggaggaactttagatgcgaatctaggggcccttgctcagacaggacaccatccattcggcacgcacggaagaggcgcgaaaaggctatcggtgaaggacgggtcgtgtatatacagaatctgtcttcagatatgagcagccgggaactgaagcgccgattcgaagtctttggcgaaattgaagaatgtgaagtcctcacccgtaaccgaagaggtgaaaaatacggatttataacatacagatgctctgagcacgccgctctgagtctgactaaaggagccgctttgcggaagaggaacgagccgagtttccaattgtcctacggaggcctaagacacttttgttggccgaggtataccgattacggtaagcctttaaaaccctctcattcactggttcggctcaaagcttgggaggcggtcccctctcttaacaagacacaaagctag

SEQ ID NO: 234472 - DNA, 471 bp, synthetic construct
  misc_feature 1..471: note = Description of Artificial Sequence: Synthetic coding sequence
  source 1..471: mol_type = other DNA
atggcggtggggaaattcctgctgggctcattgttactgctttccttgcaactaggtcaagggtggggaccggacgccaggggagtcccggtggccgacggcgaattctcctctgagcaggttgccaaagcgggaggaacgtggctgggcacgcaccgtccattggccagactcagaagggccctgagcgggccatgtcagctgtggtcactcaccctgtcagtggccgagcttggcctggggtacgcatccgaggagaaggtgatctttcgatattgtgccggatcctgccctaggggtgccagaacacaacatggccttgccctggcccgacttcagggccaggggagagcccacggcggtccctgctgtagacccactagatacaccgatgtagccttcctcgacgacagacatcgttggcagagactgccccagctgagcgccgctgcctgcggatgtggcggatag

SEQ ID NO: 234473 - DNA, 1422 bp, synthetic construct
  misc_feature 1..1422: note = Description of Artificial Sequence: Synthetic coding sequence
  source 1..1422: mol_type = other DNA
atggggcagagcggtcgctctcgacaccagaagcgcgctagagcacaagcccagctgaggaatctggaggcgtatgctgccaacccgcacagctttgtgttcacccgaggctgcactgggcgaaacatccgacagctttctctggacgtccgcagggtcatggaacccctgacagcctcccggctacaggtacggaaaaaaaattcacttaaggactgcgttgccgtcgcaggtcctctaggcgtcacacattttctaatattgagcaagacagaaaccaatgtttacttcaaactgatgaggctgcctggtgggcctactctgacatttcaggtcaagaaatactctcttgtacgtgacgtggtgagctcactgaggaggcaccgtatgcatgagcaacagtttgcccaccccccactgctggtacttaacagttttggtccccacgggatgcatgtgaagctaatggcaacaatgtttcaaaatctcttcccatctatcaacgtgcataaggttaatcttaacactatcaagaggtgccttctcattgattataatcctgatagccaagagctggactttcgtcactattctatcaaagtagtgcctgtcggcgctagtcggggtatgaagaagctgctccaggagaagtttcccaacatgagccgcctgcaggacatatcagagctgctcgccaccggtgcaggcttatcggaatctgaggctgagcccgatggtgatcataatatcaccgagcttccacaggccgtggctggcagaggcaatatgcgagcacagcaaagtgccgtgagactcaccgaaatcggcccaaggatgacattgcagctgatcaaagtacaggagggtgtgggtgagggaaaagtgatgtttcactcatttgtcagtaagactgaggaagaactgcaagctattctggaggctaaagaaaagaagctgaggctgaaggcgcaacggcaggcacaacaagcacaaaatgtacaaaggaagcaggagcagagagaggcccaccggaagaagagtctcgaaggtatgaaaaaagctcgcgtcggcggtagcgatgaggaagccagcggaatccctagccggacggcgtctctggaactcggggaagacgacgacgaacaggaggacgacgatatcgagtatttttgtcaggccgtgggtgaagctcccagcgaggacctgttccctgaagctaaacagaaacgcttggccaaaagcccgggacgaaagcggaagaggtgggagatggacagaggacggggacgcctctgcgaccagaaatttccaaaaactaaagacaaatcacagggcgctcaggcaagacggggaccgagaggcgctagtcgagatggaggtcgaggtcgaggcagaggcagacccggaaaacgcgtcgcctag

SEQ ID NO: 234474 - DNA, 1383 bp, synthetic construct
  misc_feature 1..1383: note = Description of Artificial Sequence: Synthetic coding sequence
  source 1..1383: mol_type = other DNA
atgggacagagcgggaggagccgccatcaaaagagagcccgtgctcaggcccaactacgtaacctcgaggcttacgcagctaatccacattctttcgtcttcactagaggttgcacaggtagaaatattcgccagctatccctcgacgtgaggcgcgtgatggaacccttgacagcatctcgtctgcaagtacgaaagaagaattctctcaaggactgtgtggccgtggcaggccctctcggcgtgactcacttcctgatcctgtctaagacggagaccaatgtttacttcaagctgatgcggcttcctggcggacccacactcacatttcaagtcaaaaagtattcactcgtgagagatgtggtaagctctcttaggagacacagaatgcacgagcagcagtttgcccaccccccactgctggtgttgaatagtttcggtcctcacgggatgcacgtcaagctcatggcaacgatgtttcagaacctcttccccagcatcaacgtccacaaagtgaatttgaacactatcaagaggtgtcttctcatagactataacccggattctcaggagcttgacttccgtcattattctatcaaggtcgtgcccgtgggggcatccagaggcatgaaaaaactgttgcaagaaaaattcccaaacatgtcaaggctccaggacatctccgagctgcttgctactggcgctggcctaagtgagagcgaagccgaaccagacggggaccacaatataacagaactgccccaggccgtggctggcagaggaaatatgcgggctcagcaatccgctgtaagacttacagaaatcggccctcggatgacgctgcagttgatcaaggtccaggagggtgttggagagggaaaagttatgttccattctttcgtgtccaagaccgaagaggagttgcaagccatcctggaggctaaagaaaagaaactgaggcttaaagctcagcggcaagctcaacaggctcaaaacgtccagcgcaaacaggagcagagagaggctcaccggaagaaatccctggagggcatgaagaaagcaagggtgggcggatcagacgaagaagcctctgggataccctccaggactgcctcactcgagctgggagaggacgacgacgagcaagaggacgatgatatcgaatacttttgccaggccgtgggcgaagccccttctgaggacctctttcccgaggctaagcagaagcggctagccaaatccccaggcaggaagcgaaaaagatgggaaatggatcggggaagagggcgactctgtgaccagaagttccctaaaactaaggacaagtcccaggatggaggtcgaggccgaggaagaggtcgccctggcaaacgtgtcgcctag

SEQ ID NO: 234475 - DNA, 2385 bp, synthetic construct
  misc_feature 1..2385: note = Description of Artificial Sequence: Synthetic coding sequence
  source 1..2385: mol_type = other DNA
atgggccagagcgggagaagtaggcatcagaagcgggctcgggcacaagctcaactgagaaaccttgaagcttatgcggcaaatccccactccttcgtgttcacaaggggttgcactggcagaaatattaggcaactaagcctagatgtgcggagagtcatggaacccctcactgcttcccgcctgcaagtcaggaagaagaattctttgaaggactgtgttgctgtggctggaccactcggggttacccactttctgatcctgtcaaaaactgaaactaacgtctatttcaaactcatgcgattacccggaggacctactctgactttccaagttaagaaatacagcctggtgcgagacgtcgtgtccagtctcagacgacacaggatgcacgaacagcagtttgcccacccacccctcctagttctgaactcctttggtcctcacggtatgcacgtgaaattgatggctaccatgtttcaaaatctgtttccttctatcaatgttcataaggtgaaccttaatacgatcaagaggtgccttcttattgactataatcccgattcccaagaactggattttaggcactacagcattaaagtggtcccagtgggtgcaagcagaggaatgaagaagctgctgcaggagaaattccccaatatgagccgtctccaggacattagcgagctgctcgcaaccggggcaggactctccgagtcagaggccgaaccagacggggatcacaatattacagaactcccacaggctgtggctgggagaggaaacatgcgggcacagcagagcgccgtgaggcttacagaaatagggcctcgcatgacactccagctgatcaaggtgcaggagggcgtcggagaaggaaaagtgatgttccacagctttgttagtaaaacagaggaagaattgcaggccatcctcgaggccaaggaaaagaagctccggttgaaagcccaacgccaagcacagcaggctcaaaacgtccagaggaaacaggagcagagagaagctcatcggaaaaagagcctcgagggaatgaaaaaagcaagggttgggggttccgacgaagaggcttcaggcatcccctcgcgtaccgcgtcacttgagcttggagaagatgacgacgagcaggaagatgatgacattgagtacttctgccaagccgtgggagaagcaccaagcgaagatctgtttccagaggccaagcagaagcgcctcgcaaaaagccccggtcgcaaacgtaaacgatgggaaatggaccgtggagccaaatcctgtccagccaactttctagcagccgctgacgataaactcagtgggtttcaaggggattttctgtggcctattctggtagttgaattccttgttgcggtggcgtccaatggcttggccctctacaggttctcaatccggaaacaaagaccttggcaccccgctgtcgtgttttctgtgcagctggccgtgagtgatttactgtgtgctctcacactgccgccactggccgcttacctttatccaccgaaacactggcgatatggcgaagccgcttgccgactggaaaggtttttgttcacatgcaatctgctcgggtcagtcattttcatcacttgtataagcctgaatagatacctcggaatcgtccacccattcttcgccaggtcacatttacgccctaagcatgcatgggctgtttcagcagcgggatgggtgctcgctgcgctgctcgccatgcctaccctctcgttcagccatctgaagcgcccacagcagggcgctggtaattgtagcgtagccagacccgaagcatgtattaagtgtctgggaactgctgaccacggcctggctgcctacagagcatacagcctggtgttagctggccttggctgtggactccctttgctgctcaccctggccgcttacggtgcactgggcagggccgttctacgaagcccaggtatgactgttgctgagaaactacgagtcgccgctctggtagcatccggcgtggctctgtacgcctcatcatacgtgccctatcacattatgagagtgctgaacgtagacgctcgaagacgatggtctactcgctgtccaagcttcgctgatatcgcccaggctactgccgcactcgagttgggcccttatgtcggctaccaagtgatgcgcggactgatgccgctggcgttttgcgtccaccctctgttatatatggctgcagtaccttccctgggttgctgttgtcgccattgtcccggatatagagactcttggaatccagaggatgccaagtcaactggccaggcactcccattgaatgctacggcagcacccaagccttcggagccgcagtccagagagttgtctcagtag

SEQ ID NO: 234476 - DNA, 1374 bp, synthetic construct
  misc_feature 1..1374: note = Description of Artificial Sequence: Synthetic coding sequence
  source 1..1374: mol_type = other DNA
atggctcagccacccaggctttcgagaagcggagcaagtagcctctgggacccagccagtcccgctcctaccagcggccctcgccctcggctctgggaaggccaggacgtgttggccagatggacagatggactgctttatctaggcacaattaaaaaggtggattcagccagggaagtttgtctagtgcagtttgaagacgacagtcagtttctggtgctgtggaaggacatctctcctgcagctctgccaggcgaagaacttttatgctgtgtatgccgtagtgagaccgtggtccctgggaaccggcttgtgtcatgcgagaagtgcaggcacgcataccaccaggattgccacgttcccagagcacccgctcctggcgaaggtgaggggacgagctgggtctgtagacaatgtgttttcgccattgccaccaagcgcggaggcgcactgaaaaaagggccatacgcaagagctatgctgggcatgaagctcagtctgccatacgggcttaaggggcttgattgggatgccggtcacctgtctaatcgacaacagtcttactgctactgcgggggtccgggtgaatggaacctgaagatgcttcagtgcaggagttgcctccagtggttccacgaggcatgtacccagtgcttgtccaagcctttgctgtacggggaccggttttacgaattcgaatgctgcgtctgccgaggtggacccgagaaagtccggaggttacagttgcgttgggttgatgtcgctcacttggtactgtaccacttatctgtgtgctgtaagaaaaagtattttgattttgaccgcgagatccttccttttacctcagagaattgggactcattactgttgggagaactcagcgacacgcctaaaggagagcgctcatcacggctcctgtcagctctgaactctcataaagacagatttatctccggtcgggagattaagaagcgcaagtgcctttttgggctccacgccaggatgccccctccggttgagccacccaccggagatggggctctgaccagggctggcccttggggcagggggctcacttcccccggagaggcacctgaggccggtgcgcgagctcccgaggaggaggccgagggagagtctgggggtgccggtgctacactttccagcgcacagtcagcacgggcacccggtgctgagggagcagggtcaagcgcagaaggcactgctgcagctccatcaggctgtctactgccctccactctcctgcctgccccacaaggacccttgggtacagtggacccccagacaggccacccttggaactttacactggtgtctcctcagacctcactcaaggtgcctcccactcgctag

SEQ ID NO: 234477 - DNA, 1704 bp, synthetic construct
  misc_feature 1..1704: note = Description of Artificial Sequence: Synthetic coding sequence
  source 1..1704: mol_type = other DNA
atggcgcagccaccgaggctgtccagatccggcgcaagtagtctatgggaccctgcttctccagcacctacctcaggaccaagaccaagactctgggagggccaggatgtgctcgccaggtggacggacgggttgctatatctggggaccataaagaaggttgactcggcacgggaagtgtgcttggttcaatttgaagacgattcccagttcctggtcctctggaaagacatctctcccgctgcactgccgggagaggagctgctctgctgcgtgtgccgaagtgagaccgtcgtgcccggtaaccgcttagtctcctgcgagaagtgcaggcacgcctaccaccaggactgtcacgtgcccagggcccctgcccctggcgagggagaaggcacttcgtgggtgtgtcgacaatgtgtcttcgcaatcgccactaagcgaggaggtgcactgaaaaagggaccttatgcacgcgcaatgctcggcatgaaattgagtctgccatacggcctgaagggcctggattgggacgccggtcacctaagcaatagacagcagtcctattgttactgtggcggacccggagagtggaatttaaaaatgctgcagtgtagatcctgtctgcaatggtttcacgaggcttgcacccagtgtctgagcaagccactcctgtacggcgatagattttacgaattcgaatgctgtgtgtgtagaggtggcccagagaaagttcggcgtttacaactccgatgggtcgacgtggcccatttagtactctatcacttatcggtttgttgtaagaagaagtattttgacttcgacagggagatcctgccattcacctccgagaactgggatagcctgttgctcggagagctgtccgatactccaaagggtgaaaggtcctcacgcctcctatcggcactgaactctcacaaagatcggttcatttccgggagagagatcaaaaagcgcaagtgcctgttcggccttcacgcccgtatgcctcccccagtcgaaccgccaactggcgacggggcactcacaagctttcccagcggacaagggcctggtggcggtgtttccagaccgttaggtaagaggcgacgacccgagccagagcccttacgccgtaggcaaaaaggtaaggtagaagaactgggcccaccgtcagctgtgcgcaatcaacctgagccccaagagcagcgagagcgcgctcatttacaacgggcattacaggcatcagtgagtccaccctcaccatcccccaatcagagctaccagggatcctccggttacaatttccgcccaacggacgccagatgtctgccctcaagtcctataaggatgtttgcctctttccacccaagcgcctctacggcaggcacttccggtgatagcgggcctcccgatagatcgccactagaactgcacattgggtttcctaccgacattcccaagtcagctccccactccatgaccgcgtccagcagctccgtgagctctccctctccgggactgcccaggagatccgctcccccttctcctctctgccggagcctgagtccaggaacagggggaggagtcaggggaggcgtgggctacctcagccggggagaccccgtccgcgttctggcgaggagggtcaggcccgatggcagtgtacagtatttggtagaatggggagggggagggatattttag

SEQ ID NO: 234478 - DNA, 732 bp, synthetic construct
  misc_feature 1..732: note = Description of Artificial Sequence: Synthetic coding sequence
  source 1..732: mol_type = other DNA
tagtccttgctgctgactgcaacacgtacagtgtcctttcaaggtgaaaggttgaggcggggaaatgtatgtctcgtcagcatgttaggatgcctgcccctctggagccctctgttagagatggagcattctcccggacagggaccagggggaggggtgagcagacctctggggaaaaggagacgccctgagcctgaacctttgcggcgacggcaaaaggggaaggtggaagagcttgggccaccctcagcagtgcggaatcagcccgaaccgcaggagcagagggagcgcgcacacctgcagcgggcactccaagcctcggtcagccctccttccccttcacctaaccagtcctaccagggctcgtctggatacaacttcagacccactgatgctaggtgtctgccttctcccataagaatgttcgcttccttccacccttcagccagcacggctggcacctctggcgactccggcccacccgacagaagcccgctggaactccatataggcttccctactgatatccctaagtctgctccacattccatgacagccagttcctcctctgtatccagccccagtcctggccttcctcgccgatccgccccaccatcccccctgtgcaggtccttatcacctggtacgggcggtggggtcaggggcggagtgggctacttaagccgtggggacccagtgcgcgtattggctagaagagtgcggcctgattag

SEQ ID NO: 234479 - DNA, 438 bp, synthetic construct
  misc_feature 1..438: note = Description of Artificial Sequence: Synthetic coding sequence
  source 1..438: mol_type = other DNA
atggcccaacctcctaggctcagtagatctggagctagctccctctgggatcccgcatccccggcacccacatccggccctaggccgagattgtgggagggtcaggatgtcctggcaaggtggaccgatggtctgctgtaccttggaacaattaaaaaggtggactcagcgagggaagtgtgtctggttcagttcgaggacgatagccagtttcttgtgctatggaaggacatctctccagccgctctacctggcgaagaactgctgtgctgcgtgtgccgatccgaaaccgttgtgcccggtaaccgcttagtgtcttgtgagaaatgccgccacgcataccaccaggattgccatgtgcccagggcccctgcaccaggcgagggcgaagggaccagctgggtctgtcggcagtgcgtctttgcaatcgctacctag

SEQ ID NO: 234480 - DNA, 546 bp, synthetic construct
  misc_feature 1..546: note = Description of Artificial Sequence: Synthetic coding sequence
  source 1..546: mol_type = other DNA
tgggggcacccacagcagtgcgccatttctcctagcccgcgatctagaggctcagggctcatctgccgcggacactgtagaccacagtgcctccaccatccgccagcacttacaagagttaccagggctgcggcagcgacaacttctggaccccagatgcccgcagcatgccccggtcaccctattcggatgtttgctagttttcacccctccgccagcacggccggtacatcaggagatagcgggccacctgaccgatctcccctggagctacacattggttttcccacagatattcccaagagtgctccacattcgatgacggccagctcatcatccgtgagcagcccctcaccaggattaccacgcaggtccgccccaccgagccccttgtgccgttcgctgtcgccgggtacgggcggaggtgtaagaggtggggttggctatcttagcaggggcgaccctgtgagagtcctggcacggcgagtccgtcctgatggctcagtgcagtatctcgtggagtggggcggtgggggaatattttag

SEQ ID NO: 234481 - DNA, 438 bp, synthetic construct
  misc_feature 1..438: note = Description of Artificial Sequence: Synthetic coding sequence
  source 1..438: mol_type = other DNA
atggcgcagcctccccgattgagtaggtccggcgctagttccttatgggatccggcatctccggcacctacatctgggcctcggccaaggttatgggaagggcaggatgtgctcgctcgctggacagacgggttactgtatctcgggaccataaagaaagtcgactctgctagagaggtttgcctcgtccaattcgaagacgactcccagtttttagtgctctggaaggatatctctcctgcagcactgcccggagaagaactattgtgctgcgtctgtagaagcgaaactgtggtgccgggaaatcgactcgtatcctgcgaaaaatgtaggcacgcataccatcaggattgtcacgtgccacgagcacctgccccaggcgagggggaggggacttcatgggtgtgtcggcagtgtgtgttcgccatagcgacctag

SEQ ID NO: 234482 - DNA, 1704 bp, synthetic construct
  misc_feature 1..1704: note = Description of Artificial Sequence: Synthetic coding sequence
  source 1..1704: mol_type = other DNA
atggctcaaccgccacgcctgtcacgcagcggcgcttccagcttgtgggatccggctagtccggcacctaccagtggcccacggccacgcttgtgggaagggcaggacgtgctggctagatggacagatggcctcctgtacctcgggacaatcaagaaagtcgattccgcaagagaggtgtgcctggtgcagtttgaggacgacagccagttcctggtgctgtggaaggatatttcgccagctgccctcccaggcgaagaactcttgtgctgtgtgtgccgctccgagactgtcgtgcccggaaaccgattagtgagctgcgagaaatgcaggcacgcttatcatcaggattgtcatgtcccaagggccccagctcccggtgagggggaaggtacgagttgggtatgtagacagtgcgtctttgccattgcaactaagaggggaggggctctgaagaagggaccctatgcacgcgctatgttaggcatgaagctcagcctgccatatggcctaaagggcctggactgggacgcaggccacctctctaaccgtcagcagagttactgctactgtggcggtcccggtgaatggaatctgaagatgcttcagtgcagaagttgtctccaatggttccatgaggcttgcacccagtgtctcagcaagcccctactatacggggatcggttctacgaatttgagtgctgcgtgtgccgcggtggaccagaaaaagtcagacgccttcagttgcgttgggtggatgttgctcacctggttttgtatcatctgagcgtgtgctgcaagaaaaagtacttcgattttgatcgggaaatccttccgttcacatccgagaactgggattcactgctgctcggcgagctctcggatacccccaagggtgaaagaagtagcaagttattatctgccctaaatagtcataaagatcgcttcatttctggtcgggaaataaagaagagaaagtgcttatttgggctgcacgcacggatgcctccaccagtagagcctcctacaggcgacggcgctctgactagctttccatcagggcagggtccaggaggaggcgtgtcgcggccactcgggaagcggagacgccctgagcccgagccactcaggaggagacagaagggcaaagtcgaagaactggggcctccttctgccgtccgaaaccaaccagagccacaagagcagagagagagagcacacctccagcgtgccctccaagcctccgtgtctccaccctcaccatcacctaatcaaagctatcaggggagttccggatacaatttccgcccaaccgatgctcggtgcttacctagttcgccaattagaatgtttgcatcattccatcctagtgcttctactgctggcacgtctggagatagcggtcctcctgaccggtcccctctggaactgcacatagggttccctacagacattccaaagtccgcaccacatagcatgacagcctcttcatctagcgtgtcaagtccatcacctggcctgccacggaggagcgccccaccgagcccactatgtcgatccctctcacccggaacaggaggaggcgttcggggtggggtcggttatcttagtagaggggatcccgtgagagtcctggcgagaagagtgcgccctgatgggtccgtccagtatctggttgagtggggcggagggggtattttctag

SEQ ID NO: 234483 - DNA, 684 bp, synthetic construct
  misc_feature 1..684: note = Description of Artificial Sequence: Synthetic coding sequence
  source 1..684: mol_type = other DNA
atggcacaaccacctcgcctttctagatctggagcttcttcactgtgggacccagcaagccctgccccaacatcaggtcctcgtcctcgattatgggaagggcaggatgttttggcacgctggacagacggtctgctgtatctgggtacaatcaagaaggttgatagtgcacgggaagtttgtctcgtccaattcgaggacgatagtcagtttctcgtgctttggaaagatatcagccccgctgcgctgcctggggaagaacttctgtgctgcgtttgccgctccgagactgtggtgcccggtaacaggctggtgagctgtgagaaatgccgacacgcctaccaccaagactgccacgttccacgggcaccggcaccaggagagggtgagggtacctcatgggtgtgcaggcagtgcgtgtttgctattgccactaagcgaggaggggcactgaaaaaaggcccatacgcacgcgcaatgctcggaatgaaattatcgcttccgtacggtctgaagggattagattgggacgccggacatctgtccaacagacagcagtcctattgctattgcgggggacccggtgagtggaatctgaaaatgctccaatgcagatcatgtctgcagtggttccacgaagcctgcacccagtgtctgtcaaagccattgctatatggtgactag

SEQ ID NO: 234484 - DNA, 684 bp, synthetic construct
  misc_feature 1..684: note = Description of Artificial Sequence: Synthetic coding sequence
  source 1..684: mol_type = other DNA
atggctcagcctcctcgactcagccgctctggagcatcctcgctctgggacccagcctctcccgctcctacatccgggcctcgcccacgactttgggaagggcaagacgtcttggcacgttggacagatggcctgctatacctggggactatcaagaaggtggacagtgcaagagaggtttgcctggtgcaatttgaggacgatagccagttcctcgtattgtggaaggacatttctcccgcagcactgcctggtgaggaactgctgtgctgtgtgtgtagatctgaaaccgtggtgccagggaatcggctggtcagctgcgagaaatgtcgacacgcataccatcaagattgccatgttccccgtgcgccagcccctggggagggagaggggacatcatgggtttgtcggcagtgtgttttcgccattgccactaaacggggtggagcccttaaaaaaggcccttacgcccgagccatgctggggatgaagctgagccttccatacgggttgaaaggtctggactgggacgccggacacctttctaatagacaacagagttactgttactgtggaggcccaggggaatggaacttgaagatgctacagtgcaggtcctgcctccagtggttccacgaggcctgcacccagtgcctgagtaagcctctcttatacggagattag

SEQ ID NO: 234485 - DNA, 1374 bp, synthetic construct
  misc_feature 1..1374: note = Description of Artificial Sequence: Synthetic coding sequence
  source 1..1374: mol_type = other DNA
atggcacaacctccccgactgtctaggagcggtgcctcctcactgtgggatcccgctagccctgcccctactagcggacctcggccaaggctgtgggaagggcaggatgtgctggcccgttggacagatggcctcctatacctcggcacaatcaagaaggtggacagtgctagagaggtgtgcttggtacagttcgaggacgattcccagtttctggttctctggaaggacatttcccccgctgcactccctggcgaggagctgctatgttgcgtgtgcagatcggaaacggtcgtgcccggtaaccggctagtcagttgcgagaaatgtcgccatgcataccaccaggactgccacgttcctagggcacctgcccctggtgaaggagagggcactagctgggtgtgcagacagtgtgtgttcgctatagctaccaagcgaggcggagcactcaaaaagggaccctacgctcgcgcaatgctcggcatgaagttgagtctgccctatggcttgaaaggattagattgggacgctgggcacctgagtaatcggcaacaaagctattgttattgtgggggacctggggaatggaacctgaagatgctccaatgccggagctgtttacagtggttccatgaagcatgcactcagtgtctgagtaaacctctgttgtacggagacagattttacgaattcgagtgttgcgtgtgcagaggagggccagaaaaagtcagacggcttcaactgagatgggtcgatgtggcccatctcgtgttgtaccacttgagcgtgtgttgtaaaaagaaatactttgatttcgaccgggagattctaccgttcacctcagagaattgggactccctgctcctcggggagcttagcgacaccccaaagggcgagcgttcatctaagctcctcagcgccttgaattcgcataaagataggtttatttcaggtcgagaaattaagaagcggaagtgcctgttcgggcttcacgcacggatgccgcctcctgtcgaacctcccaccggtgatggcgctttgacccgcgctgggccttgggggagggggttgacttctccgggagaggcccctgaagcaggagcccgagcacccgaggaagaagctgaaggggaatccgggggagcaggcgctaccctgtcatcggctcagtccgctcgcgctcccggagctgagggagcaggctcatcggccgaagggaccgcagctgcaccgtcgggatgtctgctgcctagcacccttctgccagcccctcagggtccgctaggtacggtggatcctcaaacagggcacccatggaactttacgctagttagcccacagacaagcttgaaagtgcctcccacacggtag

SEQ ID NO: 234486 - DNA, 1497 bp, synthetic construct
  misc_feature 1..1497: note = Description of Artificial Sequence: Synthetic coding sequence
  source 1..1497: mol_type = other DNA
atggctgccgctgccggacccggagcagcattaagccctcggccttgcgattccgatcccgcaacacccggtgcccagagcccaaaagatgacaatgaggacaactcaaacgatgggacacagccctctaaacgcaggcggatgggctccggggacagcagccggagttgcgagacctccagtcaggacttaggttttagctactacccagctgaaaatcttatcgaatataagtggcctcccgatgagacgggagaatactatatgctgcaggaacaggtgagcgaatacctgggcgtgacttccttcaagcggaagtatcccgacctcgaaaggcgggacctgtctcacaaggagaagctttaccttcgagaactgaacgttattacagagacccagtgcactcttggcctgaccgcgctgaggtctgatgaggttattgatctgatgataaaggagtatcccgctaaacatgccgagtacagcgttatcctgcaggagaaggagagacagcggattactgatcactataaagagtatagtcagatgcagcaacagaatacccagaaagtcgaggcttcaaaagtgcccgaatatattaagaaggcagcaaaaaaggccgctgaatttaactctaaccttaatcgcgagcgaatggaggaaaggcgggcatatttcgacctgcaaacccatgtgatccaagtgcctcaaggaaagtacaaggttctgcctactgagaggacaaaggtatctagttaccctgtagcgcttatccctggtcagtttcaggaatactataaacgatatagcccagacgagctgcgctacctccccttgaataccgcgctttacgagccacccctggatcctgagctgccagctctggattccgacggggatagtgacgatggtgaagacgggagaggagacgagaagcgcaagaacaagggcacatcagactcctcatctgggaacgtgtccgagggtgagagccctcctgattcccaggaggattctttccaaggcaggcagaagagcaaagacaaagccgctactccgagaaaggatggacctaagcggagcgtactgagcaagagtgtccctggttacaaacccaaagtgattcccaacgcaatttgcgggatctgcttaaaaggaaaagaaagcaacaagaaaggaaaggctgaaagtcttattcactgctcgcagtgtgaaaattccggacatccttcttgtctggacatgaccatggagttggtgagcatgattaagacctatccatggcagtgtatggagtgcaagacttgtatcatctgcggtcagccacaccacgaggaggagatgatgttctgtgatatgtgcgatcggggttatcatacgttctgcgtgggattgggagcaattccaagcggaaggtggatctgcgactgttgtcagcgggcacctcctacaccaagaaaggttgggagacgcggaaagaacagcaaggagggttag

SEQ ID NO: 234487 - DNA, 1491 bp, synthetic construct
  misc_feature 1..1491: note = Description of Artificial Sequence: Synthetic coding sequence
  source 1..1491: mol_type = other DNA
atggcagctgccgcaggtccaggagctgctttgagccccaggccttgtgactccgacccagctacccctggcgctcagagtccaaaggatgataacgaggataatagcaatgatggcacccagccatcaaagagacgacgaatgggatcaggggacagcagtcggtcttgtgagacgagctctcaagatctgggattctcttactatccagctgagaatcttattgaatacaagtggcctcctgatgaaaccggggagtattatatgctgcaggagcaggtctctgagtacctcggcgtcacttcctttaaaaggaagtacccagagcggagagacctgtcacacaaagaaaagctttatctacgcgaactgaacgtgatcacagagacccaatgtacgcttggactcaccgcactgcggtccgacgaggtgattgacctgatgattaaggaatatccggcaaaacacgcagagtatagcgtgatcctgcaggagaaagaaaggcagcggatcacggatcattataaagagtacagtcaaatgcagcagcaaaatacacaaaaagtggaggcttctaaggtccccgagtatattaagaaggcggctaagaaggcggctgaattcaattccaacctgaaccgagagcgcatggaggaacgcagggcctatttcgatttgcagactcatgttattcaggtgcctcagggtaagtataaggtgcttccgaccgagcgcaccaaggtgtccagctatccagtggctctaattcccggacagtttcaagaatactataagcggtattcgccagacgaactgcgatatctccctttgaacactgccctctacgagcccccattggatcctgagctgcctgccctggatagcgacggtgatagcgacgatggtgaggatggacgaggcgacgaaaaaagaaaaaataaaggtactagcgactcatccagtggaaacgtgtcagaaggggaaagtcctccagattcacaggaagactccttccagggtcgacaaaaatcaaaggataaagcagctactcctagaaaggatggccctaaaagatcggtgctgtcaaaatcagttcccggttacaaacctaaagttatccctaacgctatctgcggaatttgcctcaaaggtaaggaatcaaataaaaagggaaaggctgaatctctgatccactgttctcaatgtgagaactccggtcatccctcctgcctggacatgacaatggaactggtctctatgatcaaaacatatccctggcagtgtatggaatgcaagacgtgcatcatctgcggccaacctcaccatgaagaggaaatgatgttctgtgacatgtgtgaccggggttaccatacattctgtgtagggttgggggctattccgagtggtcgctggatctgtgactgctgtcagagagcgcctcccacgcccaggaaagtgggtcggagggggaagaacagtaaggaaggatag

SEQ ID NO: 234488 - DNA, 879 bp, synthetic construct
  misc_feature 1..879: note = Description of Artificial Sequence: Synthetic coding sequence
  source 1..879: mol_type = other DNA
atggagaagaggacctgtgcgctgtgcccaaaagatgttgagtacaatgtcctctattttgctcagtccgagaatattgctgcacacgagaattgtctgctgtattcatccggattagtggagtgcgaggaccaagatcctctgaatcctgacagaagttttgatgttgagtccgtcaagaaggaaattcagcgcggaagaaagctgaaatgtaaattctgtcacaagaggggggcaacggtgggatgtgacctgaaaaattgtaataaaaactaccacttcttctgcgctaagaaagacgatgcagtgccacagtctgatggcgtgaggggcatctataaactcctgtgccagcagcacgcccagttcccaatcattgcacagtccgcaaaatttagtggggtaaaacggaagagaggcagaaagaaaccactatcaggcaatcacgtgcagccacctgagaccatgaaatgcaatacatttattcgccaagttaaggaggagcatggtaggcatacagatgccacagtcaaagtaccattccttaagaagtgtaaagaagctggcctgcttaactatttgcttgaagaaatcctagacaaagttcatagtatcccagagaagctcatggatgaaacaacttcagagtctgattacgaggaaattggcagcgctctttttgattgccgccttttcgaggacactttcgtaaattttcaagcggcaatcgagaagaagatccacgccagccaacaacgctggcagcagctgaaagaggagatcgaactgctgcaagatttaaaacaaacactatgctcattccaggaaaaccgtgatttgatgtcttcgtccacaagtatcagctctctgtcctactag

SEQ ID NO: 234489 - DNA, 996 bp, synthetic construct
  misc_feature 1..996: note = Description of Artificial Sequence: Synthetic coding sequence
  source 1..996: mol_type = other DNA
atggcccaggctagtcccccaaggcccgagcgggtcctgggcgcaagcagtccagaggcacggccagctcaggaggcactgctcctgcccaccggcgtcttccaagttgccgagaagatggagaagcgtacatgcgccctctgtccaaaagatgtcgaatacaatgtcctgtactttgcgcagtcagagaatatcgctgcacacgaaaattgtctgctgtacagcagtggcctggttgagtgcgaggatcaggaccccctcaacccagacaggtcatttgacgtcgagtctgtgaagaaagagatacagagaggaaggaaactaaagtgtaagttttgtcacaagagaggcgctaccgtgggatgcgatctcaagaactgcaacaaaaattatcatttcttttgtgctaagaaagacgatgctgtcccacagtctgacggcgttcgcggaatctacaagctactttgtcagcagcacgcgcagttccctataatcgcccagagtgctaagtttagtggagtgaaacggaagcgaggacgcaagaaaccgctgtccggtaaccatgtacagccccctgagactatgaaatgcaataccttcataaggcaggtaaaggaagaacatggccgtcacaccgacgccactgtcaaagtgccctttctgaaaaaatgtaaggaggcagggttattgaactatttgctggaggagatcctcgacaaggtgcattctatccccgagaagctgatggatgagacaacttcagagagtgactacgaagaaatcgggtccgccttgtttgactgccgcctcttcgaagatacctttgtgaacttccaagccgctatcgaaaagaaaatccatgcttcccagcagcgatggcagcagctaaaagaagaaattgagctactgcaggacttaaaacagacactttgttcattccaggagaatcgtgacctgatgtcatcctctacctccatttcttctttatcttattag

SEQ ID NO: 234490 - DNA, 861 bp, synthetic construct
  misc_feature 1..861: note = Description of Artificial Sequence: Synthetic coding sequence
  source 1..861: mol_type = other DNA
taacgcccaggaccacggggatgcagcgcacctgcagctcgcaggcctggacctagacgaagaaggagttccttcccgccattgtattcgtctggactcgtggaatgtgaagaccaagatccattgaaccctgatcgctcatttgatgtcgaaagcgtgaagaaggagatccagagaggaaggaagttgaaatgcaaattttgtcataaacgcggtgctactgttggctgcgacttaaagaattgcaataagaattatcacttcttctgcgcaaagaaagacgacgccgttccccaatctgacggcgtgaggggcatatataaattactatgccagcagcacgctcagttcccgataatcgcccagagtgcgaaatttagtggcgtgaaaagaaagcgcggacgaaagaagcccttgtctggcaatcatgtccagccacccgaaactatgaaatgcaacaccttcattaggcaggtgaaggaggaacacggacgccatactgatgctacagtaaaagttccctttctgaaaaaatgcaaggaggctggactgctgaattacctgcttgaagagatcctcgacaaagtccattccatccctgaaaagttgatggacgagacaacctcagagtccgactacgaagaaatcggaagtgcactctttgactgccggttgtttgaggacacgttcgtgaattttcaggcggcaatcgaaaaaaagatacacgcttctcagcagagatggcaacagctgaaggaggaaatcgagcttctccaggatctcaaacagacactgtgttcctttcaggagaatagggatctgatgagtagctcaacttccatctccagcctttcatactag

SEQ ID NO: 234491 - DNA, 507 bp, synthetic construct
  misc_feature 1..507: note = Description of Artificial Sequence: Synthetic coding sequence
  source 1..507: mol_type = other DNA
atggaaaagcgcacctgcgcactgtgtcctaaagatgtcgaatataacgtcctgtattttgcacagagcgagaacattgccgctcacgagaattgtctgctatacagcagcgggctggtcgagtgcgaagatcaggacccattgaaccccgacaggtcctttgacgtagaatcagtgaagaaagagattcagcgcggtagaaagcttaagtgcaaattctgtcacaaaagaggcgctaccgtgggttgcgacctcaagaactgtaacaagaactatcattttttctgtgcgaagaaggatgacgcagtgccccaatcagacggcgtgcgcggtatttacaaactcctgtgccagcaacatgcccaattccctataatcgcccaatccgcaaagttcagcggcgtcaaacgaaaaagaggacggaagaagcccctatctggaaaccacgttcagccccctgagaccatgaagtgcaacacgttcatcaggcaggtcaaagaggagtag

SEQ ID NO: 234492 - DNA, 297 bp, synthetic construct
  misc_feature 1..297: note = Description of Artificial Sequence: Synthetic coding sequence
  source 1..297: mol_type = other DNA
atggagaagcgaacttgtgcattgtgtcctaaagacgttgagtataacgtgctttattttgcacagagcgagaatatagccgctcatgagaactgcttattgtatagcagcggattggtggagtgtgaagatcaggacccattgaaccccgacaggtccttcgatgtcgaaagcgtgaagaaggaaatccaacgcggacgcaagctcaaatgcaaattttgccacaaaagaggggctacggtaggttgcgatctgaagaactgcaacaagaactatcatttcttctgcgccaaatag

SEQ ID NO: 234493 - DNA, 879 bp, synthetic construct
  misc_feature 1..879: note = Description of Artificial Sequence: Synthetic coding sequence
  source 1..879: mol_type = other DNA
atggagaaacggacctgtgccctttgtcctaaggatgtggagtacaatgtactgtactttgcccagtcggagaatattgccgcacacgagaactgcctgctttatagctccgggcttgtcgagtgtgaggaccaagatcctctgaaccctgacaggtcgttcgatgtggagagcgtgaaaaaggagatccagcgcggacgcaagcttaaatgcaaattttgccataaaagaggggctaccgtgggctgcgacctgaagaattgtaataagaactaccatttcttttgtgcaaaaaaggacgatgccgtcccccaatctgacggagttcgtggaatctacaagctgttatgccagcaacatgcccaatttccaatcatcgcgcagtccgccaagttctccggggtgaagaggaaacgaggcagaaaaaaacctctgtccggcaatcacgtccagcctccggagaccatgaaatgtaacacctttatccgccaggtgaaagaggaacatggtcggcacaccgacgccactgtcaaggtcccttttttgaagaaatgtaaggaggcaggactcttgaactatcttctggaggagatccttgacaaagtccactccatcccagaaaagttgatggacgagaccacttccgagagcgattacgaagagatagggagtgctctgttcgactgccgtctttttgaggatacctttgtgaactttcaggctgccatcgagaagaagatccacgcttcacaacagaggtggcaacaactcaaggaggaaattgaactgcttcaggatctgaagcaaactctgtgctccttccaagagaaccgcgacctcatgtcatcctcaactagcatttcctctctctcatactag

SEQ ID NO: 234494 - DNA, 624 bp, synthetic construct
  misc_feature 1..624: note = Description of Artificial Sequence: Synthetic coding sequence
  source 1..624: mol_type = other DNA
atggagaatcgagccctggatccgggtactcgcgacagctacggggctacctcccacttaccaaataagggagccctcgcaaaagtgaagaacaatttcaaagatcttatgagcaagttgaccgaaggacagtatgtcttgtgtcgctggaccgatgggctctactatttagggaagatcaagcgggttagctctagtaagcagtcctgcttggttacctttgaggacaactctaagtactgggtactttggaaggatatccaacatgccggagtgcctggggaggaacccaaatgtaacatctgcctagggaagacctctggacccctcaacgaaatcctaatatgcgggaagtgtgggctggggtatcaccaacagtgtcatattccgatcgctggctctgcggaccagcctctactgacgccttggttctgcaggcgatgtatctttgccctcgctgttcgcgtgagcttaccgagcagccccgtccctgcttctcctgcttcatcttctggtgccgaccagagacttccttcccaatccctgagctctaaacagaaggggcatacctgggccctcgagaccgacagcgctagcgctacagtcctagggcaagatctctag

SEQ ID NO: 234495 - DNA, 1743 bp, synthetic construct
  misc_feature 1..1743: note = Description of Artificial Sequence: Synthetic coding sequence
  source 1..1743: mol_type = other DNA
atggagaatagagcactcgatcccggaacccgcgactcctacggggcaacaagccatcttcccaataaaggcgctctggctaaggtcaaaaataatttcaaggatctgatgagcaagctcaccgaaggccagtacgtgctgtgccggtggacggacggcctgtattatctgggcaagatcaagcgcgtgtcaagtagcaagcagagctgcttagtaacattcgaggataactccaagtactgggtcttgtggaaggatatccagcatgccggtgtcccaggcgaggagccaaaatgcaacatttgcctcgggaaaacttccgggccactgaatgagatcttgatctgtgggaagtgcggtttgggatatcaccagcaatgtcacatccctattgctgggagcgctgaccagcccctcctgaccccctggttttgccggaggtgcatctttgcacttgccgtgagaaagggcggagctctaaagaagggagctatagcccgtaccctgcaggccgttaaaatggttctatcataccaacctgaagagctggagtgggactcaccgcacagaacaaaccagcagcagtgttattgttattgcgggggtccaggtgaatggtatttgcggatgcttcaatgttatcgatgtagacaatggttccacgaggcgtgcactcaatgtctcaatgagccaatgatgtttggtgaccgcttttacttgttcttttgttctgtgtgtaatcagggacccgaatacatcgagaggctgccactgcgctgggtggacgttgtgcatctcgctctttacaacctgggcgtacagagcaaaaaaaaatatttcgattttgaagagatattggcatttgtcaaccatcactgggagctgctccaactgggcaaattaacttccacgccagtcactgaccggggaccccacttgctgaatgccttgaactcctacaaatcacggttcctgtgtggcaaagagataaagaaaaaaaaatgcattttccgtcttcggataagggtcccccctaatcctcccggtaagctactgcctgacaaaggcttacttccgaatgagaacagtgcatccagcgaattgagaaaacgaggcaaatcgaagccgggtctgctgcctcacgagttccagcaacagaagcgccgtgtttatcggaggaaacgtagtaagttcctcctggaggatgcaattccatcatccgatttcacatcggcgtggagtaccaaccatcatctcgcaagtatatttgatttcactctcgatgagatacagtccctcaagtccgcctcatccggccagacttttttctcggatgtagatagcactgatgccgcttccacatcggggtcagcctcaacatctctttcctatgatagccgttggaccgttggatcgcggaaacgcaagctggccgctaaagcttacatgccactgagagctaagcggtgggccgcagagctggacggcaggtgcccctctgattccagtgctgaaggcgcaagcgtgcccgaaaggccagacgagggaattgacagccacacattcgagtctatatcagaagatgatagctccttatcccaccttaagtcatctatcaccaactacttcggagctgctggaagactggcctgcggcgaaaagtaccaagtgctcgccagacgcgtgactccggaggggaaggttcagtatctcgtggagtgggagggcacaacaccctattag

SEQ ID NO: 234496 - DNA, 1116 bp, synthetic construct
  misc_feature 1..1116: note = Description of Artificial Sequence: Synthetic coding sequence
  source 1..1116: mol_type = other DNA
atgctacagtgttaccggtgccgtcagtggttccacgaggcttgcactcagtgcctgaatgaacccatgatgttcggggaccgcttttaccttttcttctgcagtgtctgtaatcaggggcctgaatatattgagaggctgccacttcggtgggtggatgtggtccacttggccttgtacaacctcggcgtccagtctaagaagaaatatttcgattttgaagagatcctcgcgttcgtcaaccatcattgggaattgcttcaactcggcaagctaacctctacgccggtcaccgatagagggcctcaccttctgaatgcgctgaattcctataaaagccgcttcctttgtggaaaagaaatcaagaagaaaaagtgcatcttccgtctgagaatccgcgtcccccctaacccgccaggcaagctgttgcccgataagggcttgctgccaaatgagaactctgccagtagcgaactcaggaaaagagggaaaagcaaacccggactgctgccacatgagtttcagcagcaaaagcgcagagtctacaggcgcaaacggtccaagttcttactggaggatgccatccctagctcagacttcaccagcgcctggagcactaaccaccacctggctagcatctttgacttcacactggatgaaatccagtcacttaagagtgcctccagtggacagactttcttctcagatgtggacagcaccgacgctgctagcaccagtggctccgccagcacctccttatcatacgatagtaggtggaccgtgggcagtaggaagaggaagttagcggctaaagcctacatgcccctgcgtgctaagagatgggccgcagaactggatgggaggtgcccttcagacagttccgcggagggcgcatctgtccccgaacgaccagatgaaggtattgattcccacacattcgagagtatctccgaagatgacagcagtctgagccatctgaagtcctcaattacgaactattttggagcggcagggaggctggcctgcggtgagaagtatcaggtgttagcgagaagagtaaccccggagggcaaggtgcaatacttggtcgagtgggaaggcacgaccccttactag

SEQ ID NO: 234497 - DNA, 501 bp, synthetic construct
  misc_feature 1..501: note = Description of Artificial Sequence: Synthetic coding sequence
  source 1..501: mol_type = other DNA
atggagaacagggccctggatcccggaactagggactcttatggcgctaccagtcatctgccaaataaaggagcactcgccaaagtgaaaaacaattttaaggacctcatgagtaaattgacagaagggcaatacgttctgtgtcgctggacagacggtctttactacctgggtaagattaaacgcgtgagcagtagtaagcagtcctgcctggtcacgtttgaggataactctaagtactgggtcctatggaaagacatccagcacgcaggtgtgcctggcgaggagcctaagtgcaacatctgcctggggaagacttcaggccctctcaacgagatcctcatttgtggcaaatgcggactggggtaccaccagcagtgtcacattcctatagcagggtccgccgatcagcccctcctaaccccctggttttgccggcgatgcatctttgcccttgctgtacgtaagggcggtgccctaaagaaaggggcaatcgcttag

SEQ ID NO: 234498 - DNA, 324 bp, synthetic construct
  misc_feature 1..324: note = Description of Artificial Sequence: Synthetic coding sequence
  source 1..324: mol_type = other DNA
atggaaaatagagctttagatcccggaaccagagacagctacggcgctacatcacatctgcccaataaaggcgctctagcgaaagtgaaaaacaatttcaaagacctgatgtccaagctcaccgaggggcagtacgtcctgtgtaggtggacggacggcttgtactatcttggaaaaattaaacgagtgtcgagtagcaaacaaagttgtctggtaaccttcgaagacaattctaagtattgggtcctgtggaaggatatccagcacgcaggcgtccccggtgaggagcccaagtgtaacatttgtctcggcaaaactagttag

SEQ ID NO: 234499 - DNA, 1692 bp, synthetic construct
  misc_feature 1..1692: note = Description of Artificial Sequence: Synthetic coding sequence
  source 1..1692: mol_type = other DNA
atggaaaacagggcgctggatcccggaacacgcgacagctatggcgctacatcccatctgcctaacaaaggggctctggccaaggtaaagaacaacttcaaagaccttatgagtaagttaactgagggacagtacgtgttgtgcaggtggacagatgggctctattacctgggaaaaattaaacgggtgagttcgagcaaacagagctgtctggttacatttgaggataatagtaaatattgggtgctttggaaggatattcaacatgcgggtgtaccaggagaggaaccaaagtgcaacatttgtttgggtaagacctccggcccacttaacgaaatcctgatctgcggcaaatgcggactgggttatcaccaacagtgccatatacctatcgccggttctgcagatcagccactgttgacaccttggttttgccgcaggtgtatttttgccctagctgtacgtaagggcggagcattgaagaagggagccatcgcaagaactctccaggcagtaaagatggtcctgtcttatcaaccagaagagctggagtgggatagtccacacaggactaaccaacagcagtgttattgctactgcggcggacctggggagtggtatttgagaatgctgcagtgttaccggtgcagacagtggttccacgaggcttgcacacagtgcttgaacgaacctatgatgttcggggacaggttttatctttttttctgcagcgtttgtaatcaggggccagagtatatcgaacggctgcccttgcggtgggtggacgtagtacacctagctctctataacctcggagtccagagtaaaaagaagtactttgattttgaagaaatcttggcctttgtgaatcatcactgggaactgctccagctggggaagctgacttccacaccagtcaccgacaggggaccacacctgttaaacgcactgaattcttacaaaagccggttcttgtgtggaaaagagatcaagaagaagaagtgtatcttcaggctacggatccgggtgccgccaaatccccctgggaaactgctcccggacaagggactcctgccaaacgagaatagcgcctcctccgagttgaggaaaaggggaaaatctaaacccggactcttgcctcacgaattccaacagcaaaaacggagagtatatcgccgtaagcgctccaagtttctgttagaagatgcaatacctagcagtgacttcacttctgcgtggagcactaatcatcatctggcttcaatcttcgacttcacactggatgagattcaatcgttgaagtccgcttctagcggacagacatttttctcagacgttgactcgaccgatgccgcatctactagcggcagcgctagcacatcccttagttatgacagccgctggacagtcggctccaggaaaaggaagctcgcagccaaagcctatatgccacttcgggctaaacgctgggccgctgaactcgatggaaggtgcccttctgatagttcggccgagggcgcatcggtgccagaacgacccgacgaggggatcgactctcacaccttcgagagcataagcgaggatgacagcagcctaagccatctcaaaagcagtatcacaaactatttcggggctgcgggacggttagcctggggtgaggtgccaggagttggtagtgaggggcacacctag

SEQ ID NO: 234500 - DNA, 3291 bp, synthetic construct
  misc_feature 1..3291: note = Description of Artificial Sequence: Synthetic coding sequence
  source 1..3291: mol_type = other DNA
atggctaccgttccagtctattgcgtgtgccgccttccttatgacgtgacccgttttatgattgagtgcgatgcttgtaaggattggttccatgggagttgcgtgggcgttgaagaggaggaggctccggacattgacatttaccattgccccaactgcgaaaagacccatggaaagtctaccctgaaaaaaaagaggacatggcataaacacggtcccggtcaggcaccagacgtgaagccagtgcagaatggctcccagcttttcattaaggagttgaggtcccgaacattcccctcagcagaagatgtcgtggcgcgagtgccagggagccaattgactcttggatacatggaagaacacgggttcacagagcctatcctagtaccgaagaaggatggtctggggcttgcagtgcccgcaccgacgttttatgtgagcgacgtcgagaactacgtcggtcccgaacgctccgtagacgtcacagacgtaactaagcagaaggactgtaaaatgaagcttaaagagttcgtcgactattactattccaccaacaggaaacgcgtgttgaacgtgacaaacctcgagttctccgatacaagaatgtcctcttttgttgaaccaccagatattgtgaaaaaactgtcctgggtcgagaattactggccagacgacgctttgctggccaaacctaaagtgacaaagtactgcctgatttgtgtgaaggactcctataccgacttccatattgacagcgggggagcttcagcctggtatcacgtgctgaagggcgagaagactttttatctgatccgccctgcgagcgcaaacatcagtctgtacgaaaggtggcgatctgcatcgaaccacagcgaaatgttcttcgccgaccaggtggataaatgttataagtgcatcgtcaaacaagggcagaccctgtttataccctccgggtggatctatgccacacttactcctgttgattgtttagcatttgctggacattttttacacagtctgagtgtggagatgcagatgagagcatacgaggtggagcgccgtttaaagcttggctcattgacacagtttcccaatttcgaaacagcctgttggtacatgggaaaacacctcctggaagcattcaaggggtcacacaagtctggcaagcaacttccaccacatcttgtgcaaggcgcaaagatcctgaatggagctttccggtcgtggacaaaaaagcaggccttggcagaacacgaggacgaactaccggaacattttaagcccagtcagctcattaaagatctggcgaaagaaattcggttgagtgagaatgcatctaaggcggtccgcccagaggtcaatacggtagcttcctcagatgaagtctgcgatggcgatagagaaaaggaagaaccacccagccctattgaagctacacctcctcaatccctgctcgagaaggtgagtaagaagaagacgccgaaaaccgtgaagatgccaaaaccatcaaaaattcctaagccacccaagcccccaaagcctccaagacctcccaagactcttaaactcaaggatggcggtaagaagaaaggaaagaagagccgcgagagcgcttcacccacaattcccaacttagatctgctcgaggctcacaccaaggaagccctcacaaagatggaacccccaaagaaaggaaaggcaacaaaaagcgtactgtcggtaccaaataaggacgtagtccatatgcagaatgatgttgaacggctcgaaatccgcgagcagacgaaaagcaaaagtgaagccaagtggaagtacaagaattcaaagccagattcccttttaaaaatggaggaggagcaaaaactcgaaaagtcaccattagccggaaacaaggataacaaattttccttttcatttagcaacaagaagcttttggggagcaaggccctgcggcctcctacatcaccgggagtctttggcgcattacagaactttaaagaagacaaaccaaagccggtgcgggatgaatatgaatatgtctctgacgacggagagctgaagatcgatgaatttcccattcggagaaaaaaaaacgctccgaagagagacctgagcttcttgcttgataagaaggctgtgcttccaacgccggtgaccaagcccaagctggactctgcggcatacaaaagtgacgacagctcggacgagggctcactccacatcgatactgacacaaaacctgggaggaatgctcgagtgaagaaggagtccggctcctccgctgccggtattctagatctactccaggcaagtgaagaggtcggagcccttgagtacaacccctctagccagcctccggcttcccccagcacccaggaggccatccaggggatgctgtctatggccaacctgcaggcttcagactcttgtttgcagactacctggggcgcaggacaggcaaaaggcagcagcctggccgctcacggggcacggaagaatggcggagggtccggaaaaagcgcaggaaagagactcctcaagcgcgctgccaagaattcagtggacctggacgactacgaagaagaacaggatcatctcgatgcctgttttaaggattcagattacgtgtacccttcactcgaaagcgatgaagacaaccctattttcaagagtcggtctaagaaaaggaaagggtctgatgatgccccttacagtccgaccgctagggtgggtccctccgtgcctaggcaggataggcccgtgcgtgagggcacccgagtcgcctctatcgagactggcctcgccgctgctgctgccaaactgagccaacaagaggagcagaaaagcaagaaaaaaaaatctgcaaagaggaagctgactcccaacacaacatcaccttccacttcgacgtcaattagcgccggaactacatccacgtccaccactccggcatccactacaccggcaagcacaacccctgcttcaacctccaccgctagtagtcaggctagtcaggaggggtccagccctgagccacctccagagtctcacagttcgagcctggccgatcacgagtatacagccgctggaacgttcactggagcgcaagccggtagaacatcacagcctatggctccaggagtttttctgacacagcgtcgcccaagtgcttcctcgcctaacaacaacactgccgctaaaggcaagaggactaaaaagggtatggctactgcaaaacagagactaggaaagattctgaagatccacagaaacgggaagctgcttctctag

SEQ ID NO: 234501 - DNA, 984 bp, synthetic construct
  misc_feature 1..984: note = Description of Artificial Sequence: Synthetic coding sequence
  source 1..984: mol_type = other DNA
atggccactgttcccgtctattgcgtgtgccggctcccgtatgatgtgacaagatttatgattgaatgcgatgcttgcaaggattggtttcatggctcctgtgtgggagtggaggaggaggaagcgcctgatatagatatctatcactgtccaaattgcgaaaaaacacatggcaaaagtacgctcaaaaagaagaggacctggcacaagcatggccctggacaggctccagatgtgaaaccaaagaatagcgtggatctggacgattacgaagaggagcaggaccacttagacgcttgctttaaagactctgactatgtctacccttctcttgaatcagatgaagacaatccgatctttaagtcccggtccaagaagaggaagggaagcgacgatgcaccctatagtccaacagctagagtagggccaagcgtcccaaggcaggatcgccctgtgcgagagggaacacgcgtcgcctccattgaaaccggactggcggctgcggctgcgaaactctcccagcaagaagagcagaaatcaaaaaaaaagaagagcgcaaagcgcaaattaacaccgaacactacatccccatctacgtcgactagcatcagtgcagggacaacaagcacctccacaactcccgcttcaaccacccccgcatcaacaacaccagctagcacgtccaccgcatctagccaagcatcccaagaaggaagcagccctgaacctccccctgagagccattcatcatcattggccgatcatgagtacacagccgcagggacatttaccggggctcaggcaggcaggacctcccaaccgatggctccaggcgtgttcctaactcaaaggagacccagtgctagttctccaaacaataatacggctgcaaaaggtaaaagaactaaaaagggcatggctactgccaaacagcgtcttggcaagatcctcaagatccaccggaatggaaagttactgctctag

SEQ ID NO: 234502 - DNA, 2046 bp, synthetic construct
  misc_feature 1..2046: note = Description of Artificial Sequence: Synthetic coding sequence
  source 1..2046: mol_type = other DNA
atggagctccagaccctgcaagaggctctcaaggtagaaatccaagtccaccagaagctcgtggcacaaatgaagcaagacccccagaatgcagacctgaaaaagcagctgcacgaactgcaggccaaaattactgcgctgtcggagaagcaaaagagggttgttgagcagctgcgcaagaatttgatcgtgaagcaggagcagcctgacaagttccagatccagcctctgccacaatctgaaaacaaactgcagacggcgcagcagcagcccctgcaacagctgcagcagcagcagcaataccaccatcatcacgcccagcagagtgctgcagcttcccctaacctcacagcttctcaaaagacggttaccactgctagcatgatcactaccaaaactctgccgttggtattgaaagctgccactgcgacaatgccggctagcgtagttggccagaggcccacaattgccatggtgacagccatcaactcacagaaagccgtgctgtcaactgacgtgcagaacactcccgtcaacttgcaaacatccagtaaggtgaccgggcctggcgctgaggcagtccaaatcgtggccaagaacaccgtgacactgcaggtgcaagcaacacctccacagcccatcaaagtgcctcagtttattccgcctccgagactcactccgagacctaattttctgccccaggtgaggcccaaacctgtggcacagaataatatccccattgcacccgcaccacctcctatgctagccgctccccagttgatacaaaggcctgttatgcttaccaagtttactcccaccacgttgcctacaagccagaacagcattcatcccgtgcgggtggtgaatggccagaccgcaactatcgccaagacattccccatggcacaattaacctccatcgttattgccacgccaggaactcgacttgccggaccacaaaccgtacagttgagcaagccctccctcgaaaagcaaaccgtgaagagtcatacagagaccgatgaaaagcagactgagagccgaactattactccccctgctgcgccaaagcctaagagggaggagaatcctcaaaaattggcttttatggtctctctcgggctggtcacccacgaccaccttgaggagatccagtccaagcgccaggagcggaagcggaggacaaccgcgaatccagtgtattccggagcggtctttgaacccgaacgaaagaagtctgcggtcacctatctcaactccacaatgcaccctggcacaaggaagcggggacgaccacccaaatacaatgcggtgctgggctttggagcgctgaccccaacatcaccacagagcagtcaccctgacagtcccgagaatgaaaagacggagaccacctttaccttccctgctcctgtgcagcccgtcagccttccttctcccacgagtaccgacggcgatatccatgaagatttctgttcggtgtgcaggaagagtggccaactgctgatgtgtgatacgtgctctagggtgtaccacctggactgtttagacccccctctgaaaactattcccaagggcatgtggatatgcccgaggtgccaagaccagatgctcaagaaggaggaggctattccatggccaggaactctggccatcgttcactcatatatcgcttacaaggcagccaaagaagaggagaaacaaaagctgctcaagtggtcatctgatcttaaacaggagcgcgaacaactggagcagaaggtgaaacagctgtctaacagcatctctaagtgcatggagatgaaaaataccattctggcgaggcagaaagaaatgcattctagcctggagaaggtcaagcagctgattcgcctcatccacgggattgatctctcgaagccagtggactccgaggctacagtgggggctattagcaacggacctgactgtactccccctgctaacgcagcaacatccacaccggctccttcaccaagttcccagtcatgcacagcgaattgtaatcaaggcgaggaaacaaagtag

SEQ ID NO: 234503 - DNA, 1905 bp, synthetic construct
  misc_feature 1..1905: note = Description of Artificial Sequence: Synthetic coding sequence
  source 1..1905: mol_type = other DNA
atggaactgcagactctacaggaagccttgaaggttgagatacaggtccaccagaagcttgtggcccagatgaaacaggaccctcagaatgctgatcttaagaagcagttacatgaacttcaggcgaagattaccgctctgtcggaaaagcagaagagggtggttgagcagctcaggaagaacctcattgtcaagcaggagcagcctgataagtttcagatacagccattgcctcagagtgagaataaactacagactgcacagcaacagcctctgcagcaactgcagcaacagcagcagtaccaccatcaccatgctcagcagtcagccgcagcctcccctaatctgacagcttcccagaaaacagtcacaaccgcgtctatgatcacaactaagaccttgccactggtgctaaaggccgctaccgccaccatgcccgcatctgtcgtaggtcaaaggcccacaatcgcgatggtaaccgcaataaatagccaaaaagcggttttgagtacagatgtacagaatacccccgtcaatctgcagaccagtagtaaagtaaccgggccaggtgcagaagccgtgcagatcgtggccaaaaacaccgtgaccttgcaagtgcaagccactccacctcaacccatcaaggtcccccagttcatccctccccctcgcctgacaccaagaccgaatttccttccacaggtgcggccaaaacccgtagcccagaacaacattccaatagcccctgccccacctccaatgctggccgcacctcaactgatccagcgcccagtcatgctgactaaatttacaccaacgactttgcccacgtcccaaaactccattcatcccgtccgtgttgtgaacgggcaaacagctactattgcaaaaacattccctatggcacagctcacctccatcgtgatcgcaactcctggtacccggcttgcagggccacaaaccgttcagctatcaaagccttctctcgaaaagcaaaccgtgaaatcacatactgagaccgacgagaagcagacagagtcccggaccatcacacctcccgcagcccctaaaccgaagagagaagagaacccgcaaaagctggcctttatggtgtcactggggctggtgactcatgaccacctggaggagatccagtccaagcggcaggagagaaaacggaggaccacagcgaatcccgtatacagcggggctgttttcgaaccagagagaaaaaagtccgcagtcacgtatctgaattccacaatgcaccccggtactcgaaagagagcaaatgaagaacactggccaaaaggggatatccacgaggatttttgcagcgtgtgcaggaagtcaggccagcttcttatgtgtgatacttgcagcagagtttatcaccttgattgcctcgatcctccccttaaaacaatccctaagggaatgtggatatgccccaggtgccaggaccagatgctgaaaaaggaggaggccattccctggcctgggaccctggcaatcgtgcatagttatatcgcctataaggcagctaaggaagaagaaaaacaaaagttgctgaaatggagtagtgacctgaagcaggagcgcgagcaacttgaacagaaagtgaaacagctctctaactccatctccaaatgtatggaaatgaaaaataccatactggctcggcagaaagagatgcacagcagcctagaaaaagtaaaacagcttataagacttattcatggcatagacctgtccaaacctgtggatagcgaagcaaccgttggggctatttccaacggtcccgactgtactcctcccgcaaatgctgctacatccaccccagcaccgagtcctagctcgcagagctgcaccgctaactgtaaccagggcgaggagacgaagtag

SEQ ID NO: 234504 - DNA, 2043 bp, synthetic construct
  misc_feature 1..2043: note = Description of Artificial Sequence: Synthetic coding sequence
  source 1..2043: mol_type = other DNA
atggagctgcagacgctccaggaagcgctgaaggtggagatacaagtgcaccagaagttggttgcccagatgaagcaagatccgcagaatgccgacctgaagaagcagttgcatgagctgcaggccaaaatcactgcactatcggagaaacagaagcgggtcgtggagcaactacgtaagaacctcattgtaaagcaggaacagcccgataaattccagatccagccattgccccagtccgagaataaactgcagaccgcgcagcagcagccattacagcagctgcagcagcagcagcagtatcaccaccaccatgcccagcagtccgcagccgcttctccgaaccttacagccagtcagaagacagtcacaacagcatcgatgattaccactaaaaccttgcctctggtgttgaaagccgctacagccaccatgccggctagcgtagtcgggcagcgacctacaattgccatggtcactgccattaacagtcaaaaggctgtcctcagcactgacgtgcagaatacccctgtcaacttgcagaccagttcaaaagtgacaggcccaggggctgaagccgtgcagatcgtcgccaagaacactgtcaccctagtgcaggccacgccgccacagcccattaaggtaccacagttcatcccccctccgcgtcttacacctcgacctaattttctgccccaagttaggccaaaacccgtggcacagaacaatattccgatagcaccagccccaccaccaatgttagccgcaccacaacttattcagcgccctgtgatgttaacaaaattcacccctacgactctgccaaccagtcagaactctattcaccccgttcgggtcgttaacggtcagacagccactatcgccaagacttttcctatggcgcagctgaccagcatcgtgattgccacacccggaacacggctcgcaggcccacaaactgtgcagttgtcaaagccctcacttgaaaaacaaacagtaaaatctcatacggagacggatgagaaacagaccgaaagccgcacaatcacacctcccgcagcgcctaagccgaaacgggaggagaacccccagaagttagccttcatggtgtcccttggtctggtgacccatgaccatttggaggaaatccagtctaaaaggcaagaaaggaagaggcgtaccacggccaatccggtctatagcggggctgtgttcgaacccgaaagaaaaaagtctgctgttacttacttgaattccactatgcatccgggaacccggaagaggggcaggcctcctaaatataacgccgtgttgggtttcggagccctgacaccgaccagcccccaatcatctcatcctgattcacccgaaaatgagaagactgaaacaaccttcactttccctgctcccgtacaacccgtgagcttaccatccccaaccagcacagacggggacattcatgaggacttctgttcagtgtgtcgaaaatccggacagctgctgatgtgcgacacatgcagccgcgtgtatcatctggattgccttgacccaccgttaaagactatccctaagggtatgtggatctgccccaggtgccaggatcaaatgttgaagaaggaggaggccattccgtggccaggcaccctcgcaatagtgcattcttacatcgcttacaaggccgcaaaggaggaggaaaagcagaagctgctcaaatggtcctccgacctcaagcaggaaagggagcagctcgaacagaaggtgaaacagctatctaacagcatatctaagtgcatggaaatgaagaacactatactcgcaagacagaaagagatgcattcatctctggaaaaggtgaaacaactgataagacttattcatggcatcgatctgtctaaaccagttgatagtgaggccacagtcggagccatatcgaacggacccgactgtacgcctcccgctaacgctgctacgtccacacctgccccatccccctcctcccagagttgcaccgcaaattgcaaccagggtgaggagacgaagtag

SEQ ID NO: 234505 - DNA, 81 bp, synthetic construct
  misc_feature 1..81: note = Description of Artificial Sequence: Synthetic coding sequence
  source 1..81: mol_type = other DNA
atggagctgcagacattgcaggaagcactgaaggtggaaatacaagtgcatcaaaaattagtggcccaaatgaagcaatag

SEQ ID NO: 234506 - DNA, 36 bp, synthetic construct
  misc_feature 1..36: note = Description of Artificial Sequence: Synthetic coding sequence
  source 1..36: mol_type = other DNA
atggaacttcagactctccaagaagccttgaagtag

SEQ ID NO: 234507 - DNA, 306 bp, synthetic construct
  misc_feature 1..306: note = Description of Artificial Sequence: Synthetic coding sequence
  source 1..306: mol_type = other DNA
atggagctgcaaaccctccaggaggctctgaaagttgaaatacaggtccaccagaagctcgtcgcacagatgaagcaagatcctcagaacgctgatctgaagaaacaactacacgagttgcaggcaaagatcacagcccttagcgagaagcaaaagagggttgtggaacagcttcgcaaaaaccttatcgtcaagcaggaacagccggacaaattccagatccagcctctcccgcagagcgagaacaaactgcagacagcccagcagcagccacttcagcaacttcagcagcagcagcagtattag

SEQ ID NO: 234508 - DNA, 30 bp, synthetic construct
  misc_feature 1..30: note = Description of Artificial Sequence: Synthetic coding sequence
  source 1..30: mol_type = other DNA
atggaactgcagaccctccaggaagcttag

SEQ ID NO: 234509 - DNA, 156 bp, synthetic construct
  misc_feature 1..156: note = Description of Artificial Sequence: Synthetic coding sequence
  source 1..156: mol_type = other DNA
atggaactccaaacactccaagaggcactgaaagtggaaatccaggttcaccagaaattagtggcgcagatgaaacaggatcctcagaatgctgacctcaagaagcagcttcatgagttgcaggcaaaaattacagctctaagcgaaaagcaatag

SEQ ID NO: 234510 - DNA, 477 bp, synthetic construct
  misc_feature 1..477: note = Description of Artificial Sequence: Synthetic coding sequence
  source 1..477: mol_type = other DNA
atgctggaagcgatggcagagccatccccggaagacccacctccaactctcaagcctgaaacccaacccccagaaaagcgccgtcgaaccatcgaagactttaacaaattttgcagcttcgtgctagcctacgctgggtacattcccccttcaaaagaggagtcagactggcctgcctccgggagcagcagtccactgaggggtgagtcagccgctgactccgacggttgggatagcgctccttccgacctgcggacaatacaaaccttcgttaagaaggccaagtcctccaagcgcagggccgcacaagcaggacccacccagcccggaccacctagatccacattcagtagactgcaggctccagatagcgccacactgttagaaaagatgaaactgaaggattctttgtttgacctggacgggccaaaagtggcctctccgctgtccccaccatgtgctgccaacactccctag

SEQ ID NO: 234511 - DNA, 1212 bp, synthetic construct
  misc_feature 1..1212: note = Description of Artificial Sequence: Synthetic coding sequence
  source 1..1212: mol_type = other DNA
atgctggaagccatggcggagccatccccagaagatccacctccaactctaaagcccgagacgcaaccaccggagaagcggagacgcaccatcgaagatttcaataaattttgttcctttgtgcttgcctacgccggatacatccctccatcaaaggaagagtcggactggcctgcaagcggaagctcctcgcctctgagaggggaaagcgcagctgacagtgatggatgggattccgctcctagtgatctgcgaacaatccagacctttgttaagaaggccaaatccagtaagcgcagggcggctcaggccggacctacccagccaggcccacccagatcaacatttagcaggttgcaggctcccgactctgctacactgttggagaaaatgaagttgaaggatagcctcttcgatttagacggccctaaggtagcatctccacttagcccaacaagtctgacccataccagcagacctccggcagccctgacacccgtgcccttgtcccagggcgatctgtcacatccaccaagaaaaaaggaccggaagaatcgcaaactggggccaggcgcaggcgctggattcggagtcttgcggagaccaaggcccacacccggtgatggggaaaagaggtccagaattaagaaatcgaaaaagaggaagttgaagaaggctgagaggggggatagattgcccccacctggacctccgcaggcccctccgtcagacaccgatagcgaagaggaagaggaagaggaggaggaggaagaggaagaggagatggctaccgttgtcgggggagaggcacccgtgccagttttgcccaccccccctgaggccccacggccaccggcaacggtgcatccggagggtgtaccacctgctgattcagagtccaaggaggtcgggtccacagaaacctcccaggatggcgacgcaagctcttccgagggagaaatgcgggtgatggatgaggatattatggtcgagagtggtgacgacagctgggatctgatcacttgctactgtagaaaacctttcgcgggtagacctatgattgagtgctcactgtgtggaacgtggatccacctcagctgtgcgaagatcaagaaaacgaacgtgcccgatttcttttattgtcagaaatgcaaagagttgcggcctgaagccaggaggctggggggtcctcctaagagcggtgagccctag

SEQ ID NO: 234512 - DNA, 1200 bp, synthetic construct
  misc_feature 1..1200: note = Description of Artificial Sequence: Synthetic coding sequence
  source 1..1200: mol_type = other DNA
atgccgggtgactgccggagggacccgcctcccactctgaaacccgaaacgcagccaccagagaagcgaaggagaaccatcgaggactttaataaattttgttccttcgtccttgcttatgccggatatatacctcctagtaaagaggagtcagattggcccgcttctggatccagtagccccctcaggggggagtcggccgctgactcggacgggtgggactccgctcccagcgacttgcggaccatccaaacattcgttaagaaggctaagtcttcaaaacgtcgcgcagcccaggcaggcccaactcagcccggacccccacggagcaccttcagccgacttcaagcccctgacagcgccactctgctggagaaaatgaaactcaaggactccctgttcgatctcgacgggccaaaagttgcatcgcctctttcacctacctcactgactcacacctctagacctccagcggctctgactccagtgcccctctctcagggtgatctgtcccaccccccacgaaagaaagacaggaaaaaccggaagttaggtccaggcgcaggcgctggctttggcgtgctccgaagacctagaccaacccctggcgacggagagaaaagatctcgcatcaagaagagtaagaagaggaaactaaaaaaggccgaaagaggagacaggctccccccaccaggccctcctcaggctcccccttcggataccgactccgaagaggaggaagaagaggaagaggaggaggaagaggaagagatggcaacagtggtaggaggcgaggccccagtgccagtccttccgacccctcccgaagcaccacgtcctcccgcaaccgtgcatccggaaggcgtaccgccagccgatagcgagagcaaagaagtggggtctactgagacttcccaggacggggacgctagcagcagcgagggagagatgcgggttatggatgaggatataatggtggagtcgggtgacgactcctgggatctcattacttgttactgtaggaagcctttcgctggaagaccaatgatcgagtgttcactgtgtggcacctggatccatctgtcttgcgctaagatcaagaagactaatgtaccggactttttctactgccagaagtgtaaagaacttcgacccgaggcacgcaggctgggcggtcccccaaaaagtggcgagccatag

SEQ ID NO: 234513 - DNA, 6120 bp, synthetic construct
  misc_feature 1..6120: note = Description of Artificial Sequence: Synthetic coding sequence
  source 1..6120: mol_type = other DNA
atggatatcgtcgacaccttcaaccacttgattcctacggaacacctcgatgacgccctgtttctgggttcaaacctagaaaatgaagtctgtgaggatttctcagcatctcagaatgtgctagaggacagcttgaagaatatgctctccgataaggatcctatgctgggatccgcttctaatcagttctgtctacccgtcctcgatagcaacgatcccaactttcagatgccatgctctacagtggtgggattggatgatattatggatgagggagtcgtaaaagagagtggtaacgacacgatcgacgaagaagagttgatcctccctaatcgcaacctgcgagacaaggtcgaagaaaattccgtcaggagcccgcgtaagtccccaaggctgatggctcaagaacaggtgcgatccttgaggcagagtaccatcgctaaacgttccaacgccgctccgctgtccaatactaagaaagcctccggaaagaccgtatctaccgccaaggctggggtgaagcagccagaacgttcacaggttaaggaggaggtgtgtatgtccctgaagccagagtaccacaaggaaaaccggaggtgcagtagaaatagtggacagattgaggtggttcccgaagtgagcgtgtcatccagccactcttctgtgagctcctgtcttgagatgaaagacgaggatggactcgattcaaagcacaagtgcaacaatccgggagaaatcgatgtaccgtcacacgagctgaactgctctctcctgtccgagacgtgtgtgactattggtgagaagaagaatgaggcgctgatggagtgcaaggccaagcccgtgggctcccctttgttcaagttctcggacaaagaggagcacgaacagaatgatagtatctcgggaaaaaccggggaaacagtggtggaagaaatgatcgctacacgcaaggtggaacaggatagcaaggagacagtgaagctgagccacgaggacgaccatatcttagaggatgccggaagttccgacattagcagtgacgccgcttgtacaaaccctaataaaactgagaattccctggtggggctgccctcctgcgtggacgaggtgaccgagtgtaacctggagctgaaggatacgatgggtatagccgacaagaccgaaaacacgctggaacggaacaagatcgaaccgttgggttattgcgaggatgctgaatctaaccgtcagctggaaagtactgagttcaacaagagcaatctggaggtggtggacaccagcacttttgggccagaatctaacatactggaaaacgccatatgtgacgttccggatcagaactcaaagcagcttaatgctatcgaatccaccaagatcgaatctcatgaaaccgccaatctgcaggatgacaggaactctcagagcagcagtgtgagctatctggaatctaaaagcgtcaagtccaagcatacaaagcctgtaatccatagcaaacagaacatgaccactgacgctcctaagaagatcgtcgccgcaaagtacgaggtcattcattccaaaacgaaggttaatgtaaaatctgttaagcggaatacagacgtgccggaatcgcagcagaactttcacaggcctgtaaaggtacgaaagaaacaaatagataaagagcccaaaatccagtcctgtaatagtggggtgaagtccgtcaaaaaccaggcccacagcgtcttaaagaagaccctgcaggaccaaaccctggtacagattttcaaaccactcacacacagcttgagcgacaagagccacgcacatcccggatgtcttaaagaaccccaccatcccgctcaaacgggccatgtttcccacagtagccaaaagcagtgtcataagccccagcagcaggctcccgctatgaagaccaattctcacgtgaaagaggaactggaacatccaggcgtagaacactttaaagaggaggataaacttaagctgaagaagcccgaaaaaaatcttcagcccagacagaggcggtcttccaagtccttcagcctagacgagccaccactcttcatccctgacaacattgccactatacggagagagggttccgaccactcttcttcttttgagtccaagtatatgtggactccttccaaacagtgcggtttctgcaaaaagccccacggcaaccgtttcatggtcggatgtggtcggtgcgatgactggtttcatggcgactgtgttggactcagcctttctcaggcacagcagatgggtgaagaggacaaggagtatgtgtgtgtgaagtgttgcgcggaagaggacaaaaagacagaaatcctcgaccctgacaccctggaaaaccaggctacagtggaatttcacagcggggacaaaacaatggaatgtgaaaaacttggtttgagcaagcatactacaaacgataggaccaagtatatcgacgatacggtgaagcataaggtaaagatcctgaagcgcgaaagcggcgagggacgcaacagttctgattgtcgggataacgagataaaaaagtggcagctcgcccctctgaggaagatggggcaacccgtcctgccacggcgtagctccgaggagaagagtgagaaaattccaaaggaaagcaccacagtgacatgcacgggagaaaaggcgagtaagccgggaacccacgaaaagcaggagatgaagaaaaagaaggtcgagaagggagtgcttaacgtgcacccggcagcctctgcaagtaagcccagcgcggatcagatacgtcagtccgttcgccactccctgaaggatattctgatgaagcgtcttactgactcaaatttgaaggtgcccgaggaaaaggctgccaaggttgccacaaagatcgagaaggagctgttttcattcttccgggacacagacgcgaagtacaagaacaagtaccgctccctgatgtttaaccttaaggaccctaaaaacaacatactattcaaaaaggttctcaagggcgaggtgacaccagaccatttaatcagaatgtctccagaagaactagctagcaaggagctcgctgcgtggcgtagacgggaaaaccgccatacgatcgaaatgattgagaaggagcagagagaagtagaacggagacccataacaaagatcacacacaagggcgagattgaaatagagtccgatgcaccgatgaaggagcaggaggcggcaatggagattcaggagccggctgctaataagagtctggagaaacctgagggatcagaaaaacagaaggaagaagtagactctatgagtaaggatacgacatcccagcataggcagcacctgttcgatttgaactgcaaaatctgcattgggagaatggccccacccgtggacgatctcagccccaaaaaagtgaaagtagtggttggggtggcgcgtaagcatagtgataatgaggccgagtcaatcgcagacgccttgtcttctacctcaaatatcctggccagtgagttcttcgaagaggagaagcaagaatcaccaaaatccacattctcacccgcacctagaccagaaatgccaggcactgtcgaagtcgagtcaacttttctcgcacgcctaaacttcatttggaagggttttattaacatgccatccgttgccaagtttgtgactaaggcctatcctgtttccgggagtccagaatatttgaccgaggacttgcctgactctatccaagtcgggggtcggatcagcccacagaccgtatgggactatgtagagaagatcaaggcctccgggacaaaggagatctgtgtcgtgagattcacgccagtcacggaggaggaccagatctcctacaccctgctcttcgcatactttagctctcggaaacgttacggcgtggctgccaataacatgaaacaagtgaaggacatgtacctgataccactgggagccaccgacaaaatccctcatcctctcgtgccttttgacggacccggtctcgagttacatcgccctaacttgctactagggcttataattagacagaagctgaaacgccaacacagtgcctgcgcatcaacctcacacatagcggagacccccgaaagcgcaccgcctatcgcgctgcctccggacaaaaaatctaagatcgaagtgtctaccgaagaagccccagaagaggagaacgattttttcaatagttttaccaccgtgctgcataaacaaaggaataaaccgcagcagaacctgcaagaagatttaccaacagccgttgagccattaatggaagtcactaaacaagagccaccgaaacccctgaggtttcttccaggtgtcttaataggatgggagaatcagcccacaacactggaattagcaaacaagccccttcctgtggacgacatcctccaatctctgctgggcactacgggacaggtctatgaccaggctcagtcagtgatggaacaaaataccgtcaaggagatacccttcctcaatgaacagaccaattctaaaatcgagaagacagataatgtcgaagtcactgatggtgagaacaaggaaatcaaggtcaaggttgacaacataagcgaaagcacagataaaagtgcggagatcgagacttctgtagtgggctcctcctctatttctgctggatccttgacttctttgagtctccggggaaaacctccagacgtctcaaccgaggcctttttaacaaacctgagcattcagtccaagcaagaagaaaccgtggagtctaaggagaagaccttaaagcgacagttacaggaggatcaggagaacaatctgcaggacaatcagaccagtaattctagcccgtgcagatcaaatgtgggaaaggggaatatagacggtaacgtgagctgctctgagaatctggtcgccaacacagctcgctcgccacagtttatcaatctgaagcgagacccccgacaggccgcaggcaggtcgcagcccgttacaacgagtgaaagtaaggacggagactcctgccgaaacggggagaaacacatgctgcccggactgtcacataacaaggaacatctgacagaacagatcaatgtggaggaaaaactgtgtagcgccgagaagaactcgtgtgtacagcagtctgacaatcttaaggttgcgcaaaatagcccgagcgtggaaaatatccagacatcgcaggcggagcaggcaaagcctctgcaagaggacatacttatgcagaatatcgaaacagtgcacccatttcgtagaggtagcgctgtggccactagccattttgaggtcggcaatacttgtccctctgagtttccaagcaaaagtataacctttacaagccgcagcacttcaccaaggacatcaaccaatttctcccccatgcgaccacagcagccaaacctacagcatctgaagtcttctcctcccggtttcccctttcctggaccccctaactttcctccgcagagtatgtttggtttcccccctcatctcccccctcccctgctgcctccccctggcttcggctttgctcagaaccccatggtgccgtggccacccgtggtccacctgccaggccagccacagcggatgatgggtcccctctcccaagcttctcggtatatcgggcctcagaatttctatcaggttaaagacatccggaggcctgagaggcggcactcagatccttgggggagacaagaccagcaacagctggaccgcccttttaaccgcggaaagggggatcgtcagcgcttttacagtgactcacatcacctcaaacgtgaacgccacgagaaggaatgggagcaggaatcagagagacacaggaggcgcgatcggagccaagataaggaccgggatcggaagtcacgcgaagaaggccataaggataaagaacgtgccagactctctcatggggacagggggacggacggcaaggccagtagggactctagaaacgtggacaagaagcccgacaaacccaaaagcgaagattatgagaaggacaaggaacgggagaagtctaaacatagagagggcgaaaaggatcgagatcggtatcacaaagatagggatcatacagacagaaccaaatctaaacgttaa

SEQ ID NO: 234514 - DNA, 6119 bp, synthetic construct
  misc_feature 1..6119: note = Description of Artificial Sequence: Synthetic coding sequence
  source 1..6119: mol_type = other DNA
atggacatcgtggacaccttcaatcatctcattcccactgagcatctcgatgacgctctgtttctcggatccaacctagagaacgaagtctgcgaggatttctctgctagccagaacgtgctggaagactcccttaaaaatatgctctccgataaagaccccatgctcgggtctgcaagtaatcagttttgcctacccgtgctggacagcaatgaccctaatttccaaatgccctgttctaccgtcgtcggactggacgatatcatggacgaaggcgtcgtcaaggaatctggaaacgacacgatcgatgaagaggagctcatcttacccaaccgcaacctccgcgataaagtcgaagagaatagcgtccggtcccccagaaagtctcccaggcttatggcccaggaacaagtgaggtcgctgcggcagtccactatcgccaaacgctcgaacgcggctccattgtccaatacaaagaaagcatcgggaaagactgtcagtactgctaaagcgggagtgaagcagcccgagcgcagtcaggtcaaagaagaagtttgtatgagcctcaaaccagaataccacaaagagaatcggaggtgctctagaaattctggacagatcgaggttgtccccgaagtctctgttagtagctcacattcgagcgtgagttcttgcctggaaatgaaagacgaagatggcctggattcaaagcacaaatgcaataaccccggagagatcgatgtgcccagccacgaacttaactgtagtctgttgagcgaaacttgtgtcacgatcggtgagaaaaagaacgaagcgctaatggaatgcaaggcgaagcctgtgggaagccctctattcaaattttctgacaaagaggagcacgaacagaacgatagcattagcgggaagaccggcgaaaccgtcgtggaggagatgatcgccacccgaaaagttgaacaggatagcaaggaaaccgtgaaattgagccacgaggacgatcatatcctggaagacgccggatcctctgatatcagctctgacgcagcctgtacgaacccaaataaaactgagaactccctggtaggattgccatcgtgcgtggatgaggtcacggaatgcaatctcgaactgaaggacaccatgggcatcgctgataagacggagaatactctcgagcggaacaaaatcgagcccctgggttactgtgaagacgccgagtcaaacaggcagctcgaaagcacagagttcaacaaatccaatctggaggtagtggacaccagcacttttgggcctgagtcgaatattctggagaacgctatttgtgatgtccccgaccagaatagtaagcagttgaatgctatcgaatcaactaagattgaaagtcacgaaactgcaaacctgcaggatgacaggaattcgcagtcttcaagcgtctcctacttggaatccaagtctgtgaaatccaaacacaccaagcctgtcatccacagcaaacagaatatgacgacagacgcccctaaaaaaatcgtggccgcaaagtacgaggtcatccattctaagacaaaagtgaacgtgaaatctgtcaagagaaacaccgatgttcctgaaagccagcagaatttccatcgcccagtcaaagtgcgcaaaaaacagattgataaagagccgaagattcaatcttgtaatagtggcgtcaaatccgtaaaaaatcaggcccactctgtgttgaaaaagaccctgcaggatcagacgttggttcagattttcaaaccactgacccacagcctcagcgacaaaagtcatgcacatcctggctgcctgaaagaacctcatcaccctgcccagaccgggcacgtctcacactcctcacagaagcaatgccacaaacctcaacagcaggcccctgccatgaaaaccaattcacatgtaaaggaggagctcgaacaccccggtgtcgagcacttcaaagaagaagacaaactaaaactcaagaagcccgagaaaaacctccagcccagacagagaagatcttccaagagcttctcccttgatgaaccccctctcttcatccccgacaatattgccaccatccgcagagagggttccgaccatagtagttcctttgagtcaaagtatatgtggacaccctctaaacagtgtggtttttgcaaaaaaccgcatggcaaccgctttatggtggggtgtggacggtgtgacgactggtttcacggagattgcgttggcctctccctgtcccaggcgcaacagatgggtgaggaggacaaggagtacgtgtgcgtgaagtgctgtgctgaggaggacaagaagactgaaattctggacccggataccctggagaatcaggcgactgtcgagttccacagcggagataagacaatggaatgcgagaagctcggattgagcaaacacactaccaatgatagaaccaagtatattgacgacactgtgaaacataaggtgaagatcctgaaaagggaatccggcgaaggtaggaactctagcgattgcagggacaacgagattaagaaatggcagctggccccactccgcaagatgggccaaccggtgcttcctcggagaagctccgaggagaagagcgagaaaatcccaaaggaaagcacgactgtcacctgtaccggtgaaaaggctagtaagcctggtactcacgaaaagcaagagatgaagaaaaagaaagttgaaaagggcgtgcttaacgttcatccagctgcttccgcctccaaacccagtgcagaccagattcgccagtccgttcgccacagcctgaaggacatccttatgaagcgacttactgacagtaatctgaaggttccagaggagaaggcggctaaggtagccaccaaaattgagaaggagctgtttagttttttccgcgacacagatgctaagtataagaataaataccgatctctcatgtttaacctgaaagaccctaagaataacatcttgttcaaaaaggtgctgaaaggtgaggtaaccccggaccatcttataaggatgtcaccagaggagttggcatctaaggagctggcagcatggcgccgaagggaaaaccggcataccatagaaatgatagagaaagaacaacgagaggtggagaggaggcccattacaaaaatcacccataaaggtgaaatcgagattgaatccgatgcaccaatgaaagagcaagaagctgctatggagatccaggaacccgcagcaaacaagagtttggaaaaaccagagggcagtgaaaagcagaaagaagaagtggattctatgtcaaaagataccacaagccagcatcggcagcatctatttgatctgaactgcaagatttgcatcgggagaatggcccctcccgtcgacgatctgtcgccgaaaaaggtgaaggtggtagtgggagtggcacgtaagcattccgacaatgaagcggaatccatagctgatgccctgagcagtaccagcaacattcttgcatccgagttttttgaagaggagaaacaggagtccccgaaaagcacctttagtcctgcacctcggccagaaatgcccggaactgtggaagttgagagcacctttcttgcacgcctgaattttatatggaaaggcttcataaatatgccctctgtcgcaaagttcgtgacgaaagcatacccggtgtctggttcccctgagtatctgacagaagatttgcctgatagtatacaggtggggggtagaataagtccacagaccgtttgggattacgttgaaaagatcaaggcaagcggtactaaagaaatatgcgtggtgaggtttacccccgtcacggaggaggaccagatttcctacacgcttttgttcgcttacttttcttcccgaaagagatatggtgtcgcagccaacaacatgaaacaggttaaagacatgtatctgataccattgggtgccaccgacaagatcccacacccactcgtgccattcgacggcccaggtctggaactgcatcggcctaacctactgctagggcttatcattaggcagaagctgaagcggcagcacagtgcttgtgcctcaacctcccatattgctgaaacccccgaatcggcccctccaatcgccctgcccccagacaaaaaaagcaaaattgaggtttcaacagaagaagccccagaagaggagaatgactttttcaacagtttcaccacggttttgcacaagcaacggaataaaccccaacagaacctccaagaagacttacctaccgcagtggagcccctcatggaagtgaccaagcaggagccacctaaacccctgcgcttcctgcccggagttttgatcggatgggagaaccagccaacaacattagagttggcaaataaaccactccctgtcgatgacatcctccagtccctactcggaaccactggccaagtgtacgaccaagctcagtcggtgatggaacaaaataccgtcaaggagatcccctttcttaacgaacagacaaactctaagatcgagaagaccgataacgtggaggtgacagacggtgagaacaaggagattaaggtgaaggtggataacatcagtgagagcacagataagtcagcggagatcgaaactagcgtcgtagggagcagtagcatttcagcaggatcactcactagtctctccctgcgcggtaagccgcctgatgttagcacagaggccttcctcaccaatttgagtatacagagtaaacaggaggaaacagtagagtccaaggagaaaaccctcaaaagacagctccaggaagatcaagagaataaccttcaggacaaccaaacctctaacagcagcccgtgtcgaagtaacgtgggcaaaggtaacatcgatggtaacgtgagctgcagcgagaatcttgtggctaacacagcccgaagccctcaatttatcaacctcaaacgggaccctaggcaggctgctggcagatcgcaacctgttacaacttccgagtccaaggatggcgatagctgcaggaatggagaaaaacacatgctgcccggtctgagccataataaagagcacctaaccgagcagattaatgttgaggagaaattatgttccgctgagaagaatagttgtgtgcagcagtccgataacttgaaagttgcacagaatagcccgagtgtcgaaaatatccaaacctcacaggctgagcaggcgaagcctctgcaagaggacattctgatgcagaatatcgaaactgtgcacccgttcagacggggatctgcagtggctacctcgcactttgaagtcggtaacacctgccctagcgaattcccaagcaagtccatcaccttcacctctcggagcacttctccaaggacatctaccaatttcagtccgatgagaccccagcaaccgaacctacagcacctgaaaagcagcccgccaggtttccctttccccggtcccccaaatttcccaccacagagtatgttcggtttcccacctcacctacctccgccactgctccctcccccaggcttcggcttcgcccaaaaccccatggtgccctggcctccagtggtccacttacccggtcagccacagagaatgatgggacccctctcacaggcttcccggtacatcggtcctcaaaatttttatcaggtgaaagatatacgacggccagagagacgccacagcgacccatggggccgtcaggaccagcagcaactggacaggccctttaatcgcggtaaaggagacaggcaaaggttttattctgatagtcatcacctgaaacgtgaacgccacgagaaggaatgggaacaggagagtgagcgacataggcgccgagatagatcccaggacaaggatagagatcggaagtctagggaagaaggccataaggataaggagcgagctcggctgagccatggcgaccgtggcacagatgggaaggcttcgagagacagtagaaacgtggacaagaagcctgataagcccaagtctgaagattatgagaaagataaagaacgagaaaaaagcaagcaccgagagggcgagaaagatcgtgataggtatcacaaagatcgagaccataccgatcgcactaagtctaagcgata

SEQ ID NO: 234515 - DNA, 1098 bp, synthetic construct
  misc_feature 1..1098: note = Description of Artificial Sequence: Synthetic coding sequence
  source 1..1098: mol_type = other DNA
atgtccagctcggttgaacagaagaaagggccaacaagacagagaaaatgtgggttttgcaagtccaacagggacaaagaatgcggacaactgctcatatccgagaatcagaaggttgcagcacaccacaagtgcatgttatttagtagtgccctggtgtcctcacacagtgacaacgagtcactcggaggtttctctatcgaggacgtgcaaaaggaaattaaaaggggcaccaagctgatgtgctctctgtgccactgccctggagccactatcggctgcgatgtgaagacgtgtcaccgtacataccactaccactgcgcccttcatgataaagcccagatcagggaaaagccatcacaggggatctatatggtctattgtcgcaagcacaagaagacagcgcataacagcgaagcagatcttgaagagtctttcaacgaacacgaacttgaaccttctagcccaaagtctaagaagaagagccggaagggcagaccccgaaagaccaatttcaaaggactatctgaagatactcgctcaacgtccagccatggaaccgacgagatggagtctagctcttaccgggacagaagtccacatcgctcttccccaagcgacactagacctaagtgcggattctgccacgtaggcgaggaggaaaatgaggcaagaggcaagctgcacatcttcaatgcaaagaaggctgccgctcattataagtgcatgctcttctcttctggcactgtgcagctgactactacctccagggcagaatttggggacttcgatatcaaaactgtgctccaggagatcaagcggggaaaaaggatgaaatgcaccttatgcagtcaaccaggggctacgattggctgcgagattaaggcctgcgtgaaaacataccattaccattgtggcgtccaagataaggccaaatacattgagaatatgagccggggtatatacaagctgtactgcaagaaccatagcggcaatgatgagagggatgaggaggacgaagagcgcgagagtaaatcccggggtaaggtagaaattgatcagcagcagctgacccagcaacaacttaatggcaactag

SEQ ID NO: 234516 - DNA, 975 bp, synthetic construct
  misc_feature 1..975: note = Description of Artificial Sequence: Synthetic coding sequence
  source 1..975: mol_type = other DNA
atgagctctagcgttgaacaaaaaaagggaccaacacgacaaagaaaatgcgggttttgcaagagcaacagggataaggagtgcggacaactattgatcagtgagaatcagaaggtggcggctcatcataagtgtatgctcttttccagcgcgctcgtatcctctcattccgataatgaatcactggggggttttagtatcgaggatgtgcagaaggagatcaagagagggaccaaattgatgtgcagcctatgccactgccctggagctactatcggatgcgatgtgaaaacttgtcaccgcacttatcattatcactgtgccctccatgataaagcacaaatccgcgaaaagccgagccagggaatatatatggtgtattgtcgtaaacataagaagactgcccacaattccgaagcggctgacctcgaggagtcatttaacgagcacgaacttgaacccagttccccaaagtccaagaagaaaagccggaaaggtcgccctaggaaaactaactttaagggacttagtgaagatacccgctctacctccagccacggaacagacgagatggaaagttccagttaccgtgaccgcagcccgcaccggtcctctccctctgatacaagacccaagtgtggattctgccatgttggggaagaagagaacgaggctaggggcaagctgcatatttttaacgcaaaaaaggcagctgcacactacaaatgtatgctcttcagctctggcaccgtacagctgactaccacgagccgcgctgaattcggagacttcgacatcaagacggtgctgcaggaaataaaacggggaaagcggatgaagtgtaccctctgttcacaaccaggcgctactatcgggtgcgagatcaaggcatgtgtcaagacttatcactaccactgtggcgtccaggacaaggctaagtatattgaaaatatgtcgcggggaatctacaaatag

SEQ ID NO: 234517 - DNA, 939 bp, synthetic construct
  misc_feature 1..939: note = Description of Artificial Sequence: Synthetic coding sequence
  source 1..939: mol_type = other DNA
atgagctcttcagtggaacagaagaagggcccaaccaggcagaggaagtgtggcttttgcaaaagtaacagagataaggagtgcgggcagcttctcatctctgagaatcagaaggttgctgcacatcacaaatgcatgctgtttagcagcgcgctcgtctccagtcacagtgacaacgagtccctcggagggtttagcattgaagatgtgcagaaagaaattaagcgtggtacaaagttgatgtgcagtttatgccattgccctggcgcaaccatcggctgtgatgtcaagacctgccatcgcacctaccattaccattgtgccctgcacgacaaagctcagattagagaaaaacccagtcagggaatctatatggtgtactgtcggaagcacaagaaaaccgcccataactctgaagccgcagatctggaggagtcttttaacgaacacgaactcgaaccttcatcacccaagagcaagaagaagtcgcgcaagggcagacctcgtaaaaccaactttaaaggattgtctgaagacactcgcagcacttcgtctcacggtacagacgagatggaatccagcagttacagagaccgttccccgcaccgttcgtccccgtcagacactaggccaaagtgtggcttctgccacgtgggtgaggaggaaaatgaagcccgaggtaaactccatatattcaatgctaaaaaagccgcagcacactacaaatgtatgttatttagttcgggcacagtacagctgactaccacatcgagagcggagtttggagattttgatatcaaaacagtgctccaggaaatcaaaagaggtaagagaatggtttgctctttctacatttgctacgctacgctgcaccttatttgctgcttcaagttccgtgtacacccaaaatttatacaatcgagcgagaatcttaagtag

SEQ ID NO: 234518 - DNA, 1098 bp, synthetic construct
  misc_feature 1..1098: note = Description of Artificial Sequence: Synthetic coding sequence
  source 1..1098: mol_type = other DNA
atgtcctcaagtgtggaacagaagaagggtcccactaggcagcgcaagtgtggattctgcaaatcaaatcgggataaagaatgtggccagctgctgattagcgaaaatcaaaaagtagcagcccaccacaagtgcatgttgtttagttctgccctcgtctcctcccactctgacaatgagtctttgggtgggttctcgatcgaagacgtacaaaaagaaataaaacgcggtactaaactcatgtgcagcttgtgccactgtccgggagctaccattggctgcgacgtcaagacctgccaccgcacttatcactatcactgcgctctccatgataaagcccagatcagggagaagccttcacagggcatctacatggtttattgtcgtaaacataagaaaacagcacacaacagtgaggccgatctcgaggagtcctttaacgagcacgaacttgaaccatcttctcctaaatccaagaaaaagagccggaaaggccgtccgaggaagaccaactttaaaggactgtccgaggatactaggagcaccagcagtcacgggacagacgaaatggagtcttcctcttacagggacagatctccacaccgctccagtccttctgacacccgccctaagtgtggcttctgccatgttggcgaagaggagaacgaagcaagggggaagttacatattttcaatgccaaaaaagctgccgcacattacaagtgtatgttattctcctcagggactgtgcagctgacaactactagtcgggctgaattcggggatttcgatataaaaactgtcctgcaggagatcaagcgaggcaaacgcatgaagtgcacgctgtgcagtcagccaggcgctacgattggatgcgagatcaaagcctgcgttaaaacatatcattaccattgcggcgtccaggataaggccaaatatatcgaaaacatgagccgtgggatctacaagttgtattgtaaaaatcacagtggcaacgacgaacgagacgaggaggacgaagagagagaatctaaatctcggggaaaggtggagatagaccagcagcaactaactcagcagcagctgaacggcaattag

SEQ ID NO: 234519 - DNA, 1101 bp, synthetic construct
  misc_feature 1..1101: note = Description of Artificial Sequence: Synthetic coding sequence
  source 1..1101: mol_type = other DNA
atgtcttcatctgttgagcagaagaagggacccaccaggcagaggaaatgtggcttttgtaaatcaaatcgcgacaaggagtgcggtcaactgcttatcagtgaaaaccagaaggtggccgcacatcacaaatgcatgcttttctcaagtgctctggtgtcttcccacagtgacaacgaatctctcggcggtttttctattgaggatgtgcagaaagagatcaaacggggtacaaagctcatgtgcagtttatgccactgccccggtgccaccatcggctgcgatgtcaaaacatgccaccgcacttaccactaccattgtgccctgcatgataaggcccagattcgggaaaagcccagtcaaggtatatacatggtctattgtagaaaacataagaagactgcccacaattccgaggcggctgatctggaagaaagttttaatgaacacgaactcgaaccaagttctcccaagtccaagaagaagtccaggaaaggcagacccaggaaaaccaattttaaggggctttccgaggacaccagaagtacatcaagccacgggaccgatgagatggagtcttcctcttatcgagatagaagtccacacaggagtagtccatccgacacgcggccaaagtgtgggttttgtcatgtgggcgaggaggagaacgaggctaggggcaagctccacatcttcaacgctaaaaaggctgcagcacactataagtgtatgctcttctcttccgggacagtccagttgacaacgaccagcagagccgagtttggggatttcgatatcaagaccgtcctgcaggaaatcaaacgcggtaaacgaatgaaatgtacactgtgctcccagcctggcgctaccattgggtgtgaaataaaggcttgcgtgaagacttatcactatcattgcggggtgcaggacaaggccaagtacatcgagaacatgtcccgtggcatctataagctttactgcaaaaatcattcaggcaatgacgaacgggacgaggaggatgaggaaagggagtccaaatcccgcggtaaagtggagattgatcagcagcagctaactcaacaacagttgaacggaaattag

SEQ ID NO: 234520 - DNA, 996 bp, synthetic construct
  misc_feature 1..996: note = Description of Artificial Sequence: Synthetic coding sequence
  source 1..996: mol_type = other DNA
atgtcgtccagtgtggagcagaagaaagggcctacccgccaaagaaaatgcggattttgcaagagcaaccgcgacaaggaatgtggacagctcttaatttctgagaaccagaaagtggccgcacatcataaatgtatgatgtgcagtctgtgtcactgccccggtgcaactattggctgcgacgtgaaaacttgtcacaggacttatcattaccattgcgccctccatgacaaagcccagattagagagaaacccagtcaggggatctatatggtctactgccgtaaacacaaaaaaactgcccacaatagtgaggccgacctggaagagtccttcaatgaacacgaactggagcctagcagcccaaaaagcaagaaaaagagtaggaaaggtcgcccacgtaagacaaactttaaagggctgtccgaggatacaaggtcaacatccagccacggaacggatgagatggaatcatcgtcttaccgcgatcgtagccctcaccgtagttcacccagcgacacaaggccaaaatgcggattttgtcacgtaggggaagaagagaatgaagcaagaggtaaactacacatttttaacgcaaagaaagcagctgctcattataagtgcatgctgttttcatccgggaccgtgcagctgaccaccaccagtagagcggagttcggtgactttgacataaaaactgtgctccaggagatcaaacgagggaagagaatgaagtgcactttgtgctcacagccgggagcgaccattggttgtgagattaaagcctgcgtgaaaacgtatcactaccattgtggtgttcaagataaggccaaatacatcgaaaacatgagccggggaatatacaagctatactgtaagaatcacagcgggaacgacgagagagatgaggaggatgaggagcgggagagcaaatcgaggggtaaggtggaaatcgaccagcagcagctgacacagcagcaactcaatggtaattag

SEQ ID NO: 234521 - DNA, 3075 bp, synthetic construct
  misc_feature 1..3075: note = Description of Artificial Sequence: Synthetic coding sequence
  source 1..3075: mol_type = other DNA
atggcgagtgttcctgtttactgcctatgtcgactgccttatgatgtcactagatttatgatcgaatgcgatatgtgccaggactggttccacggctcatgtgtgggagtcgaggaggagaaagctgcagatatcgatctgtaccattgtccgaattgcgaagtcctgcacggtccctccatcatgaaaaagagaaggggatcctccaaaggacatgatactcataagggcaagcctgtgaagactgggtccccgacgttcgtgcgtgaactgagaagtagaacctttgacagctcagatgaggtaatcctcaaacctacaggcaaccagttaacagtcgagtttctggaggaaaacagtttctccgttccaattctcgtactgaagaaggacggcctggggatgacattgccatcgccctcttttactgtgagagacgtggagcactacgtgggttctgacaaggagatcgacgtcattgatgtgacacgtcaggcagactgcaaaatgaaactgggagattttgtcaagtactactattcaggtaagagagagaaggtgctgaatgtgatcagcttagagtttagcgacacacgactcagcaacctggtggagactccaaaaatcgtgcggaagctttcctgggttgagaacttatggcccgaagaatgcgtttttgaacgcccaaatgttcagaagtactgcctgatgagtgtgcgcgattcctacaccgattttcacatagatttcggaggcacgtcggtgtggtatcatgttctcaagggcgaaaagatattttacctcattagacctaccaacgccaacctgaccttgttcgaatgctggtctagctcctccaaccagaacgagatgttttttggagatcaggtggataagtgttacaagtgctccgtgaaacaggggcagactttgttcatccccaccggatggatccatgctgtgctgacacccgttgactgcctcgctttcgggggaaatttccttcactctttaaatatcgagatgcaacttaaggcctacgagatcgagaagaggctaagcactgctgatctatttcgattccccaattttgaaacgatctgctggtatgtaggcaagcacattcttgatatttttcggggtctgcgcgagaaccggcgtcacccagcctcttatttggttcacggtggcaaggctctgaatctggccttcagagcctggactcggaaagaagcactgcccgaccacgaggacgagatccccgaaaccgtgaggacggtacaactcatcaaggacctggcacgcgagattcgactcgtggaggatattttccagcagaacgtgggtaaaacctccaacatcttcgggctccagcgtattttccccgcaggtagtattccactgacccgccctgcccactctacgtcagtgtcaatgtcccggttgagtctaccctctaagaacggctccaagaaaaaaggacttaaaccaaaagagctctttaagaaggccgagcgcaagggcaaggagtcaagtgccctcggacccgctggacagctgagctataatctaatggacacctactcccatcaggcccttaaaacaggctctttccagaaggcaaagttcaacattactggagcctgcctgaatgactccgatgatgattcgcccgatctcgatctcgacggtaatgagagtccgttagctctgctgatgagtaacggatctaccaaaagggtaaaaagcctgagcaagtctcggagaacaaagatcgcgaaaaaagttgacaaagctcggctgatggcagagcaagttatggaggacgagttcgacctcgattccgatgacgaactgcagatcgatgagcgactgggaaaagaaaaagcgactctgatcatccggcctaagttcccccgtaagctccccagagccaaaccatgttcagatccgaatagggttagggagcctggagaggttgagttcgacatcgaggaggactataccaccgacgaggatatggtggagggcgtagaagggaagctgggaaacgggtcgggcgctggagggattctggatttactgaaggcctctaggcaagttggcggacccgactacgccgctctgaccgaggcccctgcttcacccagtacacaggaggcaatacagggcatgctctgtatggccaatctgcaatcttcctcatccagtcccgctacatcaagtctccaggcctggtggacagggggacaggaccggtcttctggctcttctagtagcggcctgggcactgttagcaactcccccgcatcccagaggactcctggtaaaagacccatcaagcgaccagcctactggaggacagagtccgaggaggaagaagagaacgcatcccttgacgagcaggactccctgggggcatgtttcaaggacgcggaatatatttacccctccctcgagtctgacgacgatgatcccgcacttaagagtcgtcctaaaaagaagaaaaactcagacgacgccccatggtcccccaaggccagggtgacccctactcttcccaaacaagaccgcccagtaagggagggaacccgagttgcctcaatcgagaccggccttgcagccgcagcagccaaactggcccagcaggagctccagaaagctcagaagaaaaagtatatcaaaaaaaaacccctcttaaaggaggtggaacagcctaggccccaggattcaaacctgtccctgacagttccagctcccacggtcgctgcaactccccagttagtgacctctagcagcccgttgccgccaccagagccaaaacaggaagcgctgtctggttctcttgctgaccacgagtacactgctcgaccaaacgcattcgggatggcacaagcaaacagaagcactactccaatggcaccgggagtgttcttgacacagcgtcgtccctctgtgggttcgcaatcaaatcaggcaggtcaagggaaaagacccaaaaagggcctggcaactgcaaaacagcgcttgggtagaattttgaagattcacaggaatggcaagctactgctctag

SEQ ID NO: 234522 - DNA, 2847 bp, synthetic construct
  misc_feature 1..2847: note = Description of Artificial Sequence: Synthetic coding sequence
  source 1..2847: mol_type = other DNA
atggcctcagttccagtctattgtttatgtcggctgccctatgacgtcactcggttcatgatcgaatgcgacatgtgtcaggattggttccacgggtcctgtgtaggcgtcgaagaagagaaggccgctgatatagacttataccactgtcccaactgcgaggtcctgcacggccctagtatcatgaaaaagcggcgagggtcttccaagggtcacgacacacacaaaggcaaacctgtgaaaacaggtagtccaacatttgtgagggagctgcgcagccgtactttcgattcctccgacgaggtaattctgaagccgaccggaaatcagcttaccgtcgaattcctggaagagaactccttcagtgtgcccatactggtgttgaaaaaggacggccttggaatgactttgccaagcccctcatttactgtgcgggacgtggagcactatgtgggttcagataaggagatagacgtcatagatgtgacgaggcaggccgattgcaagatgaagctgggcgactttgtaaaatattactactccggaaagcgggaaaaagtgctgaatgtgatttcgctcgaattctcagacacaagactgtctaatctggtcgagacacccaaaatcgtcaggaaactatcctgggtggagaatctgtggccggaagagtgcgtgttcgaaaggcccaacgtgcagaagtactgcctaatgtcggttcgtgattcatacaccgactttcatattgacttcgggggtactagcgtttggtatcatgtcttgaagggagagaaaattttctatttaatccgacccactaacgccaatcttacactgtttgagtgttggagttccagttcgaatcagaatgagatgttttttggggatcaggttgataaatgttataagtgctcagtgaaacaggggcagaccttattcatacctaccgggtggattcatgccgtgctgactcccgtggactgcctggctttcgggggaaactttctccattcgttaaacattgagatgcagctgaaggcatatgagatagaaaagaggctgagcacagccgatctatttcgattcccaaattttgaaactatctgctggtacgtcgggaaacatatcctagacatttttaggggcctgcgggagaaccgcagacatcccgctagctacctcgttcacgggggtaaagccctgaacctcgccttcagggcttggaccaggaaggaagccctccctgaccatgaggacgaaatccccgaaaccgttaggacagtccagctgatcaaagaccttgcgagagagatcaggctggtggagtttaatataactggagcgtgtctcaacgacagtgatgacgactccccggacttagacctcgatggcaatgagagcccactggcactactgatgtctaatggcagtacaaagcgggtgaagtccctatcaaaaagtaggcgaaccaagattgccaaaaaggttgacaaggcgagactaatggctgagcaggtgatggaggatgagtttgatctggattcagatgacgaattgcagatagacgaaaggttgggaaaagagaaggccaccctgatcatcagaccaaaattcccaaggaaactgccacgcgcaaagccttgttccgatcccaatcgtgttcgggaaccgggtgaggtggagttcgacatagaggaggactataccaccgacgaggacatggtggaaggcgtggagggaaagcttgggaacggaagcggcgcaggtggcattttggacttgctgaaagcgtcccgccaggttggcggacctgactatgccgctctgactgaagccccagcttccccttccacacaggaggccattcaagggatgctctgcatggcgaatctacagtcctccagtagtagccctgccacttcaagccttcaggcatggtggactgggggtcaggatcgctcctctgggtctagtagttctggtctgggaacggtttccaatagtcctgctagccagcggacacctggaaaacgccctatcaaaaggccggcatactggcgcacggagtcggaggaagaggaagagaatgcctcccttgacgagcaggactccttaggtgcctgtttcaaggacgcggaatatatctatccgtctctggaatcagatgacgacgatccggcattaaagtccagaccaaagaaaaaaaaaaacagtgatgacgcaccctggtcaccaaaggcccgtgtcactcctaccctgcctaaacaagatcgtcccgtgagggagggtactcgggttgccagcatagaaacagggctggctgctgccgctgctaagctggcccagcaggaactccagaaggcacagaagaagaagtacatcaaaaagaaacccttgttaaaggaagtggagcaaccacggcctcaggattcaaatcttagcttaaccgtgccagcacccaccgtggccgctacacctcagctcgtgacttcctcaagtcctctgccccctcctgagcctaagcaagaggccctatcaggatctctggcggatcatgagtacactgcccgaccaaatgcatttggaatggcccaggcaaaccgtagtacaactcctatggccccaggcgtatttctaacgcagagacgcccatccgttggatcccagtcaaaccaggccggtcaaggaaagcggcctaaaaaaggtctggccaccgccaagcagaggcttgggcgaatcctcaaaatacatcgcaatgggaagctcctgctcaggcaggtcatcgttcaggccgaatgtcgacaggctattcacgaacccaagctgaagaggagggacgcccacccatag

SEQ ID NO: 234523 - DNA, 3183 bp, synthetic construct
  misc_feature 1..3183: note = Description of Artificial Sequence: Synthetic coding sequence
  source 1..3183: mol_type = other DNA
atgaataggagtcgggcaattgtacaacggggaagggtgctcccaccacctgctccactcgacacaaccaacctcgccggtcgacgaactctccagggcagagccaaaatggcttccgtccctgtttactgtttgtgtaggctgccttatgatgtgaccaggttcatgattgaatgcgatatgtgtcaagattggttccatggctcctgtgttggcgtggaggaggagaaagcggcagatatcgacttataccactgtcccaattgtgaagtccttcacggaccgagtattatgaagaagcgtcgtggctctagcaaggggcacgatacccacaagggtaaacccgtgaaaaccggttcgccaaccttcgtgcgagagctcaggtccagaacttttgatagcagtgacgaggtgatattgaaacctacaggcaaccaactcacggtcgaattcctggaggaaaactcttttagtgttcccatattggtcctgaaaaaggacggactcgggatgacgctgccttctccttcgtttacagtgcgggatgtcgagcactacgttggctctgacaaggaaatcgatgtgattgacgtaactcgccaagccgattgtaaaatgaagctcggggacttcgtcaagtactactattccggtaagcgtgaaaaggtgctgaacgtaatctccttggagttcagcgatacaaggctctcaaacctggtggagacacccaagatcgttcggaaacttagctgggtggagaatctgtggcccgaggagtgtgtgttcgagaggcccaatgtccagaagtactgcttaatgagtgtcagagacagctacactgattttcacattgattttggcggaacaagcgtgtggtaccacgtgctaaaaggcgaaaaaatcttctacttaattcgccctacgaacgccaatcttacattgtttgaatgttggtcctcaagcagtaatcagaatgagatgttttttggagatcaggtggacaagtgctacaagtgctcagtaaagcaggggcagacactctttattcctacaggatggatccatgctgtcctgaccccggttgattgcctcgcgtttggcggtaactttctgcattcacttaatatagaaatgcagctcaaggcctacgagattgagaaacggttgtccactgctgatctgtttcggtttcctaatttcgaaactatatgctggtacgtcgggaagcacatcctggatatcttccgtggcctgagggagaacaggagacatccggcaagttatctcgtccacgggggaaaggcgctgaacctggcatttcgagcctggacaagaaaagaagctcttcccgaccacgaggatgaaattcccgaaaccgtacggactgtgcagcttatcaaggacttggcacgggaaattcgtctcgtggaggacatcttccagcagaacgtgggaaagacctccaacatcttcggcttgcagcggatctttcccgctgggagcattccccttacgagacctgctcactcgacttctgtgtccatgtcaagactgtctttgccctctaaaaacgggtctaagaaaaagggattgaaaccaaaggaactcttcaagaaggcggagaggaaaggcaaggagtcaagtgcccttggccctgccggacagctctcatataacctcatggacacctactctcatcaggccctgaagaccggatcatttcagaaagccaagtttaacataacgggtgcatgtcttaatgattctgatgacgactcccccgacttggatcttgacggtaatgagtcacccctagctttattaatgagcaacggttcaaccaagcgagttaagagcttgtcaaagtctcggagaaccaagattgcgaagaaggtcgacaaggcaaggctaatggccgagcaggtgatggaggacgagtttgatctcgattctgatgatgagctgcaaatcgacgagcgattgggcaaagagaaagccacactgatcattcgccctaaatttcctaggaaactacccagggcaaagccatgctccgacccaaatcgggtgcgggaaccgggtgaagtggagtttgatatcgaagaggactacaccaccgacgaagacatggtagaaggtgtggagggaaaactgggcaacgggtccggcgctgggggaattctggacctcctaaaagcttctcggcaggtcggtggacctgactatgccgctctgactgaagctccggcaagcccatccactcaggaagccattcagggaatgctatgtatggcaaatctccagtcttcaagctccagccccgctacatcgtccctgcaggcctggtggactggcggacaggaccggagcagcggctcctcttcctcaggcctcggtacagtatccaacagccctgcaagccagagaacacctgggaaacggcctatcaagaggcccgcttactggcgcaccgaatccgaagaggaggaggagaatgcatctttggacgaacaggattcactcggggcttgttttaaggacgctgagtacatttatccatcactggagagcgacgacgacgacccagccctgaagtccagacctaagaaaaagaaaaattccgacgacgctccctggagtccaaaggcgagagtgactccaactctgcctaaacaagaccggccagtcagagaggggacacgcgtagcgtctattgagactggcttggctgccgctgcagctaaactcgcccaacaagagctccaaaaggcccagaagaagaaatatattaagaaaaagccacttctcaaggaagtcgaacagcccagaccccaggacagcaacctttctctcacggttcctgccccaactgtggccgcaactccacaactcgttactagcagcagccccttgccccctccagagccaaaacaggaagcactgtctggctcgctggctgaccatgagtatacagcccgtccaaacgcattcgggatggcccaggcaaatcggagcacaactcccatggctcccggtgtcttcttaactcagaggcgcccatccgtcgggtctcagtcaaaccaagccggacaaggaaagaggcctaaaaaaggtctggcgaccgcgaaacagaggttaggccgaatcctcaaaattcaccgaaacggcaagctcctgctgtag

SEQ ID NO: 234524 - DNA, 912 bp, synthetic construct
  misc_feature 1..912: note = Description of Artificial Sequence: Synthetic coding sequence
  source 1..912: mol_type = other DNA
atggacacatattcccatcaggccctgaagaccgggtcatttcaaaaagcgaaattcaacattaccggggcttgtttgaacgatagcgacgacgactctccagacctggatcttgacggcaacgaatctcccctggccttactcatgtccaacggaagcaccaagcgggtgaagtcactgtcaaagtcaaggcgaaccaagatcgctaagaaagttgacaaagcccgactgatggctgaacaggtgatggaggatgaattcgacctggacagcgatgatgaactgcagatagacgagcggcttgggaaagagaaggccaccttgatcatcaggcccaaatttccgaggaaactgccaagggcttcattggccctcacacccacagaattcgttaatcaggagaagctatccttgacactgcggaggacaatccagcaaatgaggacatggtggaaaggtctcaaggccagtctcggaatggttgttgccttagttgctttccttatctgtagccgacctgcgggacgatggggggacttaacgatgcttcccagtcccaggcctcagctgttgccagcgttgcgaagaccatcccgagcctgttgcgcctggccaacctgctcacctcacagaccgcatcgtctcccgctcgcttgtcgccctggaggtctcggagatcgcatagaagccgtcggtgccccagccgtgggttgggcccagtgcctgaccgtactattgcctagcgcccctcagggaagcggcccaagttccgggcagcatacgggagaacccagagcgaggcgcaggagacgcacacccgtttggatgaaccgcactgcctgggagcgtgccagccgcatgcagtctattagcattctccattggtctttgatgatgatgaccttactgtag

SEQ ID NO: 234525 - DNA, 2862 bp, synthetic construct
  misc_feature 1..2862: note = Description of Artificial Sequence: Synthetic coding sequence
  source 1..2862: mol_type = other DNA
atagtgcaaagggggcgagttcttccaccacctgcccctcttgatacaaccaatctagctggccgacgcacgctgcagggtcgggcaaaaatggccagcgtcccagtgtattgcctgtgtaggcttccctacgatgtgacacggttcatgattgaatgtgacatgtgccaggactggtttcacggaagttgcgtgggcgtggaagaggagaaagctgcagacatagacctgtaccattgtcccaattgcgaagttctgcatggtccatccatcatgaaaaagaggcgcggatcttcaaagggacatgacacacacaaggggaagccagttaaaactgggtcacccacctttgttcgagagctgagaagtcggactttcgatagtagcgatgaggtgattctaaagcctactggaaaccagcttacggtggagttcttggaggagaactccttttcagtgcctattctggtgctcaagaaggatggactaggcatgaccctgcctagcccatctttcaccgtgcgcgatgtggagcactacgtaggctctgacaaagagatcgacgtgatagatgttacccggcaagccgattgcaagatgaaactgggggactttgtgaaatactactacagtggaaaacgggaaaaagtcctaaacgtcatctctctggagttcagtgatacccgcctctctaatctcgtggaaacccccaaaatagttaggaagctgtcctgggtggagaacttatggcctgaagagtgtgtgttcgaaagacctaatgtccagaagtattgtctaatgtctgtgagagactcgtatactgatttccacattgactttggcggaacaagcgtgtggtatcatgttctaaaaggcgaaaaaattttttatctaatccggccaacaaacgcgaacctgacccttttcgaatgttggtcttctagctctaatcagaatgagatgtttttcggcgatcaagtggacaagtgctataaatgctccgtcaaacagggacagacactgtttatccccactggctggatccacgccgtgttaacaccagtggattgtctcgcctttggcggtaacttcttacatagcctcaatatagagatgcagctgaaggcctatgaaatcgaaaaacggcttagcactgccgacttatttagatttcctaactttgaaaccatttgctggtacgtgggaaaacatatactggatattttcaggggtttacgcgagaataggagacaccccgcatcttatttagtacacgggggtaaggcccttaacctggcgtttagagcgtggactcgcaaggaagctctacctgatcacgaagacgaaataccagaaacggtgaggacagtgcagttaatcaaggacctcgccagagagattagacttgtggaattcaacataaccggcgcttgccttaacgattctgatgatgacagccctgatctcgatttggacgggaacgagagtcctttggccctgctgatgtcaaacggctccactaagcgtgtaaaatctctctccaagtcccggcgaacaaagatcgctaaaaaagtcgataaggctcgtctgatggccgagcaggtaatggaggacgaattcgacctggattctgatgatgaactccagattgatgagaggctgggcaaagaaaaagccacccttatcatacgaccaaagttccctaggaaactgccgcgagctaagccctgctccgaccctaatcgagttagggagccaggcgaggttgagttcgatatagaagaggactacacaacggatgaagatatggttgagggcgtggaaggaaagctgggcaatggtagcggggctggtggtattcttgatcttctgaaagcctcccgccaggttggcggaccagactatgctgcccttactgaagcgccagcctctcccagtacacaggaggccatccaaggaatgctgtgcatggctaatttgcagtcatcttcttccagccccgcaacatcttccctgcaggcttggtggaccggtgggcaagatcgatcatctggatcatccagctcaggattggggaccgtatccaatagccctgcctcacagagaacacctggtaaacgaccaatcaaaaggcccgcatactggagaacagaatcagaagaggaggaggaaaacgcttccctggacgagcaggactctttaggtgcctgtttcaaggacgcggagtatatctatccttctctggaaagcgacgatgacgatccagcccttaagagccgtccaaagaagaaaaaaaacagcgacgacgcaccgtggtctcccaaggctagagtaacgcctacgttgcctaagcaagatcgccctgtgcgggaaggcaccagggtggcctctatcgaaacgggcttggccgcagcggcagcgaagctggcccagcaggagctgcagaaggcccagaagaaaaaatacatcaaaaagaaacctcttttaaaagaagtggagcagcccaggccccaggactctaacttatcactcaccgtccctgctcctaccgtcgcagccaccccccagttggtgacgtccagctcccctctcccacctccagagcctaaacaggaggccctttccggatcgctggccgatcatgagtataccgcacgcccaaatgctttcgggatggcccaggctaataggtccacaacacccatggctcccggtgtattcctcacccagaggcggcctagcgttggctcacagtctaaccaggcgggtcaggggaaaaggccaaagaaaggccttgcaacggctaaacaaaggctcggcaggatccttaagatccataggaatggaaaattactgctctag

SEQ ID NO: 234526 - DNA, 345 bp, synthetic construct
  misc_feature 1..345: note = Description of Artificial Sequence: Synthetic coding sequence
  source 1..345: mol_type = other DNA
atggcctccgtgcccgtttattgtctgtgccggctgccctatgatgtcactagattcatgattgaatgtgacatgtgtcaggactggtttcacgggtcttgcgtgggggtggaggaggaaaaagcggctgacattgacctgtaccactgtccaaattgtgaggtgctgcatggaccctcaattatgaaaaagaggaggggctcaagcaaaggacacgatacacacaaaggcaaacccgttaaaaccgggagtccaacctttgtaagagaactgaggtcacgaacatttgattcttcagacgaagtgattctgaaacccacagggaatcagctgaccgttgagtag

SEQ ID NO: 234527 - DNA, 381 bp, synthetic construct
  misc_feature 1..381: note = Description of Artificial Sequence: Synthetic coding sequence
  source 1..381: mol_type = other DNA
atggcctctgtgcccgtctactgcctttgtagactgccatacgatgtgacacgtttcatgatcgaatgtgacatgtgtcaagactggttccacggttcctgcgtgggcgtggaagaggagaaggcagctgatatcgatctgtatcactgtccgaattgcgaagtcctgcacgggccatctataatgaaaaaaagacggggatcaagcaaaggccacgatacgcataagggtaaacccgtgaagaccggatctcccacattcgtgcgggagcttaggagcagaacctttgattccagcgatgaggttattctaaagcctactggcaatcaactcacagtggaatttctcgaagagaactccttcagcgtacccatcttatag

SEQ ID NO: 234528 - DNA, 294 bp, synthetic construct
  misc_feature 1..294: note = Description of Artificial Sequence: Synthetic coding sequence
  source 1..294: mol_type = other DNA
atggcttctgtcccagtctactgcctctgccggttaccctacgacgtgacacgatttatgatagagtgtgacatgtgccaggactggttccatggttcttgcgtgggagtcgaggaagagaaggcggcagatatcgacctgtaccactgccccaactgtgaagttctgcacgggccttccatcatgaaaaagagacggggatctagcaaaggacacgacacacacaaaggaaagccagtgaagacaggttcccctacctttgtcagggagctaaggtctcgcacttttgactag

SEQ ID NO: 234529 - DNA, 348 bp, synthetic construct
  misc_feature 1..348: note = Description of Artificial Sequence: Synthetic coding sequence
  source 1..348: mol_type = other DNA
atggcatccgtcccggtgtattgcctgtgcaggctcccttatgatgtcactcgattcatgattgagtgtgacatgtgccaggactggtttcatgggtcatgtgtgggagtggaagaggagaaggccgctgatatcgacctgtaccattgccctaactgtgaagtgcttcatgggcctagtatcatgaagaagagaagaggctccagtaaggggcacgatacacacaaaggtaagccagtgaaaacgggctcccctacattcgtgcgggaactaaggagccggacgtttgattcttcagacgaggtgattttaaaacccactggaaaccagctcaccgtcgagttctag

SEQ ID NO: 234530 - DNA, 294 bp, synthetic construct
  misc_feature 1..294: note = Description of Artificial Sequence: Synthetic coding sequence
  source 1..294: mol_type = other DNA
atggcttctgtgccagtgtactgcctttgtcgactcccttacgacgtgactcggttcatgattgagtgcgacatgtgccaagattggttccacggatcatgcgtgggtgtggaagaagaaaaagctgccgacattgacctgtaccactgcccgaattgcgaggtactgcatggaccctccatcatgaaaaaacggcgtggatcttctaagggccatgacacccacaagggaaaacctgtgaagaccgggtcccccacattcgttagggagctgcgcagtcgaacgttcgactag

SEQ ID NO: 234531 - DNA, 447 bp, synthetic construct
  misc_feature 1..447: note = Description of Artificial Sequence: Synthetic coding sequence
  source 1..447: mol_type = other DNA
atgaaccggtcacgtgccattgtccagcgaggcagagtgctgcccccacccgcacctctggacactacgaacctggcaggccgtcgcactttacagggtagggcaaaaatggcatcagttcctgtatactgtctgtgccggctcccttatgacgtcacacggtttatgattgagtgcgatatgtgtcaggattggtttcacgggagctgcgtcggggtagaagaagagaaagcagccgacattgacctataccactgtcctaattgtgaggtcctgcacggaccatcgatcatgaagaagaggcgcggatcgtccaaagggcacgacacacataaagggaagccagtgaagactggctcgcctacattcgtgcgggagcttcgaagccggactttcgattcctctgacgaggtgatactgaagcctaccggcaaccaactgacatag

SEQ ID NO: 234532 - DNA, 2637 bp, synthetic construct
  misc_feature 1..2637: note = Description of Artificial Sequence: Synthetic coding sequence
  source 1..2637: mol_type = other DNA
atggcttccgtacccgtctactgcctgtgccggctgccttacgatgtgacccgcttcatgatcgagtgcgatatgtgtcaggattggtttcacggttcttgtgtgggcgttgaggaggagaaggcggctgacattgacctgtaccactgccctaactgcgaagtcctccatggccctagtattatgaaaaaaaggaggggaagttcaaaggggcacgacacccacaagggtaagcccgtcaaaacagggagtccaacctttgtacgcgaattacggtcccgcacctttgactcatccgatgaagtaatcctaaaacccacgggcaaccaacttactgtagaatttttagaggaaaactcttttagtgtcccaatcctggttctgaaaaaggatggcctcggcatgactctgccatcgccttccttcactgtgagagatgtagagcactacgtgggatcagacaaagagatcgatgtgatagacgttacaagacaggctgattgcaagatgaaacttggcgatttcgtaaagtactactactccggcaagcgggaaaaggtcctaaacgtgattagcttggagttttctgacactagactgagcaatcttgtggagacccctaaaattgttcggaagctgagttgggtcgaaaacctttggcctgaggagtgcgtgttcgagagacctaacgttcaaaagtactgcttaatgtcagtgagagattcatacactgactttcacatcgattttgggggaacctcagtgtggtatcacgtgctgaagggagagaagatattttacctgattaggccgacaaatgctaacctgaccctgttcgagtgctggagctccagttccaaccagaacgagatgttttttggtgaccaagtagataagtgctacaaatgttccgtcaagcaggggcagaccttgttcattcctaccggttggattcatgccgtgctgacccccgtggattgccttgcgttcggtggaaatttcctgcacagcctcaatattgagatgcagctgaaagcttacgaaatcgagaagagacttagcaccgccgacctgtttaggtttcccaatttcgagaccatatgctggtatgtagggaagcacatactggacatatttagggggctgcgcgagaacaggagacacccggcttcttatctcgtgcatggcggtaaggcactcaatctagcctttcgtgcttggacaaggaaagaagctctgcctgatcatgaggatgagattcctgagacggtgagaaccgttcagctgatcaaggacctcgccagagagataaggttggtcgaggatatcttccagcagaacgtaggcaaaacatctaacatattcgggctccaaagaatctttcccgctggaagtatcccactcactcggcctgcgcattccacgagcgtttctatgagcaggctctctctcccttcaaagaatggctctaagaaaaaggggttgaagccaaaggagctctttaaaaaagccgagcgcaaaggcaaggagtccagtgcccttgggcctgcaggtcagttgtcttacaacctgatggatacatacagtcaccaggcgttgaagacgggatcctttcaaaaggcaaaatttaacattacaggagcctgcctcaacgactccgacgatgacagtcccgatctggatttggacggcaatgagtcccctctcgccctgcttatgtccaatggctctacaaagcgggtcaagtctctttccaagtcgcgcaggactaagatagccaaaaaagtggacaaggccagactcatggcagagcaggtgatggaagacgaatttgacctcgattcagatgacgagctccagatcgacgaaagactggggaaggagaaagctaccttgatcattcgcccaaaattccccagaaagttgccaagggcgaagccctgtagcgatccaaaccgtgttcgagagcccggagaagtagagtttgacattgaggaagattatacgactgacgaggacatggtagaaggcgtggaggggtaccagacagctacccccgctccagcccagggcgcaagcgaggcccctgcctccccttccactcaggaagccattcagggaatgctttgtatggctaacctgcagagttcctctagtagtcccgctacctcatcactccaggcctggtggaccggaggtcaggaccgctcaagcggatcttccagctctggccttggcacagtcagtaattcgccggcatcacaaagaacacctggtaaacggccaattaaaagaccagcctactggagaacagagtctgaggaggaggaggagaacgccagcctcgatgagcaagatagcctgggtgcctgttttaaagatgcagaatatatctaccccagcctagagagtgacgacgacgatcctgcactgaaatctcgccctaagaagaaaaagaatagcgacgatgccccatggagcccaaaggcccgagtgaccccaacactaccgaagcaggaccggcctgtcagagaaggaacaagagttgcatctattgaaacgggcctcgctgctgctgctgctaagctcgcccagcaagttaaaaagatgaagctgagcctcacggattcaggttag

SEQ ID NO: 234533 - DNA, 417 bp, synthetic construct
  misc_feature 1..417: note = Description of Artificial Sequence: Synthetic coding sequence
  source 1..417: mol_type = other DNA
atgaagctacctatcttcatcgccgatgctttcacagcacgcgcatttcgcggaaaccccgcagccgtgtgtcttctcgagaatgagctcgatgaggacatgcaccagaaaattgccagggaaatgaacctgtccgagaccgcattcattcggaagttacatccgactgacaattttgctcagaagaacatgaactcaacactcaccttcgttactttgagcggagagctccgggctcgtagagctgaggacggaatagtcctcgacttacccctgtatccagcacatcctcaggacttccacgaagtcgaagacctcattaagactgcaataggaaacaccttagttcaggatatttgttacagccccgacacccagaagctgttggtcagattgtcagatgtctataatcggtag

SEQ ID NO: 234534 - DNA, 867 bp, synthetic construct
  misc_feature 1..867: note = Description of Artificial Sequence: Synthetic coding sequence
  source 1..867: mol_type = other DNA
atgaaattaccaatatttatcgccgacgcgttcaccgccagagccttccgtggaaatcccgcagccgtttgcctgctcgagaatgaactggatgaagatatgcatcagaaaatcgccagagaaatgaacttgtccgaaacggctttcattcggaaattgcaccctaccgacaatttcgcacagtcaagttgttttggcctgaggtggttcaccccagcctcagaggtccctctgtgtggccacgcgacgctggcaagcgccgcagtgctgttccacaaaattaaaaacatgaactctacactgacatttgtcactctctctggggagctgcgcgctcgacgtgcagaagacggcatagtgctggacctaccactataccccgctcacccacaggatttccacgaggtggaggatcttatcaagactgccatcggaaatactctcgtgcaagatatatgttattctccagatactcaaaaactgctagtccggctgtccgacgtatataatcgctccttcttggaaaatctgaaagttaatactgagaacctgttacaggtcgagaatacgggcaaggtgaagggactgatcctaacccttaagggggagccagggggacagactcaagcatttgatttttattctcggtacttcgccccatgggttggggtcgccgaagacccagtgaccggaagtgcgcacgccgttctcagtagttactggtctcaacatcttgggaaaaaggaaatgcatgccttccaatgcagccaccgaggcggtgagctcggaatcagtctgagacctgatggcagagtggacatcagggggggtgccgcagttgtcttggagggtaccctcactgcctag

SEQ ID NO: 234535 - DNA, 768 bp, synthetic construct
  misc_feature 1..768: note = Description of Artificial Sequence: Synthetic coding sequence
  source 1..768: mol_type = other DNA
atgcaccagaagattgccagggagatgaatctgagcgaaaccgctttcatcaggaagctccacccaacagacaacttcgcacagtcttcttgtttcggactccgttggttcactcccgcatcggaagtacctctatgtgggcacgcaacactggcatctgcagccgttctgtttcacaaaataaaaaatatgaacagcacattaacattcgtcactctcagcggggagcttagggcaaggcgcgcagaggacgggattgtgttggacctacccctttacccagcacatcctcaggatttccacgaagtggaggacttaatcaagacagccataggcaacacactagtacaggatatctgttacagccctgatacacagaaactgctggtcagattgagtgatgtgtataacagatcgtttttagaaaatttaaaggtgaataccgagaatcttctgcaggtagaaaacacgggtaaagtcaaaggcctgatcctcaccttaaaaggcgaacccggaggtcagacccaggcattcgacttttactctagatacttcgcaccttgggtcggtgtggctgaagaccctgtcaccggctctgcccacgctgtgctctcatcctattggtctcagcaccttggaaaaaaagagatgcatgcctttcagtgcagccatagaggtggagagctgggaatctcgctgaggccagacggccgtgtggacatccggggaggtgccgctgttgtcctggaaggcacactcaccgcctag

SEQ ID NO: 234536 - DNA, 867 bp, synthetic construct
  misc_feature 1..867: note = Description of Artificial Sequence: Synthetic coding sequence
  source 1..867: mol_type = other DNA
atgaaactgccaatcttcattgctgacgccttcaccgcacgagcattccgtgggaatccagcagcagtttgcctgctggaaaacgaactggatgaagacatgcatcagaaaattgccagagagatgaatctttcagagacggcgttcatccgaaaattgcatcccaccgataacttcgcccagagtagctgctttggacttcgctggttcactccagcttccgaagtccctctgtgcggacacgcgacactggcctcagctgccgtactgtttcataagatcaagaacatgaatagtaccctgacctttgtgacactgagtggggaactgcgcgctaggagagcggaagacggcatcgtcttagacttacccctttacccggctcatccacaggacttccatgaagtggaagacctgattaaaacagcaattggaaacacattggtgcaggacatctgttactctccagacacccagaagctcctggtacgcctctccgatgtctacaaccgctcgttcctggagaatttgaaagtgaatacagaaaatttactgcaggttgaaaataccgggaaggtgaagggtctaatcctaacactaaagggtgagccgggtgggcagacacaggcattcgatttctatagcaggtactttgcaccttgggtgggagttgcggaggatcctgtcactggcagcgcccacgccgtcctcagctcttattggagccagcacctagggaagaaggaaatgcacgccttccagtgcagccaccgaggcggtgagcttgggatcagtttgagacccgatgggagagttgatatccggggtggtgccgcagttgttctggaggggactctgaccgcatag

SEQ ID NO: 234537 - DNA, 843 bp, synthetic construct
  misc_feature 1..843: note = Description of Artificial Sequence: Synthetic coding sequence
  source 1..843: mol_type = other DNA
atgaagctgcccatcttcatagcagacgccttcaccgccagagcctttaggggcaatcctgctgccgtttgccttctggaaaacgaattggatgaagacatgcatcagaaaattgctcgggagatgaatctctccgaaactgctttcatcaggaagctgcaccccacagataactttgcccagagttcatgtttcggactgcgatggttcactccggctagtgaggtgccactatgtggacacgccacactcgcatcagccgcagttctgtttcacaagataaagaatatgaattccacgcttaccttcgtgacactcagcggggagctcagagccagacgcgcagaggacggcattgtgctcgatttgcccctctaccctgcccatccccaagattttcacgaagtggaggacctgatcaagactgccatcggtaacacgctcgttcaggacatctgctactctcctgatacccaaaaactactggtccggctgagtgatgtgtacaataggagctttctggaaaacctcaaggtcaacaccgagaatctccttcaagtggaaaacaccggcaaggttaagggactgattttgacactcaagggagagccgggagggcagacacaagcgtttgatttttacagtcggtacttcgccccttgggttggagtggctgaagatccagtgacggggtcagctcatgccgtgctgtcaagttactggagccagcacttgggcaaaaaagaaatgcatggcaggaccgctttgtaccaatttctcttctacctgccaaactcaaagctggtctttctgctgatatgcactatacctctgaagatgtag

SEQ ID NO: 234538 - DNA, 1356 bp, synthetic construct
  misc_feature 1..1356: note = Description of Artificial Sequence: Synthetic coding sequence
  source 1..1356: mol_type = other DNA
atggtcggctcggcccttcgaagaggcgcacacgcatatgtctacctggttagtaaggccagccacatatccaggggccaccaacaccaggcctggggttcccgcccaccagctgccgagtgtgctactcagcgggctcctggcagcgtggttgagctgttgggcaagtcctatcctcaagacgaccatagcaacctaacaaggaaagtcctgacccgcgtggggaggaacctgcacaaccagcagcaccatcccttgtggcttataaaggagcgcgtaaaggagcacttttacaaacagtatgtcggccgttttggcacgccccttttttcggtttacgacaatttgagcccagtggtcaccacatggcagaactttgactctctgcttatccctgctgaccaccctagtcggaagaagggggataactattacctcaataggacccatatgcttcgggctcatacaagtgcccaccagtgggacctcctccatgctgggctggacgcctttctggtagtgggggacgtctatcggcgagatcaaatcgatagccagcattacccaatcttccatcaactcgaggcagtgcggttgttttcaaagcatgaattgttcgccggaatcaaggatggcgaaagcctacagttgtttgagcagtcctcaagaagtgcccataaacaggagacacacacgatggaagccgtgaaactcgttgagtttgacttgaaacagaccttaacccggttgatggcccaccttttcggcgacgaacttgagataagatgggttgactgctatttccctttcacccatccgtcgtttgagatggagattaacttccacggcgagtggctggaagtgctcggctgcggagtaatggagcagcaacttgtgaattcagcaggagctcaggatcgcattggctgggcattcgggctgggcctggagcgcctggcaatgatcctgtacgatataccggatattcggctcttttggtgtgaagatgagcgcttcctgaaacagttctgcgtgagtaacatcaatcaaaaggtgaagttccagcctctgtcaaagtaccccgctgtaattaatgatatcagtttttggctgccatccgagaattacgctgagaacgatttctatgatctcgtgcgcaccataggcggagatctggtcgaaaaagtagatctaatcgacaaatttgttcacccgaagactcataaaacaagtcattgttataggattacctataggcatatggaacggacactgagccagcgggaagtgcgtcatatccaccaagcactacaggaggcagccgttcagctgctgggcgtggaagggaggttctag

SEQ ID NO: 234539 - DNA, 1356 bp, synthetic construct
  misc_feature 1..1356: note = Description of Artificial Sequence: Synthetic coding sequence
  source 1..1356: mol_type = other DNA
atggtcggctcagccctccggagaggcgcacacgcctacgtttacttggtgagcaaagcatcccacatcagccgcggtcaccaacaccaggcttggggctcccgacccccagctgccgaatgtgccacacagagagcccctggcagcgtcgtcgagctcctgggaaaaagctatccccaggacgatcacagtaatcttacgcgcaaagtccttacccgggtcggccgaaatctccataaccaacagcaccaccccctgtggctgattaaggagcgtgttaaagaacacttctataagcagtatgttgggcgatttggcaccccacttttcagtgtttacgataacctgagtcctgtggtcacgacctggcagaactttgatagcttgctgatccctgccgaccacccttctcggaagaagggcgataattactacctgaacaggacacatatgctgcgggcacacacatcagcacaccagtgggacctgcttcatgcagggcttgacgcctttctggtcgttggcgacgtctacagaagggaccagatcgatagccagcactatcctatctttcaccagctagaggccgtaaggctattctcaaagcacgagctctttgcaggcattaaggacggggagtccctacaactattcgaacagagctcaagatcagcccataagcaggagactcatactatggaggcagtgaagttggtggagttcgacctgaagcagactttaacacgacttatggcgcacctgttcggtgacgagcttgaaataaggtgggtggactgttatttcccatttactcatccctcattcgagatggagattaacttccacggggagtggctggaggtgctgggatgcggggtgatggaacaacagctggtgaacagtgccggagcacaggatcgaatcggctgggcctttgggctgggtctggaacgattggccatgatattgtacgatatccccgatattagactcttttggtgcgaggatgagagattcctaaagcagttttgcgtgtccaacatcaaccaaaaggtcaaattccaaccgctgagcaagtaccccgcagtgataaacgacattagtttctggctcccctcggaaaattatgctgagaatgacttctacgacctcgtccgcactattggaggggatctcgtcgagaaggtggatctcatcgataaatttgtgcatcctaagactcacaaaacctcacattgctaccggattacctatagacacatggagaggacactgtcacagcgcgaagtccgacacattcaccaggccctgcaggaggctgcagtgcaactattgggggtcgagggacggttttag

SEQ ID NO: 234540 - DNA, 468 bp, synthetic construct
  misc_feature 1..468: note = Description of Artificial Sequence: Synthetic coding sequence
  source 1..468: mol_type = other DNA
atgctgagggctcacacatctgctcaccagtgggacctgttgcacgcgggactggacgcattcctggtcgtgggggatgtgtaccggcgtgaccagatagactcccagcattatccaatatttcaccagctggaagccgtccgcctctttagtaagcacgagctgtttgctgggattaaagacggcgaatcactacagctgtttgaacaatctagcagatcagcacacaagcaagagactcacacaatggaagctgtgaagctggtcgagttcgatctgaaacagacactgaccaggctcatggcgcacctgtttggagacgagctggagattcgctgggtggattgctatttcccgtttactcacccgtcattcgagatggaaattaatttccacggtgaatggttagaggtgctgggatgcggagtaatggaacagcagttagttaactccggaggtgcaacttag

SEQ ID NO: 234541 - DNA, 306 bp, synthetic construct
  misc_feature 1..306: note = Description of Artificial Sequence: Synthetic coding sequence
  source 1..306: mol_type = other DNA
ctctttgcaggaatcaaagatggagagtctctccaacttttcgagcagagcagtaggtctgctcataagcaggagacccatacgatggaggccgtgaaactggtggaatttgatttaaagcaaacattgaccaggctgatggcccacttgtttggcgatgaacttgagatcagatgggttgattgctacttcccctttactcatcctagttttgaaatggaaataaattttcatggcgaatggctggaggtgctaggttgtggcgtgatggaacagcagctcgtgaactccggcggtgcaacctag

SEQ ID NO: 234542 - DNA, 849 bp, synthetic construct
  misc_feature 1..849: note = Description of Artificial Sequence: Synthetic coding sequence
  source 1..849: mol_type = other DNA
atgtccggggctgaccggagcccaaatgctggggcagcccctgacagtgctcctggccaggctgctgttgccagcgcgtatcagcggttcgagccccgagcttacctgcggaataactacgcgccacccaggggtgatctatgcaaccccaacggagtgggcccttggaaactgcgttgtctggcccaaactttcgctaccggcgaagtgtctggaaggactttaatcgacatcggaagcgggcctaccgtgtaccagctgctcagcgcctgttcacactttgaagacattacaatgaccgactttctcgaggtgaatagacaagaacttggccgatggctgcaggaggaacctggtgcttttaattggtccatgtactcccaacatgcatgcttgattgagggaaagggtgagtgctggcaggacaaggaacgccaactgagggcaagggtgaagagggtcctgcctatcgatgtccatcagccacagccactgggagccggatcccccgctcccctgcctgcagacgccctcgtaagcgcattttgtcttgaagccgtgagccctgacctcgctagctttcagagggcgttggaccatatcaccaccctgttgaggccagggggtcacctcctactcattggagctttggaggagtcctggtacttggccggagaagccaggttgactgtggtccctgtgagtgaggaagaagtccgtgaagccctcgtaagaagcgggtacaaagtgagggatctcagaacatacatcatgccagctcatctgcagacaggcgtggacgacgtaaagggggtttttttcgcctgggcacagaaagtcgggctctag

SEQ ID NO: 234543 - DNA, 555 bp, synthetic construct
  misc_feature 1..555: note = Description of Artificial Sequence: Synthetic coding sequence
  source 1..555: mol_type = other DNA
atgacagacttcctggaagtcaatagacaggagctcggacggtggctgcaagaagaacctggcgcattcaattggagcatgtacagccagcatgcctgcctgatagaagggaagggtgagtgctggcaggacaaggagcgccagcttagggcgagagtgaagagggtattacccatcgacgtccatcagccgcagccccttggcgcaggcagccctgctcccctaccagctgatgccttggtatccgcattctgtctggaagcagtcagtcccgatcttgcctcctttcagagagccctggaccacataacgacactgctgcgccctggcggtcacctgctgttaattggagctctggaggagagttggtacctggcaggggaggccaggttaactgtggtccccgtgtcagaagaggaagtcagagaggctcttgtgcggagcggctacaaggtgcgtgatctaagaacttacattatgcctgcccacctgcagacaggcgtggatgacgtcaagggcgtatttttcgcctgggctcagaaggtgggactctag

SEQ ID NO: 234544 - DNA, 741 bp, synthetic construct
  misc_feature 1..741: note = Description of Artificial Sequence: Synthetic coding sequence
  source 1..741: mol_type = other DNA
atggaagaagccaagtcccaatctttagaggaggattttgaaggtcaggcaactcatacaggccctaagggggtcatcaacgactggagaaagttcaagctggagtcccaggactcagattccattcctcccagcaagaaggagatcctgaggcaaatgtcatcaccccagtcccggaacggtaaagactcaaaggaacgtgtttctcggaaaatgagtatccaggagtacgaacttatccataaggaaaaagaagacgaaaactgtctgcggaaatatagaagacagtgtatgcaggatatgcatcagaagctctctttcgggccacgctacgggtttgtgtatgaactggagacagggaaacaattcttggagaccattgagaaggaattgaagatcactactatagtggtccacatctacgaagatggtattaagggctgcgacgcactgaattcaagtctcacctgcctggcagctgaatacccaatagtcaagttttgtaaaatcaaagcttcaaacacaggtgcgggagatcgcttctccttggatgtgctacctactttgttgatttataaggggggagagctcatcagtaactttatcagcgtggcagagcagttcgccgaggagttttttgccggtgacgtggagtcctttctcaacgagtatggcttgctgccggagcgagaggtgcatgtgttggagcatactaaaatagaagaagaagatgtggagtag

SEQ ID NO: 234545 - DNA, 741 bp, synthetic construct
  misc_feature 1..741: note = Description of Artificial Sequence: Synthetic coding sequence
  source 1..741: mol_type = other DNA
atggaggaggccaaaagtcagtccctggaggaagacttcgaaggccaggcgacacacaccggtccgaaaggggtgatcaacgattggcgcaagtttaagctggaatcccaggactccgattccattcccccatctaaaaaagaaatcctgaggcagatgtctagcccacagagccgaaacggcaaagattctaaggagcgggtctcaaggaagatgtccatccaagaatacgaactcattcacaaagaaaaggaggatgaaaactgtctgcggaaatatcgtagacagtgtatgcaagacatgcaccagaaattatccttcggccctaggtacggtttcgtgtacgagctggagaccggaaaacaatttctggagactattgagaaagagctgaaaattacaacaatcgttgtacatatttacgaggacgggattaaaggctgcgatgcattaaattcaagcctaacctgtctggccgctgaatacccaatcgtgaaattctgtaagatcaaggctagtaacacaggagccggagataggttttccctagatgttttgccgactctcctgatttacaaaggcggtgagctgatctcaaattttatctcggtggccgaacaattcgctgaggagttcttcgcaggtgacgttgagagcttcctaaacgaatatggcctgctcccggaaagggaagtgcacgtgttagagcacactaagatagaggaggaggacgttgagtag

SEQ ID NO: 234546 - DNA, 585 bp, synthetic construct
  misc_feature 1..585: note = Description of Artificial Sequence: Synthetic coding sequence
  source 1..585: mol_type = other DNA
atgagcagcccacagtcgcggaatggcaaagactctaaagagcgagtgagtcgtaagatgtctatacaagagtatgaattaatacacaaagagaaagaggatgaaaattgtctgcggaagtacaggcgccagtgcatgcaagacatgcaccaaaagctgtccttcggcccacgttacggctttgtttatgagctggaaactggaaaacagtttctggagaccattgaaaaggagctgaagattacaaccatagttgtccatatctatgaagatggtataaagggatgcgacgcactaaacagctctctgacctgtctggctgccgagtatcctattgtgaaattctgcaaaatcaaagcttccaataccggagccggagatcgattctccctggacgtgctgcctacactgctcatatacaagggaggagagctaatttccaatttcatctctgtggcggagcaatttgctgaagagtttttcgcaggggacgttgaatcttttctgaacgagtatggactgctgccggagagggaggtccacgtgttggaacataccaaaattgaggaggaggatgtagaatag

SEQ ID NO: 234547 - DNA, 585 bp, synthetic construct
  misc_feature 1..585: note = Description of Artificial Sequence: Synthetic coding sequence
  source 1..585: mol_type = other DNA
atgagctccccccagtcacgcaacgggaaggattcaaaagaacgggtatctcgcaagatgagcatccaagaatatgagttaattcataaagagaaagaagacgaaaattgcctgcgtaaatatcggaggcagtgcatgcaggacatgcaccagaagctcagcttcggacctcgctacggatttgtgtacgaactggagactggaaaacagttccttgagacaatcgagaaagagctgaagattaccacaatagtggtccacatttatgaggatgggatcaaaggctgcgacgcgttaaatagctcactgacctgcttagctgctgaatatcccatcgtaaagttctgcaagatcaaagcctcaaatactggtgccggagataggttttccctggatgtactccctacgctcctaatttacaaaggcggagaactgatatccaattttatttcggtcgccgagcagtttgctgaagaattttttgcaggtgacgtcgaaagcttcttgaatgagtacggtctcctcccggaaagagaggtacatgttctggagcatacaaagatcgaagaggaagacgtagagtag

SEQ ID NO: 234548 - DNA, 906 bp, synthetic construct
  misc_feature 1..906: note = Description of Artificial Sequence: Synthetic coding sequence
  source 1..906: mol_type = other DNA
atgactactctggacgacaagttactaggagaaaaattacagtactactactcttcaagcgaggatgaagactcagaccacgaggacaaagaccgaggccgatgtgcacctgcctcctctagtgtacccgctgaagctgaactggccggagagggcatttctgtgaacaccggcccaaaaggcgtgataaatgactggagacgctttaagcagcttgaaacagaacagagagaggagcaatgcagagagatggagcggcttattaagaagctttccatgacctgccgatctcacctggatgaggaggaggaacaacagaaacaaaaagacctgcaggagaagattagtggcaagatgacacttaaggaatttgctattatgaacgaggaccaagatgacgaagaattcctgcagcaatatcggaagcagcgaatggaggagatgcggcagcaactgcacaagggccctcagtttaagcaggtctttgaaatttcatctggtgaaggtttccttgatatgattgacaaagaacaaaagtcaatagtgatcatggtgcacatctatgaggacggaatacctgggacagaagccatgaacgggtgcatgatctgtctggccgcagagtatcccgctgtcaagttttgtaaggtgaaaagttcagtgattggggcaagctcacagttcacccgcaacgctttgcccgctctcctgatctataagggcggagagctcatcggcaacttcgtacgggtcaccgatcagcttggagacgacttcttcgccgtggacttggaagcgttcttacaggagttcgggttgttgcctgagaaagaggtgctcgtcctcacttccgttcggaactccgcaacttgccattctgaagacagtgaccttgagatagattag

SEQ ID NO: 234549 - DNA, 330 bp, synthetic construct
  misc_feature 1..330: note = Description of Artificial Sequence: Synthetic coding sequence
  source 1..330: mol_type = other DNA
taattacagtactattatagttctagcgaggatgaggactcagaccatgaggacaaggatcgcggtcgttgtgctcctgctagctcctctgtgcccgcagaggcagaattggcgggtgagggaatctccgtcaatacaggtcccaagggcgtcataaatgactggagaaggtttaaacaactggaaactgagcaacgggaagaacagtgccgcgagatggagagactaattaagaagctgtctatgacttgccgcagtcatctcgatgaggaagaagagcagcagaaacagaaggacctgcaagaaaagatctccggtaaggagcgctag

SEQ ID NO: 234550 - DNA, 276 bp, synthetic construct
  misc_feature 1..276: note = Description of Artificial Sequence: Synthetic coding sequence
  source 1..276: mol_type = other DNA
tagtgcgcacctgcttctagctctgttccagccgaagccgaactagcaggtgagggtattagcgttaatactggtcctaaaggggtaatcaacgactggaggaggtttaagcagttggagacagaacagcgcgaggagcagtgtagagaaatggagcggcttataaagaaactgagtatgacgtgtagatcgcatttggacgaggaagaagaacagcagaaacagaaagacctgcaggagaagatctcaggcaagaaaagttgggcgatactgtag

SEQ ID NO: 234551 - DNA, 726 bp, synthetic construct
  misc_feature 1..726: note = Description of Artificial Sequence: Synthetic coding sequence
  source 1..726: mol_type = other DNA
atgcaggaccccaacgaggacacagagtggaacgacatcctccgagatttcggcatcctgcctcctaaggaggagtcaaaagacgagattgaagagatggttttgcgcctgcaaaaagaggctatggtgaaaccctttgagaagatgaccctggctcagttgaaggaagcggaagatgagttcgatgaggaggacatgcaggctgtagaaacctacagaaagaagaggctccaggagtggaaagccctaaagaagaaacaaaaatttggtgagcttcgcgaaattagcggtaatcagtacgtgaatgaggttacaaatgctgaggaggatgtttgggtgattatacatctgtacaggagctcaattcccatgtgcttgttagtcaaccagcatctcagtctactcgcccgaaagttcccggaaactaagtttgttaaagccatcgtgaactcctgtatccagcactaccacgataattgcctgccgactatattcgtgtacaaaaacggccagattgaggctaagtttatagggataatagagtgtgggggtattaacctgaagctggaagagctggaatggaaactggctgaggtgggcgctatccaaactgacttggaggagaacccgagaaaagatatggttgatatgatggtttccagcattcgcaataccagcattcacgacgactccgatagctctaacagcgacaacgatacaaagtag

SEQ ID NO: 234552 - DNA, 720 bp, synthetic construct
  misc_feature 1..720: note = Description of Artificial Sequence: Synthetic coding sequence
  source 1..720: mol_type = other DNA
atgcaagatcctaatgccgacacagaatggaatgatatactgcgaaagaagggcatactgcctccaaaggaatccttgaaagagctcgaggaagaagccgaggaggagcagcgtattcttcagcagtctgtggtgaagacttacgaagacatgactctggaggaacttgaagaccacgaggacgaattcaatgaggaagacgagagggctatcgagatgtacagacggaggcggctggccgaatggaaggctacgaaactgaagaataaatttggggaagtattagagatcagcggaaaagactacgtgcaggaagtcaccaaggccggagagggcctgtgggttattttacatctttataagcaaggcatacccctgtgcgccctcataaatcagcatctgtctgggctggcgagaaagtttccggacgtgaagtttataaaagccattagcaccacatgcataccaaattacccagataggaatctccccacaatatttgtgtatctcgagggcgacattaaagcacagtttattgggccactggtgttcgggggtatgaacttgactcgagacgagctggagtggaaactctccgaatctggcgctatcatgaccgatctagaagaaaatccgaagaagcccattgaggacgtgttattaagctctgtgaggcgttctgtgctgatgaagcgtgactcagatagcgagggtgattag

SEQ ID NO: 234553 - DNA, 1104 bp, synthetic construct
  misc_feature 1..1104: note = Description of Artificial Sequence: Synthetic coding sequence
  source 1..1104: mol_type = other DNA
atggacgcccagtgctctgccaaagtgaatgccaggaagcgtcgcaaggaggcacctggccctaatggcgcaaccgaagaggacggcgtcccttccaaggttcagagatgcgcagttggactgagacagcctgcaccgttctctgacgagatcgaggttgacttcagcaaaccgtacgtaagagtgaccatggaggaggcctctcgcggtaccccctgcgagcggccagttagggtgtatgctgacgggatcttcgatctattccacagtggccatgccagagcccttatgcaagccaaaaatctattccccaatacgtacttgatcgtgggagtgtgcagtgacgagttaacccataactttaaagggtttaccgtcatgaacgaaaacgagaggtatgatgcagtacagcactgtcgctatgtggacgaggtggttcgtaacgccccatggacacttacccccgaatttctcgccgagcatcgaatcgatttcgtggcacatgatgatattccctatagctctgctggctccgacgatgtctataaacatataaaggaagccggaatgtttgctccaacccagcgcactgagggaatttctacatctgatattatcactaggatagtgcgcgactacgacgtgtacgccaggcggaatctccagcggggatataccgctaaagagttgaatgtatcgttcattaacgagaaaaagtaccacctgcaggaaagggtggacaaagtaaagaaaaaagttaaagacgtggaggaaaaatcaaaggagtttgtgcagaaggtcgaggagaagtcaattgacctcattcagaagtgggaagaaaagtccagggaattcattggctcgttcctggagatgtttggtcctgaaggtgcgctgaagcatatgctcaaggaggggaagggaaggatgctccaggctattagccccaagcaatcaccctccagtagtcctacacgtgagcggagtcctagcccatccttccggtggccattctcgggcaagacctcccctccgtgttctccggcaaacctgtctcggcataaagcagctgcctatgatatttcagaggatgaggaagactag

SEQ ID NO: 234554 - DNA, 882 bp, synthetic construct
  misc_feature 1..882: note = Description of Artificial Sequence: Synthetic coding sequence
  source 1..882: mol_type = other DNA
atggacgctcaatgcagcgccaaagtgaatgcaaggaagaggaggaaggaggcacctggccctaacggagcaaccgaagaagatggagtgccgtcaaaggtgcagaggtgcgccgtcggcctacgtcagccggctcccttttccgacgaaatcgaggtggacttctctaaaccgtatgtgcgggtcactatggaggaggcgtctcgtggcactccgtgtgagcggccagtgcgcgtctacgctgacgggatctttgatctgttccatagcggacatgctagggcactcatgcaagccaagaacctctttccaaacacttacctgatagtgggagtgtgtagcgatgagctgactcataacttcaagggcttcaccgtgatgaatgaaaacgagcgttacgatgccgtccaacactgtcgatatgttgatgaggtcgtgagaaatgctccttggactctgacgccagagttcctggcagaacaccgaattgacttcgtggcccatgatgatatcccctactcttccgcgggatcagatgacgtgtacaaacatatcaaggaggctggaatgttcgccccaactcagagaactgagggaatctccacatcagatattattacaaggattgttcgggactatgacgtctatgcaaggcgtaatcttcagcggggatataccgctaaggaactgaacgtctcattcattaatgagaaaaaataccatctgcaggagcgtgtcgacaaggtgaagaaaaaagttaaggatgtggaagaaaaatcgaaggagtttgtgcagaaggttgaagaaaagtccatcgatctgatacagaagtgggaggagaagtcaagagagttcatcggatcatttctggagatgttttag

SEQ ID NO: 234555 - DNA, 402 bp, synthetic construct
  misc_feature 1..402: note = Description of Artificial Sequence: Synthetic coding sequence
  source 1..402: mol_type = other DNA
atggatgcacagtgctctgctaaggttaatgccaggaagagaaggaaggaggcaccaggccctaatggggctaccgaagaagatggggttccctccaaggttcagaggtgtgcggtcggcctccgccagcccgcacctttctcggatgaaatagaggttgacttcagtaagccctacgtgagggtgacaatggaagaggcctctagaggcaccccgtgtgaacgcccagttcgcgtgtacgctgacggtatcttcgatctgttccactcagggcatgctcgagccttgatgcaggccaagaacctgtttccaaacacatatctgattgtgggcgtgtgttctgatgagctcacccacaactttaaaggatttacggtcatgaatgagaatgagagatactag

SEQ ID NO: 234556 - DNA, 987 bp, synthetic construct
  misc_feature 1..987: note = Description of Artificial Sequence: Synthetic coding sequence
  source 1..987: mol_type = other DNA
atggatgctcagtgtagcgccaaagtgaatgcgagaaagcggaggaaggaggcgcctggcccaaatggcgcaactgaagaggcttctagaggtaccccctgtgaacgccctgtgagagtgtacgccgacgggatcttcgatttgttccattccggccacgccagagccctgatgcaagctaagaacttgttccccaatacatacctcatcgttggggtgtgttctgatgaactaacacacaattttaaagggttcactgtgatgaacgagaacgagcgatacgacgcggtccagcactgccgatatgtggatgaagtcgttaggaacgccccatggaccctgacacccgagtttctggccgagcatcgcattgattttgtcgcccacgatgatatcccttactcctccgccggatctgacgacgtgtacaagcacatcaaagaagccggtatgtttgcacccacacagcggacagaaggcatcagcacaagtgatattatcacccggatcgttagggattacgatgtgtacgcgagaaggaatctccagcgaggatacacggccaaggagctgaacgtgtctttcattaatgaaaagaagtaccatctccaagaaagagtggacaaagttaaaaaaaaagtaaaagacgtcgaagagaagtccaaggagttcgtgcagaaagtcgaggaaaagagtattgacctcatacaaaagtgggaagagaagagcagagagtttattggctcctttctggagatgttcggaccagagggtgccttaaagcacatgcttaaggagggcaagggaaggatgctgcaggccatctctccgaagcagtctccatcgtctagcccgactagagaacgctctcccagcccgagcttccggtggcctttttctggaaagacttccccaccttgttcaccagccaacttgtcacgccataaggccgcagcttatgatatctctgaggatgaggaagactag

SEQ ID NO: 234557 - DNA, 1104 bp, synthetic construct
  misc_feature 1..1104: note = Description of Artificial Sequence: Synthetic coding sequence
  source 1..1104: mol_type = other DNA
atggacgcccagtgcagcgccaaggtcaatgcacggaagcgacggaaggaggctcccggaccgaacggcgcaaccgaagaagatggcgtgccctcaaaggtgcaacggtgcgctgtgggtctgcgtcaacccgcacctttctcggatgaaatcgaagtggatttcagcaagccttatgtgagagtaacaatggaggaggcgagtcgtggcaccccttgcgagcgacccgttcgcgtgtatgctgatggcatcttcgacctctttcactccggtcacgccagggcattgatgcaggctaagaacctatttccgaacacctaccttatcgttggggtgtgttcggatgagttgactcacaatttcaagggcttcacggtgatgaacgaaaacgaacgatacgacgccgtgcagcattgtagatatgtggacgaagtggtgaggaatgccccatggacactcacaccagagttcctcgccgaacatcggatagactttgtggcccacgacgacataccctattcctctgcaggctctgacgatgtgtataaacacatcaaggaggctggaatgtttgctccaacacagaggaccgagggcatcagtaccagtgatatcattacacgcatcgttagagactatgatgtctatgcgaggagaaatctgcaacgaggttacacagccaaggagttgaacgttagctttataaatgaaaaaaaatatcacctccaggaaagggtagacaaagttaaaaagaaggtgaaggacgtggaagaaaaatccaaagagttcgtgcaaaaggtggaagaaaagagtattgacctgatccaaaagtgggaagagaaatctagggaattcattggatccttcctggaaatgtttgggccagaaggcgcactgaagcatatgctcaaggagggaaagggacggatgctgcaggcgatctctccgaaacaatccccctctagcagccccaccagggaaagatctccatctccaagcttccggtggccattcagcggtaaaacgagtcctccctgtagtcccgctaacctgtctcgccacaaagccgcagcttacgacatcagcgaggacgaggaggattag

SEQ ID NO: 234558 - DNA, 348 bp, synthetic construct
  misc_feature 1..348: note = Description of Artificial Sequence: Synthetic coding sequence
  source 1..348: mol_type = other DNA
atggacgctcaatgcagtgccaaggtgaatgctaggaaaagaaggaaagaggcaccgggacctaacggcgctacagaggaggacggagttccaagcaaggtgcagaggtgtgctgtgggcctgcgacagccagcacctttcagtgacgaaattgaagtagacttctctaagccctatgtcagagtcacaatggaggaagcaagcaggggtacaccatgcgagaggcccgtgagagtctatgcagatggaatcttcgatctatttcactctggacatgccagggcgcttatgcaggctaaaaatctctttcctaatacctacttaatcgtaggtgtgtgcagcgactag

SEQ ID NO: 234559 - DNA, 2250 bp, synthetic construct
  misc_feature 1..2250: note = Description of Artificial Sequence: Synthetic coding sequence
  source 1..2250: mol_type = other DNA
atggaggccgaaacggggtccagcgtggagaccggaaagaaggctaatcgtggaactcggattgcgctggtggttttcgtgggcggaaccctggttctaggcaccattcttttcctggtgagtcaggggttattgagtttacaggccaagcaggaatactgtctgaaaccagagtgtatcgaagcagccgctgccatactgagtaaagtgaatctatcagtggatccctgtgataatttctttaggtttgcgtgcgacggctggatctccaacaaccccatacccgaagatatgccatcctacggcgtgtacccatggttgaggcacaacgttgatttaaaattgaaagagctcctggagaaaagtattagtcggcgacgtgataccgaagccatccagaaggccaagatactctattcaagctgcatgaacgagaaagcaattgaaaaggccgatgccaaaccactgctgcatatcctgcggcattcccccttcagatggcccgtgctcgagtctaatatcggacccgagggcgtgtggtccgaaagaaagttttctttgctccaaacactagccaccttccgcggacagtattccaacagcgtattcataagactgtacgtgagccccgatgataaagcttctaacgagcatatccttaagctggatcaggccacgctttctctcgctgtgagagaagattacctggataactctaccgaggccaaaagttatagggacgctctctataaatttatggtggacactgccgtgcttttgggtgcaaattcaagcagggcggagcatgacatgaaaagcgtgctgagactggaaattaaaatcgccgaaattatgatcccccacgaaaatcgtacttctgaagcaatgtacaacaagatgaatatctccgagctctcggccatgattcctcagttcgactggctgggttatatcaaaaaggtgatcgatacccgcctataccctcatctaaaggacatctctccatctgagaacgtggtggtgagggtcccccagtactttaaagacttgttccgcatactgggtagcgaacggaagaagactattgcgaattatctcgtttggcgcatggtgtacagcaggatacctaatctgtcaagaaggttccaataccggtggttagagttttcccgagtgattcagggcaccacgactttgctgccccagtgggacaagtgcgtcaatttcattgagtcagcattgccgtatgtggtgggaaagatgtttgtagacgtttattttcaggaggacaagaaagagatgatggaggaacttgtggaaggagtcaggtgggccttcattgatatgttggagaaggagaatgagtggatggatgcgggaacaaaaaggaaggccaaagaaaaggccagagctgtcctggctaaagttggatatccagaattcattatgaacgacacccatgtgaatgaggatctgaaagccatcaagtttagcgaggcagattactttggtaatgtgctgcagacccgaaagtatttggcccagtctgactttttctggctgcggaaggctgttcccaaaaccgagtggttcacaaatccgactaccgtgaatgccttttactcagcttcaactaaccagattaggtttcccgctggggaactacaaaaacccttcttttgggggacggagtaccctcgctcactgagttatggcgcaatcggcgtaatcgtcggccatgagtttacccacggcttcgataataatgggcgtaagtacgacaaaaacggcaacttggatccatggtggtcgacagaaagcgaggaaaaattcaaagagaagaccaaatgtatgattaatcaatattctaactattactggaaaaaagctggcctcaacgtgaagggcaagagaaccttaggagagaacattgcagataacgggggacttcgggaggctttccgggcatataggaaatggatcaacgaccgacgccagggcctggaagagccgctgttgcccggaatcacctttaccaacaatcagctattttttctcagctacgcccatgtccgttgtaacagctacaggccggaggctgccagggagcaggtccagattggagctcactcgcctccccagttcagagtgaacggagcgatttcaaattttgaagagtttcagaaggcttttaactgcccccctaactctaccatgaataggggcatggatagttgccgcctttggtag

SEQ ID NO: 234560 - DNA, 1359 bp, synthetic construct
  misc_feature 1..1359: note = Description of Artificial Sequence: Synthetic coding sequence
  source 1..1359: mol_type = other DNA
atgattcacctcccccgtccccctaaggtcttaggactgcagtttgattggcttgggtacatcaagaaagtcattgatacgaggctctacccacacctcaaagatatatcacctagcgaaaatgtggtggtcagagtccctcagtactttaaagacctatttagaattctggggagcgagagaaagaagacaatcgccaactacctggtgtggagaatggtctattccaggatacccaacctgtctaggagatttcagtatcgctggttggagttcagccgcgtgatccagggcactaccactcttctgccacagtgggataagtgtgtgaatttcattgagtcagccttaccctacgtagtgggtaagatgtttgttgacgtttacttccaggaagacaagaaagagatgatggaggagctcgtggaaggagtcaggtgggccttcatagatatgttagagaaggagaatgagtggatggacgctgggactaagaggaaagccaaggagaaggcgagggcggtcctggccaaagtggggtatcccgagtttatcatgaatgatacccatgttaacgaggacctcaaagcgatcaaatttagcgaagcagactatttcgggaacgttctgcagactcggaaatatttggctcaaagcgacttcttttggctgcgaaaggctgtgcctaaaaccgagtggttcaccaacccaacgaccgtgaacgcgttttactctgctagcacaaatcaaatccgatttcccgctggcgaacttcaaaaaccattcttctggggaacagagtacccacgctcattaagttacggagccatcggggtgatcgtgggtcacgagttcactcatggatttgacaacaatggacgcaaatatgataaaaacggtaacctcgacccgtggtggtctacggaatctgaggagaagtttaaagagaaaaccaaatgcatgattaaccaatattcaaactattactggaagaaagccggactgaacgtgaaagggaaacggacactgggtgagaatatcgcagacaacggagggctgcgcgaggccttccgcgcttatcggaagtggataaatgatagacgccagggtctggaagagcctttgctgccaggcatcactttcaccaataatcagttgttctttctatcttatgcacacgtgaggtgcaactcctatcgtcctgaggccgctcgcgaacaggtgcagattggggcacattctcctccccaatttagggtgaacggtgcaattagcaattttgaggaattccagaaggcattcaactgcccgccaaatagcaccatgaacagaggtatggacagttgcaggttatggtag

SEQ ID NO: 234561 - DNA, 1959 bp, synthetic construct
  misc_feature 1..1959: note = Description of Artificial Sequence: Synthetic coding sequence
  source 1..1959: mol_type = other DNA
atgccctcatatggggtctacccttggctccgccataacgtggacctgaagcttaaagagttgctggagaagagcatctcgagacgtagagacactgaagccattcaaaaggctaaaatactttacagcagctgcatgaatgagaaagccatcgagaaggcagacgctaagcccctgcttcatatacttcgacatagccctttccgttggcccgtgctggaaagtaatatagggccagaaggcgtgtggagtgaaaggaagttctcactgctacagactcttgcgacctttagaggccagtattcaaactccgtttttattcgtctatatgtaagccctgacgataaggcctccaatgagcacattctgaagctggaccaggccactctctcattagccgtgcgagaggactatttagataattctacagaggccaagtcctatagggacgcgttgtacaaattcatggtggatacggccgtgttgctcggtgcaaactcttcgcgagccgaacatgacatgaaatccgtgctccggctggagatcaagatcgccgaaataatgatccctcatgaaaaccgaacgtcagaggccatgtataacaagatgaatatctccgagctttctgccatgattccacagtttgactggctggggtatattaaaaaggtcatcgataccaggctatatcctcatctgaaggatatcagcccctcagagaatgtagtggttagagtgccccaatacttcaaggatctgttccgaattctggggtccgagcgcaaaaaaactattgcgaactatctggtttggagaatggtgtacagccgcatcccaaacctctctaggcgattccaatatcggtggctggagttctcccgcgtgatccaaggtaccacaaccctccttccccaatgggacaaatgcgtcaattttattgagagcgcactgccgtacgtggtgggaaaaatgtttgtcgacgtctatttccaggaggataagaaagaaatgatggaagagctggtggagggcgtccgttgggcattcatcgatatgctcgagaaggagaatgagtggatggatgccggaaccaagcgaaaagccaaggagaaagcgagagctgttctggcaaaagtgggctatccagagttcattatgaacgacactcatgtgaacgaagaccttaaggcaatcaagtttagcgaggcagactactttggtaatgtactccagacccgtaagtacctcgcccaatccgattttttctggctcagaaaggccgtccccaagactgaatggttcacaaacccaacaacagtcaacgcattctactctgcttcaacgaatcaaattcgctttccagccggtgagctgcagaaaccctttttttggggcacagaatacccccgaagccttagctacggggcaataggtgtcatcgtcggccacgaattcacacacggatttgacaataacgggaggaaatacgataagaacgggaatttagacccttggtggtctacagaatcagaagagaaatttaaggagaaaaccaagtgtatgattaatcagtatagcaactactattggaaaaaagcaggactgaatgtgaaagggaaaaggacactgggtgaaaacattgcagataacggtggattaagggaggcattccgggcatacagaaagtggatcaacgatcggagacaaggtctggaggaacctttgcttcctggcattaccttcactaataatcagctgttttttctgtcttatgcccacgtaagatgtaattcatacaggcccgaagcggctcgtgaacaggtccagatcggcgcacattcaccaccccagttccgtgtgaacggggcaatatcgaattttgaggagtttcagaaagcctttaactgcccccctaacagcaccatgaaccggggtatggactcatgccgcctgtggtag

SEQ ID NO: 234562 - DNA, 2088 bp, synthetic construct
  misc_feature 1..2088: note = Description of Artificial Sequence: Synthetic coding sequence
  source 1..2088: mol_type = other DNA
atggaggctgagactggctcttctgtggaaacaggtaaaaaagccaacaggggtactcgtatcgccctggtggtgttcgttggcggaaccctggttcttggcaccatcttattcttagtgtctcagggacttctctccctgcaggcgaagcaggaatactgtctgaaacccgagtgcatcgaggccgcagcagccatcctctccaaagttaatctgtctgtggacccatgtgacaatttctttagatttgcctgtgatggatggatatccaataatccgatcccggaggatatgccttcatacggggtctatccttggctgaggcacaacgtggaccttaagctgaaggagctactcgaaaagtccatttcccgacggagggatacagaagctattcagaaggccaaaattctgtactcttcatgtatgaacgagaaggcaatagagaaagctgacgccaaacccctgctgcacatcttgcgccactctcccttccgatggcctgtcctggagtcaaacataggcccagaaggggtatggagcgagagaaagttcagtcttcttcagaccttggcaaccttcaggggacagtactcaaacagtgtgttcatccgactgtacgtcagccccgatgataaggcaagcaacgaacatattctcaagctggaccaggcaacactgagtcttgctgtgagagaagattaccttgataattccaccgaggccaagagctaccgagacgccttatataagtttatggtggatacagccgtacttctgggggcaaatagttccagagcagagcacgacatgaaatctgtcctgagacttgagatcaaaattgccgaaattatgatccctcacgagaatcgtacctccgaagcgatgtacaataagatgaacatctctgaactctccgctatgatccctcagttcgactggctgggatatatcaaaaaagtaatcgatacaagactctaccctcatctgaaggatatttcgcccagtgagaacgtggtagtcagagtgcctcagtactttaaggacctatttcgtatcttggggtcagagagaaagaaaactatcgcaaattacttagtgtggcggatggtctacagccgcataccgaatctgtccagacgtttccaatatcgttggctagaattctccagagtcattcagggcacaaccaccctgctcccgcagtgggacaagtgtgtcaattttatcgaatccgcattgccttatgtggtcggaaaaatgtttgtggatgtttactttcaggaggataagaaggaaatgatggaagaactggtcgaaggagtccgatgggctttcatcgacatgttggagaaagagaacgagtggatggacgccggtaccaaaagaaaggccaaggaaaaagctagggcagttctggccaaggtcggttatccagagttcataatgaacgatacacacgtgaacgaggacctgaaggcaataaaatttagtgaagccgactattttgggaatgtgttacagactcggaaatatctagcccaatctgactttttctggttgaggaaggcagttcctaaaactgagtggttcactaacccaaccacagtcaacgcattttatagtgcttcaaccaaccagatcaggtttcctgcgggtgagctgcagaagccgttcttttggggaactgagtacccaagatcactgagctatggggcaatcggtgtgattgtggggcatgaatttacccatggcttcgataataacggccgtaagtatgacaagaatggaaatttagatccgtggtggtcaaccgagtccgaggaaaagttcaaggagaagactaagtgcatgattaaccaatactctaactactactggaaaaaagccggacttaacgtaaaaggcaaacgcacacttggtgagaatatagcggacaatgggggactgagggaggcattccgggcttaccgaaagtggatcaacgacagaaggcagggacttgaggagcccctgttgccaggtattaccttcaccaataaccagctcttcttcctgagttatgcacacggtcagtggtgcaattag

SEQ ID NO: 234563 - DNA, 888 bp, synthetic construct
  misc_feature 1..888: note = Description of Artificial Sequence: Synthetic coding sequence
  source 1..888: mol_type = other DNA
atgcctagccccaggcgaagcatggaaggacgccctctcggggtttccgcgtccagctcaagtagctcccccggaagtcccgcacatggcggaggcggagggggatcaaggtttgaattccaatccctcttatcaagccgggcaacagccgtagatcccacatgtgcccgattgagggctagtgagagtcctgtccaccggaggggcagttttccgctcgccgctgctgggcctagtcaatcccctgcaccaccactcccagaagaagaccgtatggatctgaacccatctttcctcggcatagctttgagaagtctcctggctatcgacctgtggcttagcaagaaactgggggtttgcgccggagaatcttcatcttggggcagcgtgaggccactgatgaaactcctcgagatatccgggcacggcattccatggctgcttggcacattgtactgcctgtgccgttccgattcatgggccggtcgcgaagtcttgatgaatttgctcttcgcactgctgcttgatctgcttctagtcgccctgatcaaaggacttgtgcgcagaagacgaccggctcacaaccagatggacatgttcgtaactctgagtgtggacaagtattcattcccgtccggccacgccactcgggcagcactgatgagcagatttatcctaaatcacctggtattggctatacctctgagagtgcttgtggttctatgggctttcgtgctcggcctaagtagggtaatgttgggacgacacaacgtgactgatgtggcgtttgggttcttcctggggtatatgcagtactctatcgtcgactattgctggctgtctccgcataacgccccagtgctgttcttactgtggtctcagaggtag

SEQ ID NO: 234564 - DNA, 615 bp, synthetic construct
  misc_feature 1..615: note = Description of Artificial Sequence: Synthetic coding sequence
  source 1..615: mol_type = other DNA
atggaccttaatcccagtttccttggtatcgcgcttcgaagccttctggcaattgacctgtggctgtcaaagaaattgggggtttgcgcaggcgagtctagctcttggggtagtgtccgtcccctgatgaagctgttggagatttctggacacgggataccgtggttactgggaacgctgtactgcctgtgccgctccgattcctgggccggaagggaagtgctcatgaacctgctgtttgcgctgctattggatctcttgctcgtcgcccttatcaaaggcctcgtgcgaaggcgcagaccagcccacaatcaaatggacatgttcgtgacgctgtcagtggacaaatattccttcccctccggccatgcaactcgcgcagctctcatgtctcgcttcattctaaatcatttggtgctcgctatcccgttaagggttttagtagtgctgtgggctttcgtcttgggcctctccagggtgatgctcggcagacacaacgttactgatgttgccttcggtttttttctgggctacatgcagtatagcatcgtggactactgctggttgagccctcacaatgcccctgtcttattcctcctatggtctcagagatag

SEQ ID NO: 234565 - DNA, 645 bp, synthetic construct
  misc_feature 1..645: note = Description of Artificial Sequence: Synthetic coding sequence
  source 1..645: mol_type = other DNA
atggagctcgccgctggcagctttagcgaggaacagttctgggaagcctgtgctgaactgcagcaaccagctctggccggagccgattggcagttgctagtggagaccagtggcatatctatttataggctccttgacaagaagacaggcttgtacgagtacaaggtgtttggggtactagaagactgctcccccacattactggcagatatttacatggacagcgactaccgtaaacagtgggaccaatacgttaaagagctgtacgagcaggaatgtaacggcgagacagtggtgtactgggaggtcaaataccctttccccatgtccaaccgcgattacgtctacttgaggcaacgtagggacttagacatggaaggtagaaaaatacatgttatactcgcacgaagtaccagcatgccacaactgggggaaaggtccggagtgatcagggttaaacagtataagcagtcactcgcaattgagtcagacggaaaaaaaggcagcaaagtgttcatgtattactttgataatcctggagggcagatccccagctggctgatcaactgggctgcaaagaacggggtacccaactttcttaaggacatggcgagggcttgccagaactacctgaaaaagacctag

SEQ ID NO: 234566 - DNA, 582 bp, synthetic construct
  misc_feature 1..582: note = Description of Artificial Sequence: Synthetic coding sequence
  source 1..582: mol_type = other DNA
ctggcccaagggaggtgcctccaggttacagccgtgcagattcagggtagttggaaagtaaccggggtgcagccccagaagaccggactgtatgagtacaaagtctttggcgtcttggaggactgttctccgacccttttagccgacatttatatggactcggattatagaaagcagtgggaccaatacgtcaaggagctgtatgagcaggaatgcaatggcgagaccgtcgtgtattgggaggtgaaataccccttccctatgagcaaccgggactacgtgtatctgaggcagcgtagagacttggacatggaaggacggaaaatccatgtgatcctagccaggtccacaagtatgcctcaactgggtgaacggtcaggcgtgatcagggtgaaacagtacaaacagagccttgcaatagagtccgacggaaagaagggatccaaagtctttatgtattactttgacaatcccggaggccagattccttcttggttgatcaactgggccgctaaaaacggtgtccctaatttcctgaaagacatggctcgggcttgccagaattacttaaagaaaacctag

SEQ ID NO: 234567 - DNA, 429 bp, synthetic construct
  misc_feature 1..429: note = Description of Artificial Sequence: Synthetic coding sequence
  source 1..429: mol_type = other DNA
atggactcagactacagaaagcagtgggatcagtacgtgaaggagctctacgaacaggagtgtaatggcgaaactgtggtgtactgggaggttaagtaccccttccccatgtctaacagggactatgtgtaccttagacagcgaagagatctggacatggagggcagaaagattcacgtgatactggcccgtagtactagcatgccacaattaggggagcgctctggcgtgatccgcgtcaagcagtataaacagtctctcgcgatagagtctgacggtaaaaagggcagcaaggtattcatgtattatttcgacaatcccggaggacagatcccaagctggcttattaactgggcggctaagaatggggtgccaaattttcttaaggatatggctcgggcatgtcagaattacttaaaaaaaacctag

SEQ ID NO: 234568 - DNA, 564 bp, synthetic construct
  misc_feature 1..564: note = Description of Artificial Sequence: Synthetic coding sequence
  source 1..564: mol_type = other DNA
atgccggtcgatctctcaaaatggagtggccctttgtcactccaggaggtcgacgagcagccccagcatccactgcacgtgacttatgccggagctgccgtggatgaattaggcaaagtgctcacacctactcaggtcaagaacagaccaacttccatctcatgggacgggctggattccggaaagttatacaccctggtgctgactgaccccgacgccccttcccgcaaagatccaaagtaccgggaatggcatcattttctggtggtgaacatgaagggaaatgacattagttcaggcactgtgctgtccgattatgtgggcagtggaccccctaaaggcaccggtttacacaggtatgtctggctcgtgtatgagcaggacagacccctcaaatgcgatgagcccatcctatctaaccgatctggcgaccaccggggtaagttcaaagttgcttcctttcgtaagaaatacgaattgcgagctccagttgccggaacttgttatcaggcagagtgggacgattacgtgccgaaactttacgagcagctctccggaaaatag

SEQ ID NO: 234569 - DNA, 468 bp, synthetic construct
  misc_feature 1..468: note = Description of Artificial Sequence: Synthetic coding sequence
  source 1..468: mol_type = other DNA
atgcctgtggatctgagcaagtggtctgggccactgtctcttcaggaggtagacgaacaaccccagcaccctctgcatgttacatatgccggagcagccgtggacgaattaggaaaggttctgacacctacccaggtgaaaaatcgccctactagtatcagttgggacggcctggattctggcaagctgtacactctggtgctgaccgaccctgacgcgccatcacgcaaagaccctaagtatcgcgagtggcaccactttctggtcgtgaatatgaaaggaaacgacatttcctccggtaccgtcttatctgattacgtgggatccggacccccaaagggaaccggcctccatcgctatgtttggctggtatatgagcaggataggcccctcaagtgcgattttagttgttgtcttgcattcatcattcttctgacccactcagatctgtgttttgaccagatctag

SEQ ID NO: 234570 - DNA, 6134 bp, synthetic construct
  misc_feature 1..6134: note = Description of Artificial Sequence: Synthetic coding sequence
  source 1..6134: mol_type = other DNA
atgtgtcctgtggactttcacgggattttccaactggacgagcgtagaagagacgcagtgatagctctagggatcttcctgatcgaaagcgacctgcaacataaggactgtgtcgtaccctacctattgcggctattgaagggattaccgaaagtttattgggtggaggagtccactgctcgcaaaggtcgcggagcactcccagtcgctgagagctttagcttctgtttggtgacactactgtctgatgtcgcctacagggatccgtccctccgtgacgaaattctcgaagttctcctgcaagtcctccacgtgctgttaggaatgtgtcaagctctggagatacaagataaagagtacctgtgcaagtatgctataccatgcctgatagggatcagccgagcttttggcaggtacagcaacatggaggagtcacttctatcaaagctcttccctaaaatacccccacactccctccgagtgcttgaagagctggagggcgtgcggaggcgctccttcaatgacttcaggagcatcctcccttccaaccttttgaccgtttgccaggaggggaccctgaagcgcaaaacgtcatctgtttcctctatatcccaggttagccccgagcgtgggatgcctcctccaagctctcctgggggatctgccttccactactttgaggcttcatgcctgcccgatggcactgctcttgagcccgaatactattttagcaccatttcaagctctttctctgtaagtcctctctttaacggtgtaacttacaaggaattcaacatcccactcgaaatgctgcgcgagctcttaaacctcgtgaaaaagatcgtcgaagaagcagtcctgaaatccctggacgccattgtggccagtgtgatggaggctaatcccagcgccgatctgtactatacctctttttccgaccccctgtatctgactatgttcaaaatgctgcgtgacacactgtactacatgaaggatttacctaccagcttcgtgaaagagattcatgactttgttttagaacagttcaatacaagtcagggcgagcttcagaagatactgcacgacgctgatagaatccataacgaattatctccactaaaactgagatgccaggcaaatgcagcttgcgtggatttgatggtttgggctgtgaaggatgaacagggcgctgagaatctctgtatcaagctctctgagaagttacaatcaaagaccagctccaaggttattattgcgcatctgcctctgcttatctgctgtctccagggtctgggcagactttgtgagcgcttccctgtcgttgtacacagcgttacaccgagtcttcgtgattttctggtcattccttccccagtgctcgttaaactgtataagtaccatagccaatatcacaccgtggctggcaacgatattaaaatttccgttacaaatgagcactcagagtccaccctgaatgtcatgtccgggaagaagtcacagccatccatgtacgaacagctcagggatatcgccatcgacaacatctgccgctgtcttaaggccggactgaccgtagatccagtcatcgttgaagcgtttctcgcaagcctctcaaaccgtctctacatctcccaagagtctgacaaggatgcccacctgatacccgatcacacaattcgcgctctgggccatatcgctgtggccctgagagatacccccaaggtcatggaaccgatcctgcagattctacaacagaagttctgccagccacctagtcctctggacgtcctgatcatcgaccagctcggttgtctggtcatcacaggaaaccagtatatataccaagaagtctggaatctgttccagcagatttcagttaaggcaagcagcgtggtgtattcggccacgaaggactacaaagaccatgggtaccgccattgtagcctcgctgtaatcaacgcacttgctaacattgcagccaatatacaggacgagcacctggtagatgagcttctaatgaatctccttgagctattcgtacagctggggctggaaggaaaaagggccagcgagcgggcttctgagaaggggcctgctttaaaagcgagctcctccgcgggaaaccttggagtattgatacctgtaattgctgttctcacccgccgactgccacccatcaaggaagccaagccacgcctgcagaagttgtttagggatttctggctgtactccgtcctcatggggttcgctgtggagggctcaggtctgtggcccgaggaatggtatgagggtgtgtgcgagatcgcaacgaaaagccctcttctgacctttccgtctaaggaaccactgaggtctgttctgcaatataactcagcgatgaaaaacgacacagtaactcctgcagaactgagcgagctgagaagtaccatcattaacctgcttgaccctccccctgaagttagcgctctgattaataaactagattttgctatgagcacctatttactaagcgtgtatagattggagtacatgagggtgcttcgttctaccgaccccgaccgctttcaagtaatgttttgttatttcgaggacaaagctatccagaaggataagtccggcatgatgcaatgcgttatcgctgttgccgacaaggtttttgatgcattcctaaacatgatggctgacaaggctaaaacaaaagagaacgaggaggaattggaacgtcacgcccaatttctccttgtgaatttcaatcacatccataagcggatccgaagggtcgcggataagtacctatctggactcgtcgataagtttccacacttgctctggagtgggaccgtgctgaaaacaatgctggatattctgcagaccctttctttgtcgctctccgccgacattcataaggaccagccatattacgacataccagacgcgccataccgaataaccgttcccgacacatatgaggctcgagagagcatcgtcaaggatttcgccgctaggtgcgggatgattctgcaggaagctatgaaatgggctccaaccgtaacaaagtctcatctacaggaatacctgaacaagcaccagaattgggtttctggccttagccagcacacagggctcgcaatggctacggagagtattttacacttcgccggatataataaacagaacactacgcttggcgcaactcagctctctgaacgaccagcatgtgtcaagaaagattattcaaacttcatggccagtttaaacctgagaaatagatacgcaggagaggtctacggtatgatcaggttctcgggcactacaggtcaaatgagcgacctgaataagatgatggtgcaggacctccattctgcccttgatcggtcccatccacagcactacacgcaagccatgtttaagctcacggcgatgctgatctcctctaaggattgtgacccacagcttctgcaccatttatgttggggcccactgcgcatgtttaacgagcacggaatggaaacagccctggcctgttgggaatggcttttggccggaaaagatggagtcgaggtccctttcatgcgggaaatggccggagcatggcatatgaccgtggagcaaaaatttggactgtttagcgctgagatcaaagaagccgatcccttggcagccagcgaggcatctcagccaaaaccctgtcccccagaagtcactccccactacatctggattgatttcttggtgcaacgttttgaaattgccaaatattgctcatcagatcaggttgagatcttctcaagcctcctgcagcggtcaatgagcctcaatataggcggagccaaggggtcaatgaataggcatgtcgccgcaatcgggcctcgtttcaagctcctaactttaggactgtccctgctccatgccgacgtggtacccaatgcaacgattaggaatgtcttaagggaaaagatttattctaccgcctttgactacttttcatgcccccctaagtttccgactcagggggaaaaacgtctgcgggaggacatttcgattatgattaagttttggactgcgatgttctcagataaaaagtacctgacagcctcacagctggtgccaccagacaaccaagacacacgctcgaacctggacataacagtcggcagcaggcaacaggccacacaaggctggatcaacacatatcccctgagtagcggaatgtctacaatcagtaagaagtctggcatgtcaaaaaagaccaaccggggatcccagctccacaaatactacatgaaacggaggaccctgctgctctcactcctggcaaccgaaattgaacgcctcataacctggtacaaccctctgtctgccccagaattggaactggatcaagcgggagaaaattctgtggctaattggcgctccaagtacatatcactctcagaaaagcagtggaaggataatgttaacctcgcctggagcatttcaccctacctggctgtgcagcttcccgcaagatttaagaacacggaagccatcggcaatgaggtgactagactggttaggctagaccccggagctgtctctgatgttcctgaggccatcaaatttttagtgacctggcacacgattgatgccgatgccccagagctgtctcacgtgctttgttgggctccaactgatcctccaaccggcctgagttacttctcaagcatgtatccaccacatcctctcaccgctcagtatggggtgaaagttttgagatcctttccccctgacgccattctcttctatattcctcaaatagtccaggccctaaggtatgataagatggggtacgtgagggaatatatcctatgggccgcatcaaagagtcagctcttagcacaccagttcatctggaatatgaagaccaacatttacttggacgaagaaggccaccagaaagaccccgatattggggatctgctggatcagttagtggaggaaatcacagggtccctcagcggacctgccaaggacttttatcagcgggagttcgatttcttcaacaaaattacaaatgtgagcgccattatcaaaccttatcccaagggagacgaaagaaagaaggcgtgcctaagcgcactttccgaggtgaaagtgcagcccggttgctacctcccctcaaacccagaggctattgtcctggacattgattacaaatccggcaccccaatgcaaagtgcagcaaaagcgccatacctggctaaatttaaggtgaagagatgcggtgttagcgagctcgagaaggaaggactccgctgccgtagcgactctgaggatgaatgttccacccaggaggccgatggccagaagataagctggcaggcagcaatctttaaagtgggcgacgattgcaggcaggatatgctggccctgcagatcatagacctattcaagaacatttttcagcttgtgggcttggacttgtttgtctttccttaccgcgtggttgctacagctcccggatgtggcgtgatcgagtgcatccctgactgcacaagccgagaccagctgggtaggcagaccgacttcggaatgtatgactactttacccgtcaatacggagatgagagcacactggccttccagcaagcccgatacaatttcattcgcagcatggccgcttatagcctacttcttttcctcttgcagatcaaagacagacataacggaaatattatgctggacaaaaagggacatatcattcatatcgactttggatttatgttcgagagcagcccaggcggaaacctcgggtgggagccagacatcaagcttacggatgagatggtgatgattatgggcggaaagatggaggctacaccctttaaatggtttatggaaatgtgcgtgcgaggctatctcgcagtgaggccctatatggacgcggtcgtttctctcgtgacactcatgctggatacaggcttaccttgcttccgcggacagactatcaagctgctcaaacacaggttctctccaaatatgaccgaacgtgaagccgctaacttcataatgaaggtgatccagagttgcttcctatcaaaccgaagtcgcacctatgacatgatacaatactatcaaaacgatatcccatatta

SEQ ID NO: 234571 - DNA, 1440 bp, synthetic construct
  misc_feature 1..1440: note = Description of Artificial Sequence: Synthetic coding sequence
  source 1..1440: mol_type = other DNA
atggacgaaactagcccactggtaagtccggaaagggcacagcccccagactatacctttccctccggatccggggctcactttccacaggtgcctgggggagcggttcgcgtcgcagcggctgcgggaagcggtccctctccacccggttcaccaggccacgatcgggaaaggcagcccctcctggacagagcacgcggagccgctgcgcaggggcagacacaaaccgtggccgctcaggcccaggccctcgccgctcaggctgcagcagccgctcatgcagcgcaggctcaccgcgagagaaacgagtttccggaagatcctgagttcgaagccgtagttcgtcaggctgagcttgcaattgagagatgcattttcccagagagaatctaccagggcagtagcggctcctattttgttaaggatccacagggcagaatcattgctgtatttaaaccaaaaaacgaggagccctacgggcacctgaacccaaagtggactaaatggcttcaaaaattgtgctgcccttgttgctttgggagagactgtctggttctgaaccaggggtatctgtccgaagccggtgcctccctagtagatcagaaattagagctgaacattgtgcctagaacaaaggttgtgtatctggccagtgagaccttcaattactcggccatagaccgggtaaaaagccgcggaaagcgcctggcccttgagaaagtacccaaggtgggccagcgatttaataggatcggacttccgccaaaggttggatcttttcagctgtttgtggaaggttataaagatgccgactactggctgcgcaggtttgaagctgagcccctcccggagaatactaatcgccaacttcttctccaattcgagcgattggtggtcctggactatataatccgtaacaccgaccgcggtaacgataattggctgattaaatacgactgtccgatggattcatcctctagcagggacacggattgggtagtggtgaaagaaccagtcatcaaggtggccgcaatcgacaatggcttggcctttccactcaagcatcccgactcatggagagcataccctttttattgggcctggctcccccaggctaaggtgcccttctcacaggaaataaaggacctgatcctgcctaagatttctgatcccaactttgtgaaggatcttgaggaagacctctacgagctgtttaagaaagaccccggttttgaccgtgggcagttccataaacagattgctgttatgcgaggccagattctcaatctcacccaggcccttaaagacaacaagagtccactgcacctagttcagatgcctcccgtgattgttgagacagcaagaagccatcagcgtagtagtagcgagtcctacacccagagcttccagtccagaaagccgtttttttcctggtggtag

SEQ ID NO: 234572 - DNA, 1350 bp, synthetic construct
  misc_feature 1..1350: note = Description of Artificial Sequence: Synthetic coding sequence
  source 1..1350: mol_type = other DNA
atgttaggtccccaagtctggtcatctgttaggcaggggctgtctaggtctctgagcaggaacgtgggagtctgggcaagcggtgaaggtaagaaagtagacatcgccggaatttatcccccagttactaccccttttaccgccactgccgaagtcgactacggaaaactggaggaaaatcttcataaattgggcacttttccctttcgtggggctgtcggcggagtttgcgcgctcgccaacgtcctgggagcccaggtctgccagctggaaagactttgctgtaccggacagtgggaggatgcccagaaattgcagcatcggctgatcgaaccaaacgccgctcgtatcatagcagtgttcaaaccaaaaaatgaagaaccctatggccatcttaaccccaagtggactaagtggttgcagaagctttgctgtccatgctgtttcggacgcgactgccttgtgctcaaccaggggtatctgtcagaagccggagcttccctggttgaccaaaaattggaactgaacatcgtcccaaggaccaaggtggtatacctggcatcggagacgttcaattattctgccatcgaccgagtcaagtctaggggtaagaggctggccttggagaaggtccccaaggttggccagagatttaacaggatcggcctgccgccaaaagtgggttcttttcagttgttcgttgagggatacaaggatgccgactattggctgcggagattcgaagctgaacctctccccgaaaataccaatcggcagctgctgcttcaattcgagcgattagttgttctcgattacataatccgtaatacagatcgcggtaatgataattggctgataaagtatgactgtcccatggattcctctagttcgagagatacagattgggtcgtggtcaaggagcccgtgatcaaagtagccgctatcgataacggactcgccttccctttaaaacatcctgactcctggcgcgcttacccattctactgggcctggctgccacaggccaaggttcctttctctcaggaaattaaggatctgattctgccgaaaatcagtgacccaaacttcgtgaaggatctggaagaggacctgtatgagctatttaaaaaggaccccggtttcgacagaggacagttccataagcaaattgcggtgatgaggggccagattctaaatcttacacaagctttgaaggataacaagtctcctcttcacttggtgcagatgcctcccgtgatcgtggagacagcaagatctcaccagcggtccagcagcgagtcctacacccagtcgtttcagtcccgaaagccattcttttcctggtggtag

SEQ ID NO: 234573 - DNA, 1446 bp, synthetic construct
  misc_feature 1..1446: note = Description of Artificial Sequence: Synthetic coding sequence
  source 1..1446: mol_type = other DNA
atggaagacccttctgagcccgatagactggcctccgctgatggcggtagcccggaagaagaggaggatggtgagcgtgagcctctgttacctcgtattgcctgggcccacccacggaggggagccccagggtccgccgtgcgactcctcgatgccgctggagaggagggggaggcaggggacgaagagttaccactgcctcccggagatgtgggcgtgtccagatcttcctccgcagaactggaccgatccagaccagccgtctccgtaaccattggtacctccgaaatgaatgcgttcctcgacgatccagagtttgccgatattatgctcagagctgagcaggcaatcgaagtaggaatatttcccgagcgcatatctcagggttcaagcggcagttacttcgtcaaggacccaaagcgtaagatcatcggcgtcttcaagccaaaaagcgaagaaccttacgggcagcttaaccctaaatggacgaagtacgtccacaaagtatgttgcccctgctgctttggacggggttgtttgattcccaatcaaggctacttatctgaggctggagcctacctggttgataataaactgcacctgagcatcgttcctaagaccaaggtggtgtggctggtgagtgagaccttcaattacaacgctatcgatagagcaaaaagccgtggcaaaaagtacgccctcgagaaggtgccaaaggtgggacggaaatttcaccgaattggcctcccccctaagatcggctcttttcaactcttcgtggagggttataaggaggccgaatactggctgcggaaatttgaagccgaccctctgcccgagaacattagaaaacagtttcagagtcagtttgaaaggttagttatcctggactacatcatcagaaacacagatagaggcaacgacaactggctagtacggtacgaaaaacagaaatgcgaaaaggagattgatcataaggaatccaaatggattgatgacgaggagtttctcattaagatcgccgcaatcgacaacggactggcattcccattcaaacaccctgacgaatggcgggcatacccctttcactgggcatggctgccccaggctaaagtaccattttctgaagagattcggaacctgatactcccctacatctccgatatgaatttcgtgcaggatctgtgcgaggacctgtacgagctgtttaaaactgataaaggatttgacaaggccacctttgaatctcaaatgtctgttatgcgcggacagatactgaacctaactcaagccttgcgggatggcaagtccccgttccaattggtgcagatcccttgtgtgatcgtggagagatcacaggggggttctcagggacgcattgttcacttatctaatagcttcactcaaaccgtaaattgcaggaaacccttcttctcctcttggtag

SEQ ID NO: 234574 - DNA, 1353 bp, synthetic construct
  misc_feature 1..1353: note = Description of Artificial Sequence: Synthetic coding sequence
  source 1..1353: mol_type = other DNA
atggaggatccaagcgaaccagatcgcctggctagcgctgatgggggaagccccgaagaagaagaagacggagagagagagccattgttaccgcgaatcgcttgggcacatcccagacgcggagcaccagggtctgccgtgagactcctcgaccgctcccggccagccgtgtccgttaccattgggaccagtgaaatgaatgcatttctagacgatcccgaatttgccgacataatgctgagagccgagcaagcaattgaggtcgggatctttcctgaacgcatctctcaggggagcagtggctcttatttcgtgaaggaccccaaaaggaagatcatcggagtgttcaagcccaagtccgaggagccctatggtcagctcaacccaaaatggacgaaatacgttcacaaggtgtgttgcccctgttgcttcggacgtgggtgtttgattccaaaccagggctatctgtcagaggctggggcttatctggtcgataacaagctacacctgagcattgtacctaaaaccaaggttgtgtggctagtctccgagacttttaattacaacgctatcgatcgcgcaaagtcacgagggaagaagtacgcattggagaaagtgccgaaagtagggaggaagttccacaggattggactgccccctaaaattggctcgtttcagcttttcgtcgaaggatacaaggaagccgagtactggctgcgtaaatttgaggccgacccactgcccgaaaatatccggaaacagtttcagagtcagttcgagcgtttagtgatccttgattatatcatccggaatactgaccgtggaaatgataactggctagtgcgctacgaaaagcagaagtgcgagaaggagattgaccacaaagaatccaagtggatcgacgatgaagagtttctaattaagatcgccgcaatcgacaatggtctggccttccccttcaaacacccagatgaatggagggcgtatccatttcactgggcttggctgccccaagccaaggtcccgtttagcgaggaaatccgcaacctcattctgccttacatttctgacatgaattttgtccaagacctgtgtgaggacctgtacgaactgttcaagacggacaaggggtttgataaagccaccttcgagtcccagatgagtgtcatgaggggacagattttgaatctcactcaggccctgcgggacggcaaaagtcctttccagctcgttcaaataccttgcgtcatcgtggagcggagccagggtggcagccagggacggatcgtacatctctctaacagcttcacgcagactgtgaattgccgtaaaccttttttttcatcatggtag

SEQ ID NO: 234575 - DNA, 6135 bp, synthetic construct
  misc_feature 1..6135: note = Description of Artificial Sequence: Synthetic coding sequence
  source 1..6135: mol_type = other DNA
atgtgtcccgtggacttccacggtatctttcagctggatgaacgccgaagggacgcggtgattgccctcggcatctttctgattgaatctgatttgcagcacaaggactgcgtggtgccgtatctgctcaggctcctgaagggattacctaaggtgtattgggtggaagaatctaccgctagaaagggacgcggagctctacctgttgctgagagcttttcattttgtcttgtgacacttctctctgacgtggcctaccgggatccgtcattgagggatgaaatcctcgaggtccttctgcaggttctgcatgtattattaggaatgtgtcaagccctagaaattcaagacaaagaatacctgtgcaaatacgccatcccatgtcttattggcatttcacgggcttttgggaggtacagcaatatggaagaaagtctgctgtcaaagttgtttcctaagatccctccacattctttgagagtgctagaagagctggaaggagtgaggaggaggtcttttaacgactttagaagcattctgcctagtaatcttctaaccgtgtgccaggagggcaccctcaagcgcaagacctcatcagtctcatcaattagccaggtcagtcctgaaaggggaatgccccctccttcatcgcctgggggatctgcgtttcactacttcgaagcgtcatgcctaccggatgggacggccctggaacccgagtactactttagcacaatcagcagctcattctcagtgagtcccctgtttaacggcgttacatacaaggagttcaatattccactggagatgctccgggagctgctgaatctagtcaaaaagatagtcgaagaggctgtgctgaaatccctagacgcaatcgtagccagcgttatggaagctaatccaagtgcagatttatactacacatcattctcagacccgctgtaccttacaatgtttaagatgctgcgagacaccctatattatatgaaggacctcccaacctcttttgtgaaggaaattcatgacttcgttctcgagcagtttaatacgtcccagggagaactgcagaaaatcctacacgatgctgaccgaattcataatgagctgagccctctaaaactcaggtgtcaggccaacgctgcttgtgtcgatttaatggtctgggcagtcaaagacgagcaaggagctgagaatctgtgtattaaacttagcgagaagctgcagagtaaaacgagctcgaaggtgatcatcgctcacctgcctctgctcatatgctgcttgcagggtctgggacggttatgtgagaggttccctgtggtcgtgcattcagtgacgccgtcccttcgagatttcctcgtgatcccctccccggtgctggtgaagctttacaaataccacagccaatatcataccgtggccggtaatgatatcaaaataagtgtgacgaacgagcactcagaaagcactttaaacgtgatgtccggcaaaaagagtcagccctcaatgtatgagcagttacgcgacatcgcaatcgacaacatctgccggtgtcttaaggcaggcctgacagttgaccctgttattgtagaggcctttctggcaagtttgagcaataggctgtatattagccaggaatccgacaaggatgctcacctgattcccgaccatactattagagccttaggccacattgcagtcgccctgagggacaccccaaaggttatggagcctatcctgcaaatcttacaacaaaagttttgtcaacccccatcaccgctggacgtgttgattatcgatcaactgggatgccttgtgatcaccggtaatcaatatatctatcaggaagtttggaatctcttccagcagatctcagtgaaagcctcatctgtggtgtattcagctactaaggactacaaagatcacgggtaccggcattgctccctggccgtgattaatgctctggcaaacatcgctgccaatatccaagatgagcacctggtggatgaactgttgatgaacctcctggaattattcgtgcagctcggactcgagggaaagcgagcttccgagcgcgcatcagagaagggaccagcgctgaaggctagtagcagtgcaggtaacctgggagtactgatccctgtgatcgcggtgctcacacggaggctaccgcctataaaagaggccaaaccgaggttacagaagcttttccgggacttctggctctacagcgtcctcatgggctttgctgtcgaggggtcaggactgtggccggaagagtggtacgagggagtgtgtgagattgccactaagagccctttattaacattcccatcgaaggagcctctgcgttccgtgctacaatacaattcagcaatgaagaatgataccgtgacaccggctgagctgagcgagttgcgaagcaccattattaatctcctggacccgccacccgaagtgtctgcgctgatcaataaactcgactttgcgatgagcacctaccttctgtccgtgtataggcttgaatatatgagggttctgcgttctaccgacccagaccgctttcaagtgatgttttgttactttgaggacaaagcaatccagaaggataaaagcgggatgatgcagtgcgtgatagcagtcgcagacaaagtcttcgatgcattcctcaatatgatggccgataaagcaaagacaaaggagaatgaggaagagctggaaagacatgcgcagttcctgctggtgaatttcaaccacattcataaaaggattcggagggtcgccgacaaatacttaagcgggctcgtcgacaaattcccccatttgctgtggtccgggactgtactgaagacaatgctcgatattttacagaccttgtcactgtctctctccgcggacattcataaagatcagccctactacgacatccctgatgccccttataggatcactgttcccgacacatacgaggccagagaaagcatcgtgaaggactttgcagcgaggtgcgggatgatcctgcaggaggcaatgaaatgggccccaactgtgaccaaatcccaccttcaggagtatttgaacaaacaccagaactgggtctctggattaagtcaacacaccggccttgctatggcaaccgaatcaattctacacttcgcgggatacaataaacagaatacgacccttggagccacacagttatctgagaggcctgcgtgcgtaaagaaggactatagtaattttatggcctcccttaatttaagaaatcgatacgcgggtgaggtgtacggtatgatccggttttctgggaccactggccagatgtcagacctaaataagatgatggtgcaggatctgcatagtgcactggatagaagccatccacagcactacacgcaggccatgtttaaacttacagccatgctgattagttctaaggattgcgatcctcagctgcttcaccatctgtgttggggccctctaagaatgtttaatgagcacggtatggagaccgcgctcgcctgttgggagtggcttcttgccggtaaagacggggtcgaggtcccgttcatgcgtgaaatggctggtgcttggcacatgactgttgagcaaaaattcggcttgttctccgctgagataaaggaggccgacccactggcagcatctgaagccagtcaacccaaaccctgtccaccagaggttacaccccactacatctggatagactttctggtgcaaaggtttgaaatcgccaaatactgctcaagtgaccaggtggagattttttctagcttattgcagcgaagcatgagtcttaatatcggcggagctaagggcagtatgaacaggcacgtggccgcaatcgggccaagatttaagctcttgaccctcggtctctcactgctgcatgccgacgtggtaccaaacgcaactatacggaacgtgctgagagaaaaaatttacagcacggcctttgattacttctcctgccctcccaagttccccacgcaaggggaaaagaggctgagggaggacatcagcattatgattaaattctggaccgccatgttctccgataagaaatacttgaccgcctcccagcttgttcctcccgacaaccaggacacaaggagtaatttggacataacggtggggtcacgccaacaggccactcaaggatggattaatacatatcccctttctagcggaatgtcaacgatctccaagaaatctggaatgtctaaaaagacaaatcgcggatcccagctgcataagtactacatgaagagacgaaccctcttgcttagcttgttagccactgagattgagcgcctcatcacatggtacaaccccttgtcagcaccagaacttgaactcgaccaggccggtgaaaacagcgtggcgaattggcgctctaagtatattagcctctccgagaagcagtggaaggataacgtgaacctagcgtggtctatctccccctatcttgctgtgcagttgccagcccgtttcaaaaatacagaagccattggaaacgaggtaactaggctggtgcgcctcgatcccggagcagtatcggatgtccctgaggcaatcaaatttctggtgacatggcatacgatagatgccgatgcccctgagctctcccatgtattgtgttgggcacccaccgacccaccaaccgggctgtcttacttttcatcgatgtacccccctcaccccctgaccgcgcagtatggggtgaaagtgctgcgtagcttcccaccagacgccattctgttttacattccccagatcgtccaggcacttcgttacgataagatggggtatgtcagagaatatattctctgggccgcttctaagtctcagcttctggctcatcagtttatttggaatatgaaaacaaatatctacctggatgaggagggccaccagaaggaccccgatattggggaccttctggatcagttggtggaagagatcacggggtccctgagtggtcccgctaaggacttttatcagcgggaatttgatttttttaataagattaccaatgttagcgcaataatcaaaccgtaccccaagggggatgagcgcaagaaagcctgcctgtctgccttgtcagaggtaaaagtccagcctggctgctacctcccatcaaatccagaagcgatcgtgcttgatatcgattataagagtgggacgccaatgcagtcagcagccaaggcaccctacctggccaaattcaaagtgaaaagatgcggggtttcggagctagaaaaggaggggctgagatgccgaagcgactcagaggacgagtgtagtactcaagaagcagatgggcagaagatatcttggcaggccgctatctttaaggttggggacgactgcagacaggacatgcttgcactgcagattatagatctgttcaagaatatctttcagttggtgggacttgacctttttgtgtttccttatcgcgtcgtcgcaactgcccctgggtgcggggtcattgagtgtatcccggactgcacttccagagaccagctcggccgtcagaccgactttggaatgtatgattatttcaccagacaatatggcgatgagagcactctggccttccagcaggccaggtacaacttcatcaggtccatggccgcatatagcctgttgttatttttactgcagataaaagatagacacaatggaaacatcatgcttgacaagaagggccacattattcatattgattttggtttcatgttcgaaagtagccccggagggaacctagggtgggaacctgacattaaactgaccgacgaaatggtgatgattatgggcggaaaaatggaggccacaccctttaaatggtttatggagatgtgtgtgagagggtatctagctgttcggccttatatggatgccgtggtcagtctggtgacactgatgttagataccggactcccttgctttagggggcagacgattaaactgctaaaacaccgcttttcccctaacatgactgaacgcgaggctgccaatttcattatgaaagtcatacagtcttgctttctgagcaaccgatctcggacctacgacatgattcagtactatcagaatgacatcccatattaa

SEQ ID NO: 234576 - DNA, 2565 bp, synthetic construct
  misc_feature 1..2565: note = Description of Artificial Sequence: Synthetic coding sequence
  source 1..2565: mol_type = other DNA
atgagagagatggccggagcctggcacatgactgtggagcagaaatttggtctgttctcagctgagattaaggaggccgacccattggccgctagcgaggcgagccagcctaaaccatgtcccccagaggtgaccccacactatatctggatcgatttcctggttcagcgatttgagattgcaaaatactgttcctccgaccaggtggagatctttagcagcctcctgcaacggtctatgtcacttaacattgggggtgcaaaaggctctatgaatcgccatgttgctgcgatcggcccacgttttaagctgcttactcttgggttatccctcctgcacgctgacgtcgtgccgaatgcaactatccgtaacgtgctccgcgaaaagatatacagcaccgcatttgactatttctcatgccccccaaagttccctacccagggagagaaaagactgagggaagatataagtatcatgatcaagttctggaccgccatgttctccgacaagaagtacctgacagcaagccagttggtgcctcccgacaatcaggacacccgatccaatctggatattactgtgggctcccggcaacaggcaactcaaggctggataaacacataccctctttcatctgggatgtctacaatctcaaagaagagtgggatgagtaagaagaccaaccgcggatctcaactccacaaatactacatgaagagacgcactctactgctctccctgctagcaacagaaattgaacggctgatcacctggtacaaccccctgagtgcccctgagctcgagctcgaccaggctggcgaaaactccgtcgccaactggagatctaagtatatctccctgagtgagaagcagtggaaggacaatgtgaacttagcttggtccatttcgccctatctggcagtccagctgccagcaagattcaaaaacactgaggccatcggaaatgaagtaactaggttggtgcgacttgaccctggggctgttagcgacgtccccgaggctatcaagtttctcgtgacctggcataccatagatgcagatgcccctgagctctcccatgtcttgtgctgggccccaaccgaccctcctaccggactgagttatttctcatcaatgtatcccccacacccactaaccgcacagtatggagtaaaggttctgagaagcttcccacctgacgccattttattctatattccacagatcgtgcaagccctgcgctacgataagatgggttatgtgagggagtatatcctgtgggcagcaagcaagagtcagctattggcccaccagttcatatggaacatgaaaaccaatatctacctcgacgaggagggtcaccagaaagatcctgatatcggcgacctgctggaccagctcgtggaggaaattacaggatctctttccggaccagcgaaagatttttaccaacgggagtttgactttttcaataagattaccaatgtgtccgctatcataaaaccatacccaaagggtgatgagcgcaaaaaagcttgcctgtcagccctgtcagaggttaaagtgcagccgggatgctacctcccctccaaccccgaggccattgtgctcgacattgattacaagtctggaacccccatgcagtctgccgcaaaggccccttacctggctaaatttaaggtcaaacgttgcggggtgagcgagttggagaaagaggggttgaggtgccgctcagatagcgaggacgaatgttccacgcaagaggccgacggccagaaaattagttggcaggcagctatcttcaaggtcggagatgactgtagacaagacatgctggccttgcaaattatcgacctgttcaaaaacatctttcaactggtggggttagacctcttcgtgtttccatatcgggttgtggcaacagccccaggatgtggagtaattgagtgcattcccgactgtaccagcagagatcaactgggccgtcagactgattttgggatgtacgattattttactagacagtacggagacgagtctactctggcattccagcaggcaagatacaacttcattcgcagcatggctgcgtattcattgctgttgttccttctgcagatcaaagaccgccacaatggcaatatcatgctcgacaaaaaggggcacatcatccatatcgatttcggatttatgtttgagtcctctcccggagggaatctggggtgggaaccagacattaagttgacggatgaaatggtgatgattatgggaggtaagatggaggccacccctttcaagtggttcatggagatgtgtgttcgaggatacctagctgtgcgaccctacatggatgcagtcgtgagcctggtgacattgatgctggatacggggttgccctgttttagaggacaaactatcaaattactgaagcataggttttcccccaatatgactgagagagaagcagcaaactttatcatgaaggttattcagagctgtttcttgagcaatcgttcacgcacttacgacatgattcaatattaccagaatgatatcccatactag

SEQ ID NO: 234577 - DNA, 264 bp, synthetic construct
  misc_feature 1..264: note = Description of Artificial Sequence: Synthetic coding sequence
  source 1..264: mol_type = other DNA
atgtgtcctgtcgacttccacggcatattccagctggatgaacggcgaagagacgcggtgatagctctgggaatcttcttgatcgaaagtgacttgcaacataaggactgtgtcgtcccctatctgcttagactactcaaaggtttaccaaaggtgtattgggtggaagaatccacagcacgtaagggacgaggagcacttcctgtggccgaatcctttagtttctgcctcgtgacactactcagcgatgttgcctaccgctag

SEQ ID NO: 234578 - DNA, 1959 bp, synthetic construct
  misc_feature 1..1959: note = Description of Artificial Sequence: Synthetic coding sequence
  source 1..1959: mol_type = other DNA
atgtctggtcagtcactgaccgaccgcattaccgctgcacagcattctgtgaccggctccgcggtgagcaaaactgtttgtaaagccaccacccacgagatcatgggccctaaaaagaagcacttagactacctgatccagtgcaccaatgagatgaacgtgaacatcccacaacttgcggattccttgttcgagagaaccacaaattcaagttgggtcgttgtgttcaaaagtctgatcacaactcaccacctgatggtatatggaaatgaacggtttatccagtatctggctagccggaacactctgttcaacctctctaattttctagacaaatctggtctgcagggatatgacatgtccaccttcatccgccgatattcccgctacctcaatgaaaaagcagtgtcctatcgtcaggtggcttttgattttacaaaggtgaagaggggagccgacggtgtgatgaggactatgaatacggaaaaattgctcaaaaccgtccctatcattcagaatcaaatggacgccctgctggacttcaacgttaattctaatgaacttaccaacggggttatcaacgccgcttttatgctgttattcaaggacgctatccgcttatttgccgcatataacgaaggcatcataaacctacttgagaaatattttgatatgaaaaagaatcagtgcaaagaaggactcgacatctacaagaaattccttacccgcatgaccagaatctcagaattcctgaaagtggccgagcaggtaggaatcgaccggggagatattccggatctgtcccaagcaccgagcagcctgctggatgccctagaacagcacctggccagcctggagggcaagaagatcaaagattcgaccgctgcgagtagagctacaactctatctaacgcagtctcctcacttgccagtaccggactctccctgaccaaggttgacgaacgggaaaaacaggcagcgctggaagaagagcaggccagactgaaagccctgaaagagcagcgcctcaaagaactcgcaaaaaaaccgcatacgtcccttacaaccgccgcttcacccgtctccacttcagctggtggcattatgacagctcctgcgattgacatcttttcgaccccctcatcctccaactccaccagcaaactcccaaatgacctgctagacctgcagcagccaactttccatccttccgttcaccccatgagcaccgcatctcaagtggccagcacctggggcgaccctttttccgccactgttgacgccgtggatgacgccatacccagcctgaacccatttctgactaagtcgtccggagatgtgcatcttagcataagttcggatgtgagcacattcactactagaacgccaacccacgagatgtttgtcggattcacaccaagccccgttgctcagcctcaccctagcgccggtctgaatgtggatttcgaaagtgtatttggcaacaaatcaactaacgttatagtggattctgggggatttgacgaactgggaggactactgaagcctactgtcgctagtcagaatcagaatctgccagtggccaagctgcccccttccaagttagtctcagacgatctggatagctcccttgctaacctggtgggaaaccttggcattggaaatggaaccacgaaaaatgacgtgaattggtctcagcccggagagaaaaagctcaccgggggaagtaactggcaacccaaggtggcacccacaaccgcttggaatgccgcaacaatggctcccccagtgatggcatatcccgctaccacaccgacaggtatgatcggctatggtatacccccacaaatgggcagtgtccctgtaatgacgcagccaacactgatttacagtcagccagtgatgagaccaccaaaccccttcggaccagtgtctggagcccagatacagtttatgtag

SEQ ID NO: 234579 - DNA, 1959 bp, synthetic construct
  misc_feature 1..1959: note = Description of Artificial Sequence: Synthetic coding sequence
  source 1..1959: mol_type = other DNA
atgagtggccagagtctcacagatcgaattaccgccgctcagcattcggtgacaggctccgccgtctctaaaacagtgtgtaaggccacaacccatgaaattatgggtccaaagaaaaagcacctagactacctgattcagtgtactaacgaaatgaacgtgaatataccccagttggcggattcgctgttcgaacgaacaacgaactctagttgggtggtggtctttaaatccctgattacgacccaccatctgatggtgtacggcaacgagagatttatccaatacttagcatccagaaatactctctttaacctgtccaacttcttggataagagtggtctccagggctatgacatgtcaacctttatccggagatactctcggtatctgaacgaaaaggcagtttcctatcgccaggtggcctttgattttacaaaagttaagcggggagctgacggcgtgatgagaacaatgaacacggagaagctgcttaagaccgtgccgataattcaaaaccagatggatgccctgttggattttaacgtgaacagtaacgagctaaccaacggggttatcaatgcagcattcatgttactgtttaaagacgcaatcaggctcttcgctgcctataacgagggcattatcaatctcctcgagaagtatttcgacatgaagaagaatcagtgtaaagaagggctggatatctataagaaatttctgacacggatgacccggatcagtgagtttctgaaagtggcagagcaggtgggtatcgacaggggagatatccccgatctttcgcaggccccaagttcactcctcgacgctctggaacagcacctggccagcctcgaaggcaaaaaaattaaagactccacagctgcctctagagcgactactctgtcgaatgccgtcagctctctggccagcactggtctgagcctgaccaaggttgatgaacgagagaagcaggcagccctggaggaggagcaggcacggctcaaggccctgaaagaacaacggcttaaagagttagctaaaaagcctcacacctctcttacaacagcagcttctcctgtcagtacgtccgccggaggcatcatgactgcccctgctattgacatcttctccacacctagctctagtaattccacaagtaaactgccaaatgaccttctcgacctccagcaacccactttccaccccagcgtgcaccctatgagcacagcctcgcaagtggcatccacctggggggatcccttcagtgcaaccgtcgacgcggtcgatgatgccattccttctttgaatcccttcctcactaaatcttcgggtgacgtgcatctgagtatcagcagcgacgtgagcacttttactacccgcacacctacacacgagatgttcgtgggatttacgccgtcccctgtggcacaaccccatccgagcgctgggctgaatgttgattttgagtcagtttttggtaacaagtctaccaatgttatcgtagactcagggggttttgacgagctggggggattgctgaagcccacagttgcctcccaaaatcagaacctccccgtcgctaagctccccccatccaagctggtgtctgatgacctggactccagcctcgccaatctggttggcaatcttggaattggtaatgggaccacaaaaaatgatgtgaactggtcacagcccggagagaagaaactcaccggcggatccaattggcagcctaaagttgccccaacaacggcctggaatgccgctactatggctcctcccgttatggcctatcccgcaaccacccccacaggaatgatcggctacggtatcccaccccagatgggctccgtacctgtgatgacgcagcctactctgatctactcccaacccgtaatgcggcctcccaaccctttcggcccagtcagcggcgctcaaatacagttcatgtag

SEQ ID NO: 234580 - DNA, 1938 bp, synthetic construct
  misc_feature 1..1938: note = Description of Artificial Sequence: Synthetic coding sequence
  source 1..1938: mol_type = other DNA
atgtcgggccagagcctgaccgaccggattacagctgctcagcatagcgtgacaggctccgctgtttccaagaccgtctgcaaagcaactactcacgagataatgggcccaaaaaaaaagcatttggattatttgatccagtgcaccaatgaaatgaatgtcaatattccacagctggccgacagtctattcgaacgcactaccaattcctcctgggtggtcgttttcaagagtctgatcactacacatcatctgatggtttacggaaatgaacgttttattcaatatctggccagtcggaatacattgttcaatctgtcaaactttttagataaatccgggctgcagggctacgatatgtctacgtttattcgccgttatagcaggtatcttaacgagaaggctgtctcctataggcaggtcgcatttgatttcaccaaggttaagagaggcgcagacggcgtcatgagaaccatgaatacggaaaaactgctgaagacagttccaatcatacagaatcagatggacgccttgctggactttaatgtaaacagcaacgaattgactaatggcgtgatcaatgccgcattcatgctactgtttaaggacgctattcgtctgttcgctgcttacaacgagggtatcatcaaccttttagagaagtattttgatatgaaaaagaaccagtgcaaagagggtcttgacatttataaaaagttcctgacgcgtatgactcggatctctgagttcctcaaagtggctgagcaggtgggtattgacagaggagatatccccgatctgagccaggccccatcatccctgctcgatgcattggaacagcatctcgcaagcttggaggggaaaaaaataaaggatagtactgctgctagccgcgcaacaaccctgagcaatgcggtgtcctccttggccagcaccggtttgagcctaactaaggtggacgagcgagaaaaacaggcagctctggaagaggaacaagccagacttaaagcactgaaagaacaaaggctaaaggagttggcaaagaaaccgcatacaagtctgactaccgctgcctccccagtgtctaccagcgccggagggattatgacagcccctgcaatagatatttttagtacccccagttcctcaaattccacatcaaaactgcctaatgatcttcttgatctgcagcaaccgacctttcacccatcagttcatcccatgagtacagcatctcaggtggcttcaacctggggcgatgcggtcgatgatgccataccgtctctgaaccccttcttaaccaagtcctcaggagacgtgcacctgtccatctcttccgatgtgagcactttcacgacacgaactcctactcacgagatgtttgtggggtttaccccctcccccgtggcgcagccacacccctccgccggactgaacgtggatttcgaatccgtgttcgggaacaaatcaacaaatgtgattgtcgacagcggtggctttgatgagttgggcggtcttcttaaaccgaccgtggccagccagaatcagaatctgccagtagctaaactacctccctctaaacttgtcagtgacgacctggatagcagcctggccaaccttgtagggaacttgggcattgggaacggcaccacaaagaacgatgtaaactggtctcagcccggagagaaaaagctgactggagggagcaactggcaacccaaggtggctcctaccactgcatggaacgccgctaccatggcaccccctgtaatggcctaccccgcaaccacacctaccggtatgattgggtatggaattcccccacagatgggctcagtacctgtgatgactcagcccaccttaatctactcccagccagtaatgcgacctcccaatccctttgggccagtctctggagctcaaatacagtttatgtag

SEQ ID NO: 234581 - DNA, 1833 bp, synthetic construct
  misc_feature 1..1833: note = Description of Artificial Sequence: Synthetic coding sequence
  source 1..1833: mol_type = other DNA
atgtcaggacagtccctgacagacagaataaccgcagcccaacatagtgtaactgggagcgcggtaagcaagacagtgtgcaaggccactacacatgaaatcatgggcccaaaaaaaaaacacttggattacctgattcagtgtacaaatgagatgaacgttaacatcccacagctcgcagattccctcttcgagcgcactaccaatagttcatgggtggtggtattcaaaagcctgatcacaacacaccatcttatggtgtacggtaacgaaaggtttatccaatacttggcctccagaaacaccctgtttaatctgtccaacttcctcgacaaatccggactgcaaggatatgatatgagcacctttatccggaggtacagccgctatttgaatgagaaggctgtgtcataccgccaggtggcctttgacttcacaaaggtcaagcgaggtgccgacggagtgatgcggacaatgaatacggaaaagcttctgaagacagttcccataatccaaaaccagatggatgccctgttagactttaacgtgaacagtaacgaattgactaacggtgttatcaatgcggcttttatgctgctgttcaaggatgccattcgactgttcgccgcatataatgagggaatcattaacttgttggagaagtacttcgacatgaagaagaatcagtgcaaggaggggctcgatatttataagaaattcttaactcgaatgacgcgcatcagtgaatttctgaaggtggccgaacaagtgggcatcgacaggggtgacattcccgatctgtctcaggctcccagctccctcctggatgccctcgaacaacacctggccagcctggaaggaaaaaagattaaggattccactgccgcaagccgagccaccacccttagtaatgccgtctcgtcactggcatccaccggcctttctttgaccaaagtggatgagcgggaaaagcaggccgcattggaagaggaacaggcccgtcttaaagccctgaaggaacagaggctgaaagaactcgccaagaagccacatacttcattaactaccgccgcaagcccggtgtctacatctgccggaggaatcatgacagcacctgccatcgacatattcagcaccccctcctcctctaactccacctccaagctgccaaacgacctcttggacttgcagcagcctacctttcacccctccgtccacccgatgtcaactgcatctcaggttgccagcacttggggcggatttaccccctcccccgtggctcagccacacccctctgccggactgaatgtagacttcgagtctgtgttcggcaacaaatcaacaaatgtgatcgtggacagcgggggtttcgacgaactcgggggactactcaagccgacggtggcttcgcagaaccagaatcttcccgttgctaagctgcctccctcaaagttggtgagtgacgacctggattcaagtctggccaacctggttgggaatctggggataggtaatggcactaccaaaaacgatgttaactggagccagcccggagagaaaaagctgaccggtggttcaaattggcagcccaaagtggctcctaccacagcgtggaatgccgcaaccatgaacgggatgcacttccctcaatacgcacctcccgtaatggcctacccagccacgaccccgactggaatgattggttacgggattcccccacagatggggtccgtgcctgtgatgacgcagcctaccttaatttactctcaaccggtgatgcgcccaccaaatccattcgggcctgtttccggagcccaaattcagttcatgtag

SEQ ID NO: 234582 - DNA, 1656 bp, synthetic construct
  misc_feature 1..1656: note = Description of Artificial Sequence: Synthetic coding sequence
  source 1..1656: mol_type = other DNA
atgaacgtaaacattccacagctggcagactcactgtttgaacgcacgaccaattcctcctgggtcgtggtcttcaaaagtctcataactacccatcaccttatggtgtatggcaacgaaaggtttatccagtatcttgcatcccggaatacgttgtttaacctgtccaacttcctggacaaatcaggcctgcaaggctatgatatgtctactttcatcagacgatatagcaggtatttgaacgagaaggcagtgagctatcggcaggttgcctttgactttactaaggtgaagcgcggagccgacggggtgatgcgaaccatgaacaccgagaagttgctcaagacagtgccaatcatccagaaccagatggacgccctgttggactttaatgtgaactctaacgagctgaccaatggcgtgatcaacgccgcattcatgctgctgtttaaggatgccatacgtctttttgccgcatataacgaggggataatcaatttgctagagaagtacttcgacatgaaaaaaaatcaatgcaaggagggtttagatatctataagaagtttttgacaaggatgacccggataagtgagttcctgaaggttgcagaacaggtgggtattgacaggggagatattcctgatctttcccaagccccttccagcctacttgatgccctggagcagcacctggcctcgctggaggggaagaaaattaaagatagtacagctgctagcagagcgactaccctctccaatgctgtaagttctcttgcaagtacagggctgtctctgaccaaagtcgacgaacgggaaaaacaggccgcactcgaggaagagcaggctcgactgaaggccctcaaggagcagcgcctcaaggaattagccaaaaaacctcatacctctctgacaactgccgcaagtcccgtcagcacatccgctggcggaataatgaccgcgccagccatagacatcttcagcacgccatccagctccaactccacgtcaaaactcccaaatgacctactggacctgcagcagcccacattccacccatctgtacacccgatgagtacagcttcccaagttgcgtcgacatggggcggttttacacctagtccggtggcccaacctcaccctagcgcgggacttaacgttgactttgaatctgtgtttggaaacaaaagtactaacgttattgttgattctggcggattcgatgagttgggtgggctgcttaagccaactgtggcgtcacaaaatcagaacctccctgtggctaagttgccgccatctaaactggtttcagatgaccttgactcttcactggctaacctcgtcggcaacctgggtattgggaatgggaccactaaaaacgacgtcaattggagccagccgggtgagaagaaactgaccggtggttcaaactggcagccaaaggtagcgcctaccacagcttggaacgctgccacgatggcgcctccagtcatggcttatcctgcgacaacccctaccggcatgattggctatggcatcccaccgcagatggggtctgttcccgtgatgacccaacccaccctgatctactctcagcctgtcatgcgacctcctaatccctttggtccagtgagtggggctcagattcagtttatgtag

SEQ ID NO: 234583 - DNA, 1455 bp, synthetic construct
  misc_feature 1..1455: note = Description of Artificial Sequence: Synthetic coding sequence
  source 1..1455: mol_type = other DNA
atggcttgtagaggaggcgcaggtaacgggcacagagcatcagccacattatccagagtgtctccgggtagcctgtatacatgtcgaacaagaactcacaatatctgcatggtcagtgactttttttacccgaacatgggcggtgtggaatctcatatctaccagctgagccaatgtctgatagagcgcggtcacaaagtaattatcgtgacccatgcttacggcaatcgcaaggggataaggtacctgaccagcggcctgaaggtgtactacctgccacttaaggttatgtacaaccagagtacggccaccactctctttcactctctgcccctcctgagatacatcttcgttcgggagagggtcactatcattcactcgcacagctctttttccgcaatggcccatgatgctctgtttcatgctaaaactatgggcctccagaccgtattcactgatcattctctgtttgggttcgctgacgtttcctccgtactcaccaataagctccttaccgtgtccctctgcgatactaaccacattatctgtgtctcctacactagcaaagaaaacaccgtcctccgagccgctttgaaccccgaaatcgtaagcgttatcccaaatgcggtggaccccaccgacttcacacctgatccattcaggagacacgactctatcactattgttgtcgtatcgaggctggtgtacagaaagggcatcgaccttttgagcggaatcattccagaattgtgccagaaatatccagatctgaatttcatcatcggtggagagggccctaagcgcatcatcctcgaggaggttcgcgagagatatcagctgcatgaccgcgtgcggttattgggagcattagaacataaggacgtcagaaatgttctggtgcaggggcacatctttctcaatacctctttgactgaggctttttgcatggcaatagttgaagccgcatcttgcggtctccaggtcgtctccacccgtgtgggtggcatccccgaggtgctacctgagaacctgatcattctctgtgagccctccgttaaatctctttgcgagggtctcgaaaaggctatattccagctgaaatcgggcacgctcccagcccctgagaatatccacaacatcgtcaagaccttttacacgtggcgcaacgtagccgagcgcactgagaaagtgtacgatcgcgtctccgtggaggctgtcctccctatggacaaaaggttggaccgactgatttcccattgcgggccagtgacaggctacatctttgccctgcttgcagttttcaatttcctgtttttaatctttctgagatggatgacccccgacagcataatagacgtggccatagatgccacagggcctagaggcgcatggaccaataactactctcattctaagagaggcggagagaataacgaaatctccgagacacgctag

SEQ ID NO: 234584 - DNA, 510 bp, synthetic construct
  misc_feature 1..510: note = Description of Artificial Sequence: Synthetic coding sequence
  source 1..510: mol_type = other DNA
atggccatcgtggaagctgcctcttgtggcctgcaggtggttagcactcgagtgggtggcatacctgaggttctccccgaaaatttaattatactatgcgaaccctctgtcaaatcactgtgcgaaggcctagaaaaggctattttccagttgaagtctggtacattacctgctccagagaacatacacaacatcgtaaagacattctacacctggcgcaacgtagcagaacgcaccgagaaggtgtacgaccgagtgtccgtggaggctgtacttcctatggacaagagactcgaccgcctcatatctcactgcggccctgtgacaggctacatcttcgcactgctcgccgtcttcaactttctcttcctgattttcctcaggtggatgactccggatagcatcatcgacgttgccattgatgcaacaggaccaaggggcgcttggacgaacaattattcccactccaaacgaggaggtgagaacaatgaaatctccgagaccagatag

SEQ ID NO: 234585 - DNA, 753 bp, synthetic construct
  misc_feature 1..753: note = Description of Artificial Sequence: Synthetic coding sequence
  source 1..753: mol_type = other DNA
atggagctgacaggaatagacttgttaagcggaattattcctgagctatgccaaaagtatccagatttaaattttatcatcggaggggaggggccaaaaaggattatcctcgaggaagtccgggagagatatcagttgcatgacagggtgagactgctgggggcattggagcacaaagatgtccgaaacgtattggtccagggtcatatattcctcaatacatcactcaccgaggccttttgcatggctatagttgaagctgcctcctgtggactccaagtcgttagcacccgggtcggcggtatacctgaggttctgcccgagaatctgatcatcctctgcgaaccctcggtgaagtcgttgtgcgagggcttggagaaagcaatatttcagctgaaaagcgggacattgccagccccagaaaacatccacaatatcgtgaagacattctacacctggaggaatgtcgccgaaagaacagaaaaggtctacgatcgtgtcagcgtcgaggccgtcctacccatggacaagaggcttgaccgcttgattagccattgtggcccagtgacagggtatatctttgctctgctggcagtttttaactttctcttcctgatcttcctgagatggatgacgcccgactcgatcatcgacgtcgcgatcgacgccaccggcccacggggagcatggactaataactattcgcatagcaaacggggaggagaaaacaatgagatcagcgaaacacgctag

SEQ ID NO: 234586 - DNA, 1665 bp, synthetic construct
  misc_feature 1..1665: note = Description of Artificial Sequence: Synthetic coding sequence
  source 1..1665: mol_type = other DNA
atgaggaggcctctgtctaaatgtggcatggaaccaggcggaggcgatgcaagcttgacactccacggcttgcagaaccgatcacacgggaagatcaagctgcgaaagcgcaagagcacactgtacttcaacacccaggagaagagcgccaggcgtaggggggacctcctcggcgagaatatctacctcttgcttttcacaatcgccctgcggattctgaactgctttttggtccagacctccttcgttccggacgaatattggcagtcactagaagtgagccaccacatggtttttaactatgggtatttgacttgggagtggacagaacggctgcggtcctatacataccctttaatattcgcttcaatctacaagattctgcatctcctcggcaaggatagtgtacagttacttatctggattcctagactggcacaggccctgttatcggccgttgcagacgtccgattgtacagcctgatgaaacagttggaaaaccaagaggtggccaggtgggtctttttctgccagctctgctcatggtttacttggtattgctgtactcgtacattgacgaacaccatggaaaccgttcttactattatcgcactgttttattacccactcgagggaagcaagtctatgaacagcgtgaagtactcaagtctcgtcgctctggcctttataatcaggcccactgccgtgatattatggaccccacttctgttcagacacttttgccaagagccacgtaaacttgacctgatattacaccacttccttcccgtcggatttgttaccttgtccctctcactgatgatagacaggattttcttcggtcagtggactctcgtgcagttcaatttccttaagttcaacgttctgcagaattggggaaccttctatggcagccacccctggcactggtacttcagccaaggttttccagtaatcttgggcactcacttgccgttctttatccatggctgctacctggcacccaaaagatatcgcatcctgctggttactgtgctgtggacgctccttgtgtacagcatgctctcacataaggaattcagattcatctatcccgttctacctttttgcatggtgttttgtggctattctctcacacacctgaaaacctggaagaagcccgctctctccttcctctttctcagtaatctgtttctggctttatatactggcctggtgcaccaaagagggactcttgatgtgatgagtcatatccagaaagtgtgttataataatccaaataagtccagtgcatccatttttatcatgatgccatgccattccactccctactatagccatgtgcactgccctttacccatgaggtttcttcagtgcccccctgatctgaccgggaaatcacattacctcgacgaggccgatgtcttttacctgaatcccctgaactggttgcatcgagagttccatgatgatgcatcgctgccaacccacttgatcacattttccatcttggaggaggaaatttccgcatttttgattagcagtaattacaagagaaccgccgtcttcttccacacccacctgccagagggtcgaatcgggagccatatttatgtgtatgagagaaagctcaaggggaaattcaatatgaaaatgaagttctag

SEQ ID NO: 234587 - DNA, 1080 bp, synthetic construct
  misc_feature 1..1080: note = Description of Artificial Sequence: Synthetic coding sequence
  source 1..1080: mol_type = other DNA
atggagacagtattgacaatcattgcccttttctattacccattggaggggagtaagagtatgaatagtgtgaaatactcctcactggtggccctcgccttcatcatccgaccaacggccgttatcctgtggacccctctattgtttagacatttttgtcaggagcccagaaaactcgatcttatcctccaccattttctgcctgttggcttcgtaactctttcccttagcctgatgatcgatcggatcttttttgggcagtggacactcgttcagtttaattttctgaaatttaacgttttgcagaactggggtacattctatggatctcatccttggcactggtacttctcacagggtttccctgtgattctcggcacccacctgcccttctttatccatggatgctacctcgccccaaagaggtaccggattttgctggtcacggtgctgtggacacttttagtttattcaatgctaagtcacaaagagttccgctttatttaccctgttttgcccttctgcatggtgttttgcggatattcactaacgcacctcaaaacatggaagaagccggcactgtcgttcctgtttctgtctaatttgttcctggctctgtacacgggcttggtacatcagcgaggcacgctggacgtcatgtcccatatacagaaagtttgctacaataaccccaacaagtcctcagcctctatcttcattatgatgccgtgtcacagtactccttactattcccacgtgcactgtccccttcccatgcggttcctgcagtgcccacccgacctgaccggcaagtcccactacctggatgaagcggacgttttttacttgaacccacttaattggctgcatcgggaattccatgatgatgcttcgctccccactcacctcatcacgtttagcatcctggaggaggagatctcagcctttcttatctcttctaactacaaaaggacagcagtgttcttccacacacacctccctgaggggaggattggaagccatatctacgtatatgagaggaagctgaaaggcaagtttaacatgaaaatgaaattttag

SEQ ID NO: 234588 - DNA, 894 bp, synthetic construct
  misc_feature 1..894: note = Description of Artificial Sequence: Synthetic coding sequence
  source 1..894: mol_type = other DNA
atgtacgcacagccagtgaccaatacaaaagaggtgaagtggcagaaagtcctgtacgagagacagccttttcctgacaattacgtggataggcggttcttggaagagctcaggaaaaatatccacgcaaggaaatatcagtactgggccgtggtgttcgaatctagcgtggtgatccaacagctgtgctctgtttgcgttttcgtcgttatctggtggtatatggacgaaggattgctggcccctcactggcttctgggcacaggcctggcaagcagcttaatcggatacgtgctgtttgaccttattgatggtggcgagggcagaaaaaagtcaggccagaccagatgggcagatctaaagagcgcgttggtatttatcacattcacttacgggtttagtcctgtgctgaagactctaactgagtcagttagtaccgatactatttacgccatgagtgtgttcatgctgctgggacatctgatattttttgactacggggcaaacgctgccatcgtgtctagtactctgtcccttaacatggccatcttcgcatctgtgtgcttggcctctcgcctccccaggagtcttcacgcctttatcatggttacctttgcaatccaaattttcgccctgtggcctatgctgcagaagaaactaaaggcttgtactccacggtcttatgtgggagtgacactcctgttcgcatttagtgccgtgggcggattattgtccatttctgcagttggggctgttctgttcgccctacttctgatgtctattagctgcttgtgcccattctatttgatcaggctccagctgttcaaagagaatatccacggtccttgggacgaggccgaaataaaagaggacctttccaggtttttgtcttag

SEQ ID NO: 234589 - DNA, 894 bp, synthetic construct
  misc_feature 1..894: note = Description of Artificial Sequence: Synthetic coding sequence
  source 1..894: mol_type = other DNA
atgtatgcgcagcctgtgactaacactaaagaggtgaagtggcagaaggtgctgtacgaaaggcaaccgttccccgataattacgtggaccggcgtttcctggaggagttgcgtaaaaatattcatgctcggaagtaccaatattgggccgtggttttcgagtccagtgtcgttattcagcagctgtgctcagtttgcgtgttcgtcgtcatctggtggtacatggatgaaggcctactggcgcctcactggctcttagggaccggattggctagcagtcttataggttacgtcctcttcgatctcattgacggaggcgaaggtcgaaaaaagtcaggtcagaccaggtgggccgacctaaaatctgcactcgtctttattacttttacttacggcttctcccctgttctgaagactttgactgagtccgtgagtacagatactatctatgcgatgtccgtgttcatgttactaggccatttaattttttttgattatggcgcaaatgccgcaattgttagctctaccttatcactgaacatggcaatcttcgcatctgtctgcctggctagccgcctcccaagaagtctgcacgcttttatcatggttactttcgcgatccagatcttcgctctgtggcccatgcttcagaaaaagttaaaagcttgcacccccaggagttacgtgggagtaactctgctcttcgccttcagtgccgtaggcggtcttctgagtattagcgcagtaggcgctgttctattcgcactgctcctgatgtctatctcttgcctgtgtccattctatctgatcaggctccagctctttaaggaaaatatccatggcccttgggatgaggccgaaattaaagaggacctctcgcgcttcctgtcttag

SEQ ID NO: 234590 - DNA, 894 bp, synthetic construct
  misc_feature 1..894: note = Description of Artificial Sequence: Synthetic coding sequence
  source 1..894: mol_type = other DNA
atgtatgctcagcctgtcaccaatacgaaagaggtgaaatggcagaaggtgctgtatgagagacagccattccccgacaattatgtggatagacgctttctggaagaattaaggaagaatattcacgccagaaagtaccaatactgggcagtggtctttgagagctccgtagtcatccagcagctgtgcagcgtgtgtgtatttgtagtcatttggtggtacatggacgagggcctgctagcgcctcattggctgctgggtaccgggctcgcatcctccttaataggatacgtactttttgatttgatcgacggcggagaggggcgaaagaaaagtgggcagacaaggtgggcagaccttaagtcagctctggtgttcatcacgtttacctatggattcagcccagttctgaaaacgcttactgagtcagtgtccaccgacactatttacgccatgtccgtatttatgttgctgggccatctgatctttttcgattatggagccaatgccgcaatcgtgagtagcacacttagcctgaacatggcgatcttcgccagtgtgtgcctcgccagtagattgccccgttcattgcacgctttcatcatggtcacctttgcaattcaaatattcgctctctggccgatgctccagaagaagttgaaagcctgcacccccagatcttacgtgggtgtgacactcctattcgccttctccgccgttgggggactgctctcaatctctgccgttggagccgttctctttgccctgctgctgatgagcatcagctgcctttgccccttctacttaatccgactccaactcttcaaggaaaacatccacggtccttgggatgaggccgagatcaaggaggacctgagcagatttctgagttag

SEQ ID NO: 234591 - DNA, 660 bp, synthetic construct
  misc_feature 1..660: note = Description of Artificial Sequence: Synthetic coding sequence
  source 1..660: mol_type = other DNA
atgaaagataacgacatcaagcggctgctgtatacacaccttctgtgcatctttagcatcatcctatccgtttttatcccttctctgtttctcgaaaactttagtatcttagaaactcacctaacctggttgtgcatatgcagcggctttgtcaccgcagtgaacctagttctttatctcgtagtgaaacccaacacatcttctaaacggtccagtctcagccacaaggtgaccgggttccttaaatgctgtatctactttttaatgagctgttttagcttccatgtgatttttgttctgtacggtgccccactgatcgagctggctctcgaaacgttcttattcgccgtcatcctgtccacgtttaccacagtgccatgcctttgccttctgggacccaatctgaaggcatggttgagagtctttagtagaaacggcgtgacttcgatctgggagaacagtctccagatcactactatttcgagctttgttggcgcttggctgggcgcattaccaattccccttgattgggagcgcccatggcaagtttggcccatctcatgcacccttggtgcgactttcgggtatgtggctggtcttgtgatttccccattgtggatatactggaaccgaaagcagctcacctataagaataactag

SEQ ID NO: 234592 - DNA, 621 bp, synthetic construct
  misc_feature 1..621: note = Description of Artificial Sequence: Synthetic coding sequence
  source 1..621: mol_type = other DNA
atgaaggacaacgacatcaaacggctcctctacacccatttgctttgcatattcagtatcattctatccgtgtttattccctcattgttccttgaaaatttttcaattttggaaacacatttgacatggctgtgtatctgttctggctttgtgaccgcagtgaacctggtactgtaccttgtggtgaagcctaatacgtcatccaaacgcagcagcctgtcgcataaagtcacgggattcctcaaatgctgcatctactttcttatgtcttgctttagttttcacgtaatcttcgtcctttacggagccccactgatcgaactggccctggagacgttcctatttgccgtaatcctctccacctttactacagttccatgcctctgcttactcggcccaaacctcaaggcatggctgcgtgtcttctcacggaatggggtgactagcatctgggagaacagtttgcagataacgaccatctcctctttcgtaggtgcctggctgggcgcattgccaatccccctggactgggaaaggccctggcagatgactgttgagcgcaaaaggtccacctacagatccctccatgtcccctgtcggggactgggaactgtgaaatag

SEQ ID NO: 234593 - DNA, 150 bp, synthetic construct
  misc_feature 1..150: note = Description of Artificial Sequence: Synthetic coding sequence
  source 1..150: mol_type = other DNA
atgaaggacaatgatatcaagaggctcctgtacactcatctgttatgtatattctctatcattctgagcgtattcatccctagcctgtttctcgaaaacttctccatcctggagacgcaccttacctggctctgcatttgcagcgggtag

SEQ ID NO: 234594 - DNA, 999 bp, synthetic construct
  misc_feature 1..999: note = Description of Artificial Sequence: Synthetic coding sequence
  source 1..999: mol_type = other DNA
atggccgtgaccgatagcttgtcacgcgctgcaaccgtcctcgcaaccgtgctgttactgtccttcgggtccgttgcagcttctcacatcgaggatcaggccgagcagttcttccgatccggccatacgaataattgggcagtccttgtatgcacatctaggttctggtttaactaccgtcatgtggcaaatacactttccgtgtataggagcgtgaagcgtcttggcatacctgattcgcatatcgtcctgatgctggccgatgacatggcctgcaatccaagaaaccctaaacccgctacagtgttcagccacaaaaacatggagttgaacgtctacggggacgacgtggaggtcgactatcgttcatacgaggtgaccgttgagaattttctcagggtgttgaccggaagaattcccccaagcacaccccgatccaaacgcctgctttcagatgaccgtagcaacatactgatctatatgacagggcacggcggtaacggctttcttaagttccaggattcggaggagattaccaacatcgagctcgcggatgccttcgagcaaatgtggcaaaaaagaaggtacaacgagcttctctttatcattgatacctgtcagggagcatctatgtacgagcgcttctactctcccaacatcatggctctagcaagctcccaggtgggagaggattccttatctcaccagcctgatcctgccataggagtgcatctgatggaccgttacactttctatgtcttggagttcttagaggagattaaccctgccagtcagaccaacatgaatgacttattccaggtttgccccaaaagcctgtgcgtcagcactcctggccacagaacagacctgtttcagagagaccccaagaacgtccttataacagatttcttcggttctgtccggaaagtcgaaataacgacagagacaattaaactgcagcaggactccgagataatggaaagcaggtactccagttag

SEQ ID NO: 234595 - DNA, 1188 bp, synthetic construct
  misc_feature 1..1188: note = Description of Artificial Sequence: Synthetic coding sequence
  source 1..1188: mol_type = other DNA
atggctgttactgatagcctgagcagagcagccaccgtcttggctaccgtcttactccttagcttcggtagtgttgctgcgagccacatcgaagaccaggcagaacaattctttagatccgggcatactaataactgggcagtgttggtttgtacctcacgtttctggttcaattatcggcatgtggccaacactttgtctgtttatcgctctgtgaagaggctgggtatcccagattcccatatcgtgctgatgcttgccgacgatatggcctgtaatcccagaaatcctaagcctgcgacagtgttctctcacaaaaatatggagctaaatgtgtacggcgacgacgtggaagtggattatcggtcatacgaggtgactgtggaaaactttctgagagtcctcacaggccgaatcccgccttctactcccagatcaaagagactgcttagcgacgaccgatctaatattttaatttacatgaccggtcacggcggaaatgggttcttgaaattccaagattccgaagagattaccaacatagagctggccgatgcctttgaacagatgtggcaaaagagaagatataacgagctgttatttattatagatacatgccagggcgctagtatgtatgaacggttttatagcccaaatatcatggccctcgcgtcctcccaagtcggggaagacagcctgtcacaccaacccgatccagcaataggggtccacctgatggataggtacacattttacgtgctcgagttcctggaggagatcaaccctgcttcccaaacaaacatgaacgacctgttccaggtgtgccccaaatccctgtgcgtgtcaacccccggacaccgcacggacctgtttcagagggaccctaaaaacgtgctcatcaccgatttttttggctctgtgagaaaggtcgagataaccacagagacgatcaaactgcaacaggacagtgaaattatggagtccagctataaagaggatcagatggacgaaaagctgatggaacctctcaagtacgctgaacagctgcccgtggcccagatcatacatcagaaacccaaactgaaagattggcaccctcccggagggttcatactgggcctgtgggccctaatcattatggtttttttcaagacctatgggataaagcacatgaagttcattttttag

SEQ ID NO: 234596 - DNA, 960 bp, synthetic construct
  misc_feature 1..960: note = Description of Artificial Sequence: Synthetic coding sequence
  source 1..960: mol_type = other DNA
atggcagttaccgattccctttccagagccgctaccgtgctggccaccgtcctcctgctgagtttcggctccgtggctgccagccacattgaggatcaggcagaacagttcttccggtctggacatactaataactgggcagtgcttgtcacagtcgagaattttcttcgggtgctgacaggccgaatcccgccttctactcccaggagcaaacgtctcttgtcagacgaccgcagcaacatcctgatctatatgaccgggcatggagggaacgggttccttaagttccaggattcggaggaaatcacgaacatagaattagccgacgcttttgaacagatgtggcagaagcgcagatataacgaactcttgttcattattgatacgtgccaaggggcatcgatgtatgaaagattctactcccccaatattatggccctggcctcctcacaggtgggcgaggattctctcagtcatcagcccgatcccgctattggcgtccatctcatggatagatacacattttatgtactcgagttccttgaagagatcaatcctgcaagccagaccaacatgaatgacttattccaggtgtgcccaaagagtctgtgtgtgtccacccccggtcacaggactgatttgttccagcgggacccaaagaacgttcttatcactgacttcttcggatctgtgcggaaagtggagatcacgaccgagactattaagctgcagcaggacagtgagattatggagtcaagctataaggaggatcagatggacgaaaaactgatggaaccactgaaatacgctgaacagttgccagtggctcagatcatccaccagaagcctaaactgaaggactggcatccccctggcggatttattttaggcctttgggcactcataattatggtcttcttcaagacttacggcatcaagcacatgaaattcattttctag

SEQ ID NO: 234597 - DNA, 906 bp, synthetic construct
  misc_feature 1..906: note = Description of Artificial Sequence: Synthetic coding sequence
  source 1..906: mol_type = other DNA
atggctgtcactgactccctgagccgcgcagctactgtcttggctactgtgcttctactgagtttcgggagtgtggctgcctctcacatagaagttactgtggaaaacttcttgcgagtactcaccgggaggatccctcccagtactccacggtcaaagcgcttgttgtcagacgacaggtctaatattctcatctatatgactggacatggtggtaacgggtttttgaagtttcaggattccgaggagataacgaacatcgagctggcggacgcgtttgagcagatgtggcagaagcgacggtacaacgagttactattcatcatcgacacctgccagggcgcttcaatgtatgaaagattttatagcccgaatattatggctctggccagttctcaggtcggggaggacagcctaagccaccaaccggatcccgcaattggggtgcatctgatggatagatataccttctatgtcctcgagtttttggaagaaatcaatccagcctctcagaccaatatgaatgacctctttcaggtgtgtccaaagtcactctgtgtgagcacaccaggccacagaaccgatctgttccagcgggaccctaaaaacgtgttaattaccgatttttttggatcggtacggaaggtggaaattactacagagacaatcaagctccagcaggacagtgagattatggagagctcatacaaggaggaccagatggacgagaaactcatggagccgctcaagtacgcggaacagctgcccgttgctcagattattcaccaaaaaccaaaattgaaagattggcaccctcccggaggttttatccttgggctgtgggccctgataataatggttttttttaaaacatacgggattaaacatatgaagtttattttctag

SEQ ID NO: 234598 - DNA, 558 bp, synthetic construct
  misc_feature 1..558: note = Description of Artificial Sequence: Synthetic coding sequence
  source 1..558: mol_type = other DNA
atgggcaaaaaacagaataagaagaaggtcgaggaggtgctggaggaagaagaggaggagtacgtggttgaaaaagtccttgatcgtcgagttgtgaaagggaaagtggagtacctgctgaagtggaaggggttcagtgacgaggataatacctgggagcctgaggaaaacttggattgccccgaccttattgcagaatttctgcagtcgcaaaaaaccgcacacgagaccgacaagtctgagggtgggaaaagaaaagctgacagtgactcagaagataagggagaggagtctaaaccaaagaaaaagaaagaagagagcgaaaagcccagaggttttgcacggggacttgagccagaaaggataatcggggctaccgattcttccggcgagctgatgttcttgatgaagtggaagaatagcgacgaagcagacttggtccccgcaaaagaggcaaatgtgaagtgtccacaggtggtcatcagcttttacgaagaaaggttaacctggcactcatatccctcagaggacgacgataagaaggacgataagaactag

SEQ ID NO: 234599 - DNA, 735 bp, synthetic construct
  misc_feature 1..735: note = Description of Artificial Sequence: Synthetic coding sequence
  source 1..735: mol_type = other DNA
atggaggccatgtggctgttgtgtgttgccctcgcagtgctggcctggggctttctctgggtttgggatagcagtgagaggatgaagtccagggaacagggaggcaggctgggggcagaatcgcgcaccctgctggtgatcgctcacccagacgacgaagccatgttctttgctccaacagttcttggcctcgctcggctgagacactgggtttacctcttgtgcttctcagcgggaaactattacaatcagggggaaacaaggaagaaggagctgttacagtcttgcgacgtcctggggatccccctgtcctcagtcatgatcatcgacaatagggatttccctgacgacccaggaatgcaatgggacacagagcacgtggcgagagtgctgctgcagcacatcgaggtgaatggaatcaatcttgtcgtgactttcgatgcgggaggagtctcgggccactcgaatcacattgccttgtacgccgctgttagagttttgtgcgcccatgcaagcgtatgtgaatgcgcagctcaagttcatctgccgagtggcagcgctttggtgagtgctagttatgctggttgcccactgcgtgctcaacagcaaagaagcggcactggccaggaatcccacgtgcttcccccacagcccgctccactcgttcccccacctctccactacttactccctgtccacgagaatcagttaacagaactgcctctgaagccatag

SEQ ID NO: 234600 - DNA, 1272 bp, synthetic construct
  misc_feature 1..1272: note = Description of Artificial Sequence: Synthetic coding sequence
  source 1..1272: mol_type = other DNA
atgggctcaactaagcactggggtgaatggctgttaaacctgaaggtggctcccgcaggggtatttggggtcgcgtttctggccagggtggccctcgtattctatggggttttccaggaccgaacattgcacgttcgctatactgacatcgactaccaagtgttcactgatgccgcacgctttgtaacagaaggcagaagcccatacctccgagcaacttacaggtatacacccctgctgggatggctattgactccaaacatctatctgagcgagctgtttggcaaattccttttcataagctgtgacctgttaacagcctttttactttataggctcttgctccttaagggactgggcaggcgccaggcctgcggatattgtgtcttctggctccttaatcccctgcctatggcggtgtcgtccagagggaatgccgattcaatcgtggcctccctcgtcctaatggttctctatttaatcaaaaagaggctggttgcctgcgctgcagtgttctatggctttgctgtccatatgaagatctatcctgtgacttacatccttccgataacgctgcaccttctgcccgatagagacaatgataagagtctgcggcaatttaggtatacctttcaagcatgtctttatgagctgctgaaaagactctgtaatcgcgcagttcttttattcgttgcagtggccggtctgaccttttttgccctgagttttggattctactatgaatatgggtgggagtttctggaacacacctatttttaccacctcacgcggcgtgatattcggcacaatttcagcccatatttctacatgttgtatctgactgcagaaagtaaatggtccttctcgctgggtattgctgccttcctgccacagttgatcctgctttctgctgttagtttcgcctattatagggaccttgttttttgttgctttctgcatacctccattttcgtgacatttaacaaagtgtgtaccagccagtacttcctttggtacctgtgtcttctgcccttagtgatgcctttggtcagaatgccttggaagagagctgtggtattgctcatgctatggtttatcggacaagccatgtggctggcaccagcctatgtgctggagtttcaaggaaaaaatactttcctatttatctggctggctggcctgttctttctgcttattaattgctccatactcattcagattattagtcactacaaagaagagcccctaactgaacgcatcaagtatgactag

SEQ ID NO: 234601 - DNA, 2796 bp, synthetic construct
  misc_feature 1..2796: note = Description of Artificial Sequence: Synthetic coding sequence
  source 1..2796: mol_type = other DNA
atgctgcttttcttcaccctcggcctgctgatccattttgtattttttgcttctatcttcgacatctacttcacctccccgctggtgcacggaatgaccccacagtttacacccctgccccctcctgcacggaggctcgtcctctttgtggctgacggtttgagggccgatgccctctacgaactcgacgagaatgggaactcacgggcaccttttattcgtaacatcatcatgcatgagggctcgtgggggatcagccatacaagggttccaaccgaatccaggcctggacatgttgcacttatcgcgggattctatgaagacgtgtccgctgttgccaagggatggaaagaaaatccagtcgaattcgatagtctgttcaacgagtcaaagtacacatggtcgtggggtagtccagatattctccctatgtttgcgaaaggggcttcgggcgatcatgtgtacacatacagctacgacgcaaagcgggaggatttcggcgctcaggatgcgaccaaactggacacttgggttttcgacaacgtgaaggacttcttccatcacgcaagaaacaaccagtcactcttttccaagataaacgaggagaagattgtcttttttctgcacctgctaggaatagataccaatgggcacgcgcatagacccagctctagagattacaaacacaatatcaagaaggtggacgatggagtgaaagaaattgtttcaatgtttaaccacttctatggaaatgatgggaaaactactttcatatttacctccgatcacggtatgaccgattggggctcccatggagcaggccatccaagcgaaactcttaccccgcttgtcacatggggggcaggcattaaatacccacagagagtgtccgcacaacagttcgacgatgcgtttttgaaggagtggaggctcgagaattggaagaggctggacgtcaatcaggcagacatcgctccactcatgacatctttgatcggggtgccattccccttaaatagcgtcggtatcctgcctgtggactacttaaacaacacagatctcttcaaggctgagagcatgtttacaaatgccgtgcagattcttgaacagtttaaagtaaagatgactcaaaaaaaagaggtcacattgcctttcttgttcacacctttcaaactcttgtcagatagcaagcagttcaacattttgcgaaaagcaaggtcatacatcaaacacagaaagttcgacgaagtcgtgagcttgtgcaaagagttaattcatctcgcactcaaaggactcagctattatcacacatacgatcgcttcttcctgggagtgaacgtggttatcggcttcgtggggtggatttcctatgcctcactcttgattatcaagtcacactctaacctgatcaagggcgtaagcaaagaggtcaagaagccaagccacctcctgccctgtagttttgtggcaatagggatactggtggctttctttctgctgatccaagcttgtccctggacctattatgtatacgggctgctgccccttcccatttggtacgctgtgctccgggagtttcaagtgattcaggacctagtggtgtccgtacttacgtatccactgtcccacttcgtcggataccttctggcctttactttggggattgaggtgctcgtgctttcgttcttctatcgatacatgctaacagctggtttaacagcatttgcagcctggcccttcctgacccggctgtggaccagagccaaaatgacatctcttagctggacattttttagcctgctgctggctgtttttcctctaatgccagtggtgggccgtaagcctgacatctccctggtaatgggtgccggactgctggttcttttgttatcactatgcgtggtgacttctctgatgaagaggaaggattctttcatcaaagaagaactcctagtacacctacttcaggtcctctcaacggtcctgtccatgtacgtggtgtattccactcagtctagcttgctgcgaaaacagggcctgcccctgatgaatcaaattatttcatgggctacccttgcttcatctcttgtggttccgttactgagcagccctgtattgtttcagcgacttttttccattctgctctccctgatgtcgacatacctactgctgtctacaggctatgaggcattgtttcctctggtactgagctgcctgatgtttgtatggatcaatattgaacaagaaaccctgcagcaaagcggagtatgttgtaaacagaaattgacatcgatacagttctcttacaatactgacattacccagtttcgacagttgtatctagacgacatcaggagggcgttctttctggtattctttctagtgacagctttttttggaacaggcaatatcgcgagcattaatagttttgatctggcatctgtgtactgttttttgactgtattctccccatttatgatgggtgcgctcatgatgtggaagattctaattccttttgtcctagtgatgtgcgcgttcgaagcagttcaactaactactcagctctcttccaagtccctcttcttgatagttctcgtgatcagcgatataatggccctgcatttcttctttcttgttaaagattacggttcttggctggatatcggaaccagcatctcacactacgtgatagtaatgagcatgacaatcttcctcgtttttctgaacggtctcgctcagctgctgaccaccaagaagctgcgcttgtgcggcaaaccaaagtcacactttatgtag

SEQ ID NO: 234602 - DNA, 2796 bp, synthetic construct
  misc_feature 1..2796: note = Description of Artificial Sequence: Synthetic coding sequence
  source 1..2796: mol_type = other DNA
atgctgcttttttttacgctgggtttgctcatacacttcgtatttttcgctagtatctttgacatctatttcacctcacctctcgtgcacggcatgacgccacagtttacccccctgccacctccggcaagaaggttggtgctgtttgtcgctgatggacttcgcgcagatgcattatacgagctggacgaaaatggtaacagtcgcgcaccatttattaggaatataatcatgcacgaagggtcctggggtataagccacaccagagtaccaaccgagagtaggcccggacatgtagcattgattgcagggttttatgaggacgtgagcgccgttgctaagggatggaaagagaaccctgtggagttcgacagccttttcaacgaatctaaatacacttggtcttggggcagccccgacatcctcccaatgtttgctaaaggggcaagcggggaccatgtgtacacatatagttatgacgccaagagagaagatttcggggcacaagatgctactaaattggatacctgggtgttcgacaatgtcaaggattttttccatcacgccaggaataatcagagcctgttttccaagattaatgaggaaaagatcgtttttttcctgcatctccttggaattgatacaaacggccacgcacatcgaccctcatcccgtgactacaagcacaatattaaaaaggtggacgacggtgtgaaggagatcgtgtccatgtttaatcatttttatggcaatgacggcaaaactacttttatctttacctctgaccatggaatgaccgactggggtagccatggcgcaggacatccttccgagaccttgacccccctcgttacttggggcgcagggattaagtacccgcagagggtcagtgcacaacagttcgatgatgccttcttgaaggaatggagactggaaaactggaaacgtttggacgttaaccaggctgatatagccccactgatgacctccttaatcggggtgccttttcctcttaatagtgttggaatcctgcctgtggattatcttaacaacaccgacctgttcaaagccgagtcgatgtttacaaacgcagtgcagattctagagcagttcaaagttaagatgacccagaagaaagaggttaccctgcccttcctcttcactccgttcaagctgctgagcgatagtaaacagttcaatatcctccgtaaggctagaagctacatcaagcatagaaagtttgacgaagtggtgagtctctgcaaagaactgatccacttagcgttgaaagggttgtcatactaccacacttacgaccgcttcttccttggagttaatgtcgttatcggattcgttgggtggattagttatgcctcactgctaattataaagagccactccaatctcatcaagggcgtatcaaaagaggtgaaaaagccatcccacctcctgccctgctcctttgtcgcaatcgggattctggtcgctttcttcctcctcatccaggcctgcccctggacgtactatgtgtacggtctactgcccttgccaatatggtatgccgttctacgagagtttcaagttatccaggacctggtggtgtccgttttgacttatcctttgagccatttcgtgggctacctgctcgcatttactctaggaatcgaggtgctggtgctttcattcttttaccgatatatgctcaccgcaggtctgaccgcttttgcagcatggccatttctcacccggctctggactcgggcaaaaatgacctccctgagctggacatttttttccctgctcttggctgtgtttcctctcatgccagttgtgggacgcaagccagacatcagcttagtgatgggcgctggcttattggttctgctgctaagcctttgcgttgttaccagtctgatgaaacgcaaggattctttcataaaggaagaactgctggtccacctgttgcaagttttgtcaaccgttctctccatgtacgtggtatactcaactcagtcaagcctccttcgcaaacaggggctccctttaatgaaccagattatctcttgggccacattggctagctctctcgtggtccctcttctgtcctcgcctgtgctgttccagcggctcttcagcattctcttatccttgatgtctacatatttactccttagtacaggttatgaggcactgttcccactcgtgctgagctgtctgatgttcgtgtggatcaatatagagcaagaaaccctccagcagtccggggtctgctgtaaacagaaactcacctccattcagtttagttacaataccgatattactcagtttaggcagctctatctggacgacatccggagagctttctttctggtatttttcttggtgactgcttttttcgggacaggcaacatagcatctatcaactccttcgacttggccagcgtatactgttttctgacagttttcagccccttcatgatgggggctttaatgatgtggaagattcttataccgttcgtgctcgtgatgtgcgcttttgaggccgtccagctgacaactcagctgtcaagtaagtctctttttctgatcgtgctagttatttcagatataatggccttacactttttttttctggtcaaagattacggctcttggctcgatattgggacatctattagccactacgttattgtgatgagcatgacaatcttcctggtgttcctcaatggccttgcccagctgctgacaacaaaaaagcttaggctgtgtgggaagccgaaaagccactttatgtag

SEQ ID NO: 234603 - DNA, 405 bp, synthetic construct
  misc_feature 1..405: note = Description of Artificial Sequence: Synthetic coding sequence
  source 1..405: mol_type = other DNA
atggtggagaattctccctcccctctgcccgagcgggctatttacggttttgtgctcttcctcagctctcagtttgggttcattctgtatcttgtgtgggcatttatacccgagagttggttgaattccctcggcctgacatactggccccagaaatattgggctgtggctttacccgtctatttactcatcgctatagttatcggttacgtcctcctcttcggaattaatatgatgtcgacttcgcccttggacagtattcataccataaccgataattacgccaaaaaccaacagcagaaaaaataccaagaggaagcaattcccgcacttagagatatttcaatctccgaagttaaccaaatgttttttctcgcagctaaagagctgtacacaaagaactag

SEQ ID NO: 234604 - DNA, 327 bp, synthetic construct
  misc_feature 1..327: note = Description of Artificial Sequence: Synthetic coding sequence
  source 1..327: mol_type = other DNA
atggtactgtaccttgtctgggccttcatccctgaaagttggctgaacagtctcggcctgacttactggccgcagaagtattgggccgtcgctcttccggtctacctgctgatagcaatcgttattggatacgtcctcctgtttggtataaatatgatgtccacaagccctctagattctatccatactattactgacaactatgcgaagaaccagcagcagaagaaataccaggaagaagccatccccgctctgagggatatcagcatatcagaggtgaaccagatgttttttctggccgctaaggagttatacactaagaactag

SEQ ID NO: 234605 - DNA, 405 bp, synthetic construct
  misc_feature 1..405: note = Description of Artificial Sequence: Synthetic coding sequence
  source 1..405: mol_type = other DNA
atggtcgagaacagtccatctccactgcctgaaagggcaatctacggattcgtcctgtttctttcctctcaatttggcttcatactgtaccttgtgtgggcgttcatacctgagtcctggctaaatagcctgggtttgacatactggccacagaaatattgggccgtcgcactgcctgtctacttactgattgctatcgtcataggatatgtcctcttattcggcattaacatgatgagcacaagtccactggactcaattcatacaattaccgataattacgccaaaaaccagcagcaaaaaaagtaccaggaagaagctatcccggcacttcgcgatatctcgatctcagaagtaaaccagatgttcttcctcgctgccaaagagttgtatactaagaactag

SEQ ID NO: 234606 - DNA, 405 bp, synthetic construct
  misc_feature 1..405: note = Description of Artificial Sequence: Synthetic coding sequence
  source 1..405: mol_type = other DNA
atggttgaaaactcccctagtccattgcccgaacgggctatctatgggtttgtgctgtttttatcatcgcaattcggatttatcttgtacctggtgtgggctttcataccagagagttggctaaactcacttggcttgacatattggccacaaaagtactgggcagtcgctcttcccgtgtatttgctgatcgcgatcgtgatcggctacgtgttgctgtttgggatcaatatgatgtccacctctccactggacagcatacatacgatcacagacaattatgcaaagaatcagcagcagaaaaaatatcaggaagaggcaatacccgctctcagagatatatccatcagtgaggtcaaccaaatgtttttcctggccgctaaagaactgtacactaagaattag

SEQ ID NO: 234607 - DNA, 78 bp, synthetic construct
  misc_feature 1..78: note = Description of Artificial Sequence: Synthetic coding sequence
  source 1..78: mol_type = other DNA
atggtgctgtatctggtctgggctttcattcctgagagttggctcaactcactggggttgacctactggccccagtag

SEQ ID NO: 234608 - DNA, 477 bp, synthetic construct
  misc_feature 1..477: note = Description of Artificial Sequence: Synthetic coding sequence
  source 1..477: mol_type = other DNA
atggtgcctcgctctacatcactcgcgttaattgtgtttctgtttcatcggctcagcaaagctccaggcaagatggtagaaaactctccttcaccattacccgagcgcgctatctacggattcgtactgtttttgtccagtcagtttgggttcattttgtatcttgtgtgggcctttatccctgagtcttggctcaattctctcggcctgacttattggccacagaagtactgggcagtcgccctgccagtctacctgttgatagcaatcgttattggatacgttcttctttttgggatcaatatgatgtcgacatctccactggatagcatccacacaatcaccgataattacgcaaaaaatcagcaacagaagaaataccaggaggaggctattcctgcactcagagacatttcaatcagcgaggtcaatcagatgttctttctcgccgcaaaggaactatatacaaaaaactag

SEQ ID NO: 234609 - DNA, 1848 bp, synthetic construct
  misc_feature 1..1848: note = Description of Artificial Sequence: Synthetic coding sequence
  source 1..1848: mol_type = other DNA
atggcaagagcctgcctgattcaacgtctccctattaaaagagactgcacacccgttttcgtgaggggcttgagctctccgtcggctgccatggccttgctgagtgaaggcctggacgaagttccagcagcctgtttatcgccctgtggccctcctaatcccactgagttgttcagtgagtcaagacgactcgcacttgaagagttagttgctggcggacctgaggccttcgccgcttttctccggagagagagactagcaaggtttctgaaccccgacgaggttcacgcaatactgcgtgccgcagagaggcctggcgaggagggggcagctgctgcagccgctgcagaagacagctttggcagctcgcatgattgtagtagcgggacatacttcccagagcaatccgacctcgagccacctttactcgagctgggttggccagctttttatcaaggggcataccggggagcaactcgggttgagacccactttcagccgcgaggagccggagaaggaggtccgtacggatgtaaggacgcgctccggcagcaacttagatctgccagagaggtaatcgccgtggtgatggatgtgtttacagatatcgatatttttagagatttgcaagaaatttgcaggaagcagggggtcgccgtgtacattctgctagatcaggctttactctcacagtttttagacatgtgtatggatcttaaggtgcatcccgagcaagagaagctgatgactgtgcggaccattacgggcaacatatactacgccagatctggtactaaaatcattggcaaagtgcacgagaaatttacccttatcgatggcatccgtgtggccaccgggtcgtattccttcacctggacagacgggaaattgaactcttcgaatctggtgatactctctgggcaggttgtcgagcacttcgaccttgaatttagaattctatacgcccagtctaaaccaatcagccctaaacttttaagtcatttccagagtagcaataaattcgatcatcttacaaatagaaaaccgcagtccaaggaactcactctcgggaatttgttgcgtatgaggctggcacggttgagctctactccaagaaaagccgacttggatccagaaatgcctgcagaaggaaaggcggaacggaaaccacatgactgcgagtcaagcacagtgtctgaggaagactacttctctagtcaccgggatgaattacagagtcgtaaagccatcgatgcagcaacccagaccgaaccaggagaagaaatgcccggtttgagcgtgtcagaggttggaactcagactagcatcacaactgcctgtgccggaactcaaactgccgtgatcacacggattgcatcctctcagactacaatctggtcacgcagcaccactactcagacagatatggacgagaacatattatttccacggggaacccaaagcacggaagggtccccagtctctaaaatgagtgtgagtcggagcagttctctgaagtcatcgtcatccgtcagctcgcagggatctgtcgcctcctccactggaagtccagcgagcatcaggacgaccgatttccataacccaggttaccctaagtacctcggtacgcctcacctcgagctttacctgtcagattccctgcgaaatctcaacaaagaacggcagttccacttcgctgggattaggagccgactgaatcacatgctggctatgctctctcgtcggactctgtttactgaaaatcatttagggctgcactccggcaacttctcccgagtgaacctgcttgccgtccgcgacgttgccttatacccgagctaccagtag

SEQ ID NO: 234610 - DNA, 1248 bp, synthetic construct
  misc_feature 1..1248: note = Description of Artificial Sequence: Synthetic coding sequence
  source 1..1248: mol_type = other DNA
atggccgctcccctggtcctggttctcgtggtggcggttactgtgagggccgcactgttcaggtcaagtctggcagagttcattagcgagagggtggaggtcgtgagccccctcagttcctggaaaagggttgtggaggggctgagcctcctggatctcggagtgtctccctactctggggctgtgttccatgaaatcacagatgctttgaccgccatagctttgtacttcgccatacaggactttaataaagttgtttttaagaagcagaaactgttactggagctggaccagtatgccccagacgttgctgagttaattcgaacaccgatggagatgcgctacatacctttaaaggtcgcacttttttacttgctaaacccctatacaatactgtcgtgtgtcgcgaagtccacctgtgctattaacaataccctcatagcctttttcattctcaccactattaagggctctgccttcttaagtgccatttttcttgctttggccacatatcagagtctctacccgctcacattattcgtgcctggcctgttgtacctgctccaacgccagtatatccccgtcaaaatgaaatccaaggctttttggattttctcctgggaatatgcgatgatgtacgtaggaagtttagtggtcattatttgtctctccttcttcctgctgagcagttgggatttcatacccgcagtatacgggtttattctgagcgtcccagatctgaccccgaacattggtctattttggtacttttttgccgagatgttcgagcatttctccttattttttgtttgcgtgtttcagataaacgtgttcttttatacaatcccactcgccattaagctcaaggaacatcccatcttcttcatgttcatacagatcgctgttattgctatctttaagtcttaccctaccgtgggagacgttgcactgtatatggcatttttcccagtatggaaccatttataccgattcctgaggaacatatttgtgctgacatgtattatcattgtgtgttcactgttatttcctgtgctgtggcacctgtggatatatgcagggagcgccaactccaacttcttttacgcaatcactcttacttttaacgtagggcaaatactgctgatctctgactacttctatgcctttctcagacgcgagtattacctgacccacggtctgtatctgacagccaaagacggaacagaggccatgctggtcctgaagtag

SEQ ID NO: 234611 - DNA, 513 bp, synthetic construct
  misc_feature 1..513: note = Description of Artificial Sequence: Synthetic coding sequence
  source 1..513: mol_type = other DNA
gtgagtgtacctacccatttggtgtgcccacgaactcctttgtcacctcccgctgctgtgcatacctgcgaaaacgaagaacagtccctccttgacctgttcttgggagtgtgccacgacattaatgtgttcttttatacaatacccctagcaattaagctcaaagagcacccgatattctttatgttcattcaaattgccgtgattgctattttcaagagctatcccactgtcggggatgtggccctgtacatggcgttctttcccgtgtggaaccacttatacagattcctgagaaatattttcgtcctcacatgtataataatcgtctgtagccttttgtttcccgtgttgtggcacctgtggatttacgctggctcggctaatagtaacttcttttatgctatcacgctcaccttcaacgtgggccaaatactgctgatctccgactacttctacgccttcctgcgccgtgagtactatctgacacacggactgtatttaacagcatag

SEQ ID NO: 234612 - DNA, 1272 bp, synthetic construct
  misc_feature 1..1272: note = Description of Artificial Sequence: Synthetic coding sequence
  source 1..1272: mol_type = other DNA
atggctgctccgctagtcctggttttagttgtggcagtcactgttagggccgcactgttccgcagcagcctcgcagagttcataagtgaaagagtcgaagtggtgtcccctctgagcagctggaaaagagtcgttgagggcctgtctctccttgacctgggggtgtcaccatactccggcgcagtctttcacgagacccccctcattatctacctgttccactttctcattgattacgcggagctcgtttttatgattacagacgcgttgaccgcaattgccctgtacttcgccatacaggatttcaataaagtagtgtttaaaaaacagaagctgctgctggaactggaccagtacgcccctgacgtagctgagctgatccgcacgcctatggagatgcgctacatccctctgaaggtggcattattctacctcctgaatccttatactattctgtcttgcgtggccaaatccacttgcgcaattaacaataccctgattgctttcttcatactgaccactattaagggaagtgcttttctcagtgctattttcctggcccttgccacatatcaatcactgtaccccctgaccctgttcgtcccaggcctgctctatctgctgcagagacaatatataccggtgaagatgaagtctaaggctttctggatctttagctgggagtatgcaatgatgtacgtcggctctctggtggtgataatctgcctgagtttcttcctgctgtctagctgggactttatacccgcagtatacggatttattctcagcgttcccgatctgacccctaacattggcctcttctggtacttcttcgcggaaatgttcgagcacttttcccttttcttcgtgtgtgtgtttcagatcaatgttttcttttatacaatccctcttgcaatcaaactcaaggaacatccaatattctttatgttcatacaaattgcagttattgccatctttaaatcttaccccacggtaggggatgtcgctctgtatatggccttcttcccggtttggaaccacctgtatcgatttctgagaaacatctttgttttgacatgcatcattatcgtttgtagtctgctttttccagtactgtggcacttatggatatacgcaggctctgccaacagcaattttttttacgccattaccttgacttttaacgtgggacagatgggcttctgcggtgatcgcatggcgggtacttgcccagaggcaatccgcgctgcaggagaccgcacccccagttag

SEQ ID NO: 234613 - DNA, 1482 bp, synthetic construct
  misc_feature 1..1482: note = Description of Artificial Sequence: Synthetic coding sequence
  source 1..1482: mol_type = other DNA
atgtggccacaggatcctagccggaaggaggtgcttcggtttgcagtgagctgccggattctaacgttgatgctccaggccttgtttaatgccattattcctgatcaccacgccgaggcgtttagccctcctagactcgcgccttctgggtttgtggatcagttggtagagggcctgctgggagggctgtctcactgggatgccgagcacttcctctttatcgcagaacacgggtatctgtatgaacacaatttcgctttcttccctggtttcccccttgcactgttagtggggactgaactgctgcgtccgctgcgcggactgcttagcctgcgatcatgcttattaatttctgtcgcctcgctgaacttcttgttctttatgttggccgctgtggcgctgcatgacctgggctgcctggttctgcattgcccacaccagtccttctacgctgcattgctgttttgcctcagccctgccaacgtattcttggccgcaggctactctgaggccctctttgccctgctgactttcagtgccatgggacagctagaaagaggtcgcgtgtggacgagcgtactcctgttcgcatttgccactggtgtcaggtctaacggccttgtgtccgtcgggttcctcatgcactcacagtgccagggcttcttcagtagcctgaccatgttgaatccgttaaggcagctattcaaactgatggcaagtctctttctgtcagtcttcactctgggcttgccttttgcgctctttcagtattacgcatatacacaattctgtctcccagggtctgccaggccgattcctgagccccttgtgcagctcgctgtggacaaaggatatcggatcgcggagggaaacgagccaccttggtgcttttgggacgtcccactgatctatagctatatccaggatgtgtactggaatgtcggctttctgaagtattacgagctcaaacaggtcccaaacttcctcctcgccgctcccgtggccatattggtcgcgtgggctacctggacctacgtcaccacccacccttggctttgcttgaccctgggactccaaagatcaaagaataacaaaactctagagaaacccgatctcgggtttctctctccccaggtatttgtgtacgtggtccatgcggcagtgttgttgctgttcggcggtttatgcatgcatgttcaggtactgactcgcttcttaggctctagtacacccattatgtattggtttccagcccacctgcttcaggaccaggaaccactgctgcgctccctaaaaaccgtaccctggaagcctctcgccgaggacagtccacccggtcaaaaagtgccccgtaaccccatcatgggcttgctctatcattggaagacatgctcgcccgttacaaggtacatcctcggatacttcctgacctactggctgctcggtctcctcctgcattgcaactttcttccctggacctag

SEQ ID NO: 234614 - DNA, 1482 bp, synthetic construct
  misc_feature 1..1482: note = Description of Artificial Sequence: Synthetic coding sequence
  source 1..1482: mol_type = other DNA
atgtggccgcaggatccatctaggaaggaggtgcttagattcgctgtaagttgtaggatcctgacactgatgttgcaggccttgtttaatgcgattatcccagaccaccacgcagaagccttctcccctccacggttagctccgagcggttttgtggaccaattggtggaaggattgctgggcggtctgagccactgggacgccgagcacttcctttttattgccgaacatgggtatttgtatgagcacaactttgcattttttccgggattcccactcgcactgctggtggggaccgagctgcttcggccactccgcggactccttagtctgcggtcgtgtctgctgatctccgtcgcatccttgaactttctcttctttatgcttgcggctgtcgcgttacacgacctggggtgccttgtgctacactgcccgcatcagtccttctacgccgcactcctgttctgtctgtctcccgctaatgtcttcttggccgcaggctactccgaagctctgttcgccctgcttacctttagtgcaatgggccaactggaaaggggacgcgtgtggacgagtgttcttctgttcgcgtttgccacaggggtgaggtccaatggccttgtttccgttggattcctcatgcattcccagtgccaaggtttttttagctctcttaccatgttaaatccattgaggcagctttttaaactcatggcatccctgttcctgtctgttttcaccctgggcctccctttcgccctattccagtactacgcgtatacacagttctgtctaccaggctcagctcggcctattccagagcctttagtgcagctcgccgtcgataaagggtatcgaatagccgagggtaatgagcccccttggtgcttctgggacgtcccactgatatactcttacatccaggatgtctactggaatgtggggtttctcaagtactacgaactaaagcaggtgcccaattttctattggctgcacccgtcgccatcttggtggcctgggccacctggacctatgtcacgacccatccttggttgtgtctgaccttgggtctacagcgcagcaagaataacaagacactcgagaaacccgatcttggcttcttatctccccaagttttcgtgtacgttgtccacgcagccgtgcttctcctgtttggcggtctgtgcatgcacgtgcaagtattgaccaggttcctgggttcctcgacacccattatgtattggtttcccgctcatctcttgcaagaccaagagccattgttacgcagcctgaaaacagtgccttggaaacctttagcagaagacagtccacctgggcagaaagtgcctcggaatccaatcatgggattgctgtatcactggaaaacctgtagtccagtgacacgatacatcctgggttattttctcacttactggctacttggacttctacttcattgtaattttttgccttggacgtag

SEQ ID NO: 234615 - DNA, 219 bp, synthetic construct
  misc_feature 1..219: note = Description of Artificial Sequence: Synthetic coding sequence
  source 1..219: mol_type = other DNA
atgtggccgcaggatccctctagaaaggaagtgttgcgattcgcagtgtcctgcagaatactgaccttgatgttgcaggccttgtttaacgctattattcctgaccatcatgccgaagctttttctccaccaaggttggcaccttcaggcttcgtggatcaattagtagagggactgcttggcggtctgtcacattgggacgctgagcattttttgtag

SEQ ID NO: 234616 - DNA, 366 bp, synthetic construct
  misc_feature 1..366: note = Description of Artificial Sequence: Synthetic coding sequence
  source 1..366: mol_type = other DNA
atgtggccacaagaccctagcagaaaggaagtgttgagattcgccgtgagttgtcgcatcctcacactaatgctgcaagcattgttcaacgccattattcccgatcaccacgccgaggcgttttcaccaccccgactggcgccatccgggttcgtcgaccagctcgttgaggggcttctggggggactgtcacattgggacgccgaacactttctttttattgccgaacacggttatctgtacgaacacaactttgcctttttccctggatttccccttgctctcctggtaggcacggagctgctgagaccattgcggggattgctgtcgttgagatcctgtttattgatctcagtggccagctag

SEQ ID NO: 234617 - DNA, 798 bp, synthetic construct
  misc_feature 1..798: note = Description of Artificial Sequence: Synthetic coding sequence
  source 1..798: mol_type = other DNA
atgccttcctcccagattaccatgcagaaaccatctctgctactggcatggccacctcaggccttgtggacaaactcttggaagtactatgcgtatacccagttttgtctgcccggttccgccagaccgattcccgagcccctggtgcagctggcagttgacaagggttaccggatcgcagaaggaaacgaacctccttggtgtttctgggatgtgcctttaatttactcctatattcaggacgtgtattggaacgtgggcttcttgaagtactatgagctcaagcaggtccctaatttcctacttgccgctcctgtggccatcctggtggcctgggctacctggacctatgttactacgcacccctggctgtgtctaacactgggccttcagagatcgaagaataacaagacactagagaagccagatctgggctttctatctcctcaagtttttgtatacgtcgtacacgccgctgtgctcctattgttcggtgggctatgcatgcatgtgcaggtgttgacacggtttctgggatcttcgaccccaattatgtactggttccctgcgcatttgttgcaagaccaggaaccattactcaggagcttaaaaaccgtgccttggaaacctctggccgaagattccccaccaggacaaaaggtgcctcggaatcctataatgggcctgctgtatcattggaaaacctgttcccccgtgaccagatacattctgggatacttcctgacgtattggctgctgggcttacttcttcattgcaatttcctaccttggacatag

SEQ ID NO: 234618 - DNA, 549 bp, synthetic construct
  misc_feature 1..549: note = Description of Artificial Sequence: Synthetic coding sequence
  source 1..549: mol_type = other DNA
atgtggcctcaggacccaagccgtaaggaggtactcagatttgctgtatcctgccgaatccttacccttatgctccaggccctttttaatgctattatcccagatcaccatgctgaagccttctctcctccgaggctagcaccttccgggttcgtcgaccagctcgtcgagggtttgctggggggtctctctcattgggacgctgaacactttctctttatcgcagagcatggttatttatacgagcataattttgccttttttcccggatttcccttggccctcctcgttgggactgaactcctgaggcctctgcgcggtctgctctccttaaggtcctgcctgttgatcagtgtggcaagcctcaactttctgttttttatgctcgcggctgtcgccctgcacgatctggggtgccttgtcctgcactgcccacaccagagcttctacgcagcgcttctgttctgcttgtcccctgccaatgtctttctggcagccggttactccgaagcgctgtttgccctcctgacatttagcgctatgggctag

SEQ ID NO: 234619 - DNA, 1515 bp, synthetic construct
  misc_feature 1..1515: note = Description of Artificial Sequence: Synthetic coding sequence
  source 1..1515: mol_type = other DNA
atgtccgagaaacagatgaaggaagcatttgtcagtaatctcaacggaacaaccgtgctcgaaataacccagggactatgcttcccagctttctgtatcctgtgcagaggttttttgattatcttttcccaatacctgtgttcattctcccctacctggaaaactcggttcctgactgatttcgtggttctgatagttcccatggttgctaccctgaccatctgggccagctttattctacttgagctgctgggggtgatcattttcggggctggtttgctctatcaaatttacaggagaaggacctgttatgcccgtctgccttttttgaagatcctggagaaattcctgaatatcagtttagagtccgaatataatccagcgatttcatgcttccgggtcattacttcagcctttacagctattgcaatactggccgtggactttccccttttcccgagacgctttgccaagactgagttgtacggcacaggcgcaatggattttggcgtggggggattcgtcttcggaagtgccatggtgtgcctcgaggtgagacggaggaaatatatggagggaagtaagcttcactatttcaccaattcactgtatagcgtttggcctctggtgttcctcgggatcggtaggttggccatcatcaaaagcattgggtaccaagaacatttgaccgaatatggagttcactggaatttcttcttcactatcatcgtggtgaagcttatcacaccactcttgctgatcattttcccgctgaacaagtcatggatcatcgctttagggatcacagttttgtatcagctagcgctggacttcacttctctaaagagactcatcctgtacggcaccgacggctctggcacccgagttgggctgttgaacgcgaaccgggaaggcatcatcagtacgcttgggtacgttgcaattcacatggcaggggtgcaaactggattgtacatgcataaaaacaggagtcacattaaggatctcatcaaagtggcttgtttcctacttcttgctgccatctccctgtttatctccctttacgtggtccaggtaaatgttgaggcggtgagccggcgaatggcaaatctggcattttgcatatggattgtcgccagcagtctcatccttcttagttccctgctgctaggtgacatcatactgtctttcgccaagtttcttatcaaaggcgcactggttccttgctcgtggaaactgatacagtccccggttacaaataaaaagcactctgagtctcttgtccccgaggccgagagaatggagccctctctgtgcttgattaccgctcttaatcgtaagcagctgatattttttctgctttcaaatattacgactggcctgataaacctcatggtggacacccttcacagcagtactctgtgggccctctttgtcgtcaatttgtacatgttttccaattgcctcattgtctatgtcctctacctgcaggacaaaacagtccagttttggtag

SEQ ID NO: 234620 - DNA, 318 bp, synthetic construct
  misc_feature 1..318: note = Description of Artificial Sequence: Synthetic coding sequence
  source 1..318: mol_type = other DNA
atgtcggaaaagcagatgaaggaagcattcgtaagtaacttaaacgggacaacggtgttggaaattacccagggcctgtgcttcccagcattttgtatactgtgtagaggttttctgattattttcagccagtacctatgttcgttcagtcctacctggaaaaccaggttcctgacagacttcgtggtgctgatagtgcctatggttgcgaccttaaccatatgggctagctttattttactcgaactcctgggcgtgatcattttcggcgctggacttctgtatcaaatttaccgcaggcggacatgctacgcatag

SEQ ID NO: 234621 - DNA, 831 bp, synthetic construct
  misc_feature 1..831: note = Description of Artificial Sequence: Synthetic coding sequence
  source 1..831: mol_type = other DNA
ctggccgcacgggtggccgcagtgagagccgcagcttggctactcctgggagcggctactggactgacacgcggaccagcggcagcctttactgcagcacgcagtgatgccggaattcgcgctatgtgctccgaaataatattgcgccaagaggtgctgaaggacggatttcaccgagatttgctaatcaaggtgaaattcggcgaaagcatagaggatctgcatacatgtagactattgataaaacaggatattccagctgggttgtacgtagatccttatgagctggccagtttgagagagaggaatatcactgaagctgtgatggtcagcgaaaacttcgacatcgaggccccaaattatctttccaaggaatccgaggtgctgatttatgctagacgcgacagtcagtgtattgattgcttccaggcctttctcccagttcactgtcggtatcataggcctcacagcgaggatggggaggcaagcatagtcgtcaacaacccggatcttctgatgttctgcgaccaagccggatctcgacgaatgatccgcttcagatttgattcttttgacaagacaatcgaattccctattctaaaatgttgggcccactctgaagtggctgcaccctgtgccctggaaaacgaagacatctgccaatggaacaaaatgaagtacaaaagtgtatacaaaaatgttattctgcaggtgccggtgggcttaactgtccacacatcattggtatgttcagtgaccctgcttattactattctctgctcaacattaatcctagtggccgtgttcaagtacgggcacttctcactatag

SEQ ID NO: 234622 - DNA, 654 bp, synthetic construct
  misc_feature 1..654: note = Description of Artificial Sequence: Synthetic coding sequence
  source 1..654: mol_type = other DNA
atgtgtagtgagatcatcctcagacaagaagtactcaaggacggctttcatcgagatctactgatcaaggtcaagttcggcgaatccatagaagatttgcatacctgtagactcctgattaagcaggatattccagcgggtttatacgtggacccatacgagctagcctcgctgagggagaggaatattaccgaagccgtgatggtctccgagaacttcgacattgaggcccctaattacctgagcaaggagagcgaggtccttatatacgcgaggcgggatagtcagtgtattgattgctttcaggcttttctacccgtccattgtcggtaccatagacctcactcagaagatggcgaagcaagtatagtggtgaataatcctgatttgctcatgttctgtgatcaggagttcccgatcctgaagtgctgggcccattctgaagtggcagccccatgcgcacttgagaacgaggacatctgtcaatggaacaagatgaagtataagagcgtatataagaatgttatactacaggtccctgtgggtctcaccgtgcacacgagcctagtctgcagtgtgaccctcttgattacaattctgtgttccactcttatccttgtggctgtttttaaatacggccatttcagcctatag

SEQ ID NO: 234623 - DNA, 777 bp, synthetic construct
  misc_feature 1..777: note = Description of Artificial Sequence: Synthetic coding sequence
  source 1..777: mol_type = other DNA
ctagctgccagagtggctgctgtgcgggcagcggcttggttacttctgggagcagccaccggacttacccgcggacctgcagccgcattcaccgccgctcggagcgatgccggaatcagagctatgtgttctgagatcatcctgaggcaggaggtgctcaaagacggtttccatagagatctcctgataaaagtgaagtttggggagtcaatagaggacctccacacatgcagactcctgataaaacaggatatacctgcgggtttgtatgtggatccctacgaactcgcctccctgcgggaacgaaatatcacagaagctgtgatggtttccgagaacttcgatattgaagccccaaactatctgtccaaggagagcgaagtactcatctatgcccgacgggactctcaatgcatagattgttttcaggcctttctcccggttcactgccggtatcatcggccacattcagaggatggcgaggcgtccatcgtagtcaacaatccggatctgctgatgttctgtgaccaggaattccccatattgaagtgctgggcacacagtgaggtggcagccccatgtgccctggagaacgaggatatctgtcagtggaacaagatgaagtacaagtccgtttacaagaacgtgatactccaagttccagtgggcttgactgtgcataccagccttgtgtgttccgtgaccctcctgattaccattttgtgcagtaccctcattcttgttgccgtttttaagtatggccacttcagcttgtag

SEQ ID NO: 234624 - DNA, 507 bp, synthetic construct
  misc_feature 1..507: note = Description of Artificial Sequence: Synthetic coding sequence
  source 1..507: mol_type = other DNA
atggtatccgaaaactttgatatcgaggcgccaaactacctctctaaagagagcgaggtgttgatttacgctagacgagatagccaatgtatcgattgtttccaggcctttctcccagtgcactgccgctatcacaggccacattcggaggatggcgaggctagtatcgtagtgaacaatcccgatctccttatgttttgcgaccaagccggatctcggcgtatgattaggttccggtttgacagcttcgataagacgatagagttcccgatcctcaaatgctgggcccactcagaggtcgcagcaccctgcgcactggagaacgaagacatttgccagtggaataagatgaagtacaagtcggtgtataagaacgtaatcctgcaggtccctgtagggctgacagtacatactagtctggtatgctccgtaaccctgcttataaccattctctgctcaacgctgatcttagtcgcagtgtttaagtatggccacttcagcctgtag

SEQ ID NO: 234625 - DNA, 1740 bp, synthetic construct
  misc_feature 1..1740: note = Description of Artificial Sequence: Synthetic coding sequence
  source 1..1740: mol_type = other DNA
atgcagatctgcgggagctccgtcgccagcgtcgctgccggaaccagttttcaggttttagggcctgtgtgctggcagcaattggatctcaagatggccgtgcgcgttctgtggggaggccttagcttactgcgcgtgctgtggtgcctattgccgcagaccggctacgttcaccccgatgaattcttccaaagccctgaggtcatggccgaagatattctgggggtccaggctgcccgtccttgggagttctacccaagctctagctgtaggtctgtccttttcccgctgcttatctccggcagcaccttctggttactgcggctgtgggaggaactgggtccatggcccggtttggtcagcggatatgcacttttagtggggccacgccttctcctcacggccctgtcctttgcgctcgatggcgctgtgtatcacctcgctcctccaatgggcgctgacaggtggaacgccctcgccctcctgtctggatcgtacgtcaccctggtgttttatacccggacattttccaacacaattgagggtctactgttcacctggcttttagtcttggttagtagtcatgtgacctggggccctacgcggaaggaacccgcacccggacctagatggagatcttggctcctggggggtatagtggccgctggcttcttcaataggcctacctttctggcattcgctgtggttcccctgtatctctggggaacccgcggagctacaaatccaggcctgaaaagcttaactcgagaggccttggtgctcctcccgggagcagcgctgactgccgcagtgtttgttgcaacggactcctggtactttagctcccccgctacatcccgtaatttagtactcacgccagtcaattttttacactacaatctgaatcctcaaaatcttgctcgacacggaacgcatgcaagactcacccacctcgcggtcaacggatttctgctctttggtgtcctgcatgcccaggcactgcaggcggcatggcagcgcctccaggtcggcctgcaggccagcgcacaaatggggctgcttagagctcttggagccagatcattactatcatcccccagatcatacctgctcttactttactttatgccactggccctgctgtctgcctttagtcatcaggaggctcgctttttaattcctcttctggtgccactggtgctcttgtgcagcccgcagacacagcccgtgccctggaagggtactgtcgtgctctttaatgcccttggcgctctgctattcggatgcctgcaccagggtggtctggttcctggactggaatatctcgaacaggtggttcacgcaccagtattaccctcaacacctacacattacaccctcctgtttacccatacttacatgcccccacgacacctcctgcacctcccaggcctgggcgctccagtggaggtggtggacatggggggaacggaagattgggctttatgtcaaaccctcaagagtttcactaggcagccggcttgtcaggtcgccggaggtccatggctctgcaggctgtttgtggttaccccaggtactacacgcagagcagtagaaaagtgctcttttccattcaagaatgaaactctgttgtttccacacctgacactggaggaccctcccgcactctcatctctgctgtctggggcatggcgtgatcatttgtctttacacatagtggagctaggggaggaaacttag

SEQ ID NO: 234626 - DNA, 813 bp, synthetic construct
  misc_feature 1..813: note = Description of Artificial Sequence: Synthetic coding sequence
  source 1..813: mol_type = other DNA
atggttttactgaaggagtatagggtgatcctgccggtgagtgtagacgagtaccaggtaggccagttgtactctgtggcggaggcatctaagaatgagacgggcggaggagagggcgtagaagtactggtcaatgaaccttacgaaaaagatggggagaagggccagtacacccacaagatctaccacctccagtctaaggtgcccacgttcgtgcggatgttagctcccgagggtgcactcaatatacacgaaaaagcatggaacgcctatccctattgccgaaccgtaataacgaacgagtacatgaaggaagacttcttgattaaaattgagacatggcacaagccagacctggggacccaggaaaacgtgcataaattggagcccgaggcatggaaacacgtggaggctgtgtatatcgatatcgctgatcggtctcaagtgttatctaaggactataaagcagaagaagaccccgctaaattcaagtcaatcaagactgggcgaggacccctgggtccaaattggaaacaggaactggtcaaccaaaaggattgtccctatatgtgtgcctataaactcgttacagtgaagttcaagtggtgggggctgcagaacaaggtggagaactttatccataaacaggagcgccgtctcttcaccaattttcaccgccaactgttctgttggctggataaatgggtcgacttgactatggacgatattagacgtatggaggaggagacaaaacgtcagcttgacgaaatgagacagaaggatccagtgaaagggatgaccgcggacgactag

SEQ ID NO: 234627 - DNA, 813 bp, synthetic construct
  misc_feature 1..813: note = Description of Artificial Sequence: Synthetic coding sequence
  source 1..813: mol_type = other DNA
atggtgctgctgaaagaataccgggtaatcctgcccgtgtccgtagatgagtatcaggtaggccagttatattcagtcgccgaggcttcaaaaaacgagaccggagggggagaaggcgttgaggtattggtaaatgagccatacgaaaaggatggggagaagggccagtatactcacaagatttatcatctgcagtccaaggtcccaacctttgtaaggatgcttgcccctgagggggctctgaacatacacgagaaagcttggaatgcatacccctattgtcgaactgttttgcctaatgaatatatgaaggaagacttcctgatcaagattgagacttggcataagcccgatctgggaacccaggaaaacgtccataaactggagcccgaggcatggaaacatgtggaagcagtgtacatcgacatcgctgacaggtcccaagtcttgtcaaaggactataaggccgaagaggaccccgctaaatttaagagcatcaagacaggacggggacctctgggacctaattggaagcaggagctggtaaaccaaaaagattgcccttacatgtgcgcatacaaattagtgactgtgaaatttaaatggtggggactgcaaaacaaagtggagaactttatccataaacaagaacggcgtctgttcacaaattttcacaggcagctcttctgttggctggacaagtgggtcgatctgactatggatgacataaggaggatggaggaagagacaaaaaggcaactcgatgaaatgagacaaaaggaccctgtcaaaggcatgactgcagacgattag

SEQ ID NO: 234628 - DNA, 594 bp, synthetic construct
  misc_feature 1..594: note = Description of Artificial Sequence: Synthetic coding sequence
  source 1..594: mol_type = other DNA
atgctcgcccctgaaggtgcacttaacatccacgagaaggcctggaatgcatacccctattgccgaactgtgctccccaacgagtatatgaaagaggacttcctgattaagatcgagacttggcacaaacccgacttggggactcaggagaacgtgcacaagttagagcctgaggcctggaagcacgtggaagcggtgtacatcgacatcgccgacaggtcacaagtcctcagtaaggattacaaggcagaagaggaccctgcgaaattcaaatctataaagaccgggagaggcccactgggcccaaactggaaacaagagctcgtgaaccagaaagattgtccctatatgtgtgcctataaacttgttaccgtcaaattcaagtggtggggcctccagaataaagtggaaaattttatccacaagcaggagaggcggctgttcacaaatttccatagacagctcttctgctggctcgataaatgggtcgacctaaccatggacgatattcgcagaatggaggaggagacaaaaaggcaactggatgagatgcggcagaaggacccagtcaaaggaatgaccgcggacgactag

SEQ ID NO: 234629 - DNA, 819 bp, synthetic construct
  misc_feature 1..819: note = Description of Artificial Sequence: Synthetic coding sequence
  source 1..819: mol_type = other DNA
atggtgctaatcaaagagtttagagttgtgctgccttgcagcgtccaggaataccaagttgggcagttgtattccgttgccgaggcaagcaaaaacgagaccgggggaggggaaggcatcgaagtccttaagaatgagccatacgaaaaagatggggaaaaaggtcaatatacacataaaatttaccacctgaagtccaaagttccggcttttgtgagaatgatcgcacctgagggaagtctcgtatttcacgaaaaagcctggaacgcttacccctattgtcggactatcgtaactaatgaatacatgaaggacgactttttcattaaaatcgagacatggcataagcccgacctcgggaccctggaaaacgtacatggcctggatcctaacacttggaaaacggtcgaaatagttcatattgatatcgccgacaggagccaagttgaacctgcagactataaagccgatgaggatccagccctgttccagtccgtgaagactaagcgtggaccacttggcccaaattggaaaaaggaattggccaattcgcctgattgtccacagatgtgcgcatacaaactggttacgatcaaatttaagtggtggggtctgcagtccaaggtcgagaatttcatccagaagcaggagaagagaattttcaccaacttccatcggcagctcttctgctggattgacaagtggatagatctcactatggaagacattcggcgaatggaagacgaaacgcagaaagagcttgagaccttgcgcaatcaggggcaagtgcgaggaacatccgccgcttcggacgaatag

SEQ ID NO: 234630 - DNA, 816 bp, synthetic construct
  misc_feature 1..816: note = Description of Artificial Sequence: Synthetic coding sequence
  source 1..816: mol_type = other DNA
atggtcttgattaaggaattcagagtggtgttgccttgttccgttcaggagtaccaagtcggacagctctattcagttgccgaagcctcaaaaaacgaaacgggcggtggggagggcatcgaggttctcaaaaacgaaccctacgaaaaagatggggaaaaagggcagtacactcacaagatataccatttaaagagtaaagtgccggcttttgtgcgcatgatcgctcccgaggggtccctggtgttccatgagaaagcctggaatgcttatccctactgccgcacaattgtgaccaacgagtatatgaaagacgactttttcattaaaattgagacatggcacaaacctgacctcggaaccttggaaaatgtgcacggactcgatcctaatacgtggaaaacagttgaaatcgttcatatcgatatcgccgaccgaagtcaggttgaaccggctgactataaagcagacgaggaccctgcactgtttcagtccgtcaagactaaacgaggccctctcgggcctaactggaaaaaagagctagcaaactctccagactgtccccagatgtgtgcatataaactggttaccattaaattcaaatggtggggacttcagagcaaggtcgaaaatttcatccaaaagcaggaaaagcgaatttttactaattttcatcgccagttgttctgttggatcgacaagtggatagatctgaccatggaagatattcgacgtatggaagatgaaactcagaaagagctggagacgatgaggaagagggggtctgtgaggggtacttccgcagcagacgtatag

SEQ ID NO: 234631 - DNA, 363 bp, synthetic construct
  misc_feature 1..363: note = Description of Artificial Sequence: Synthetic coding sequence
  source 1..363: mol_type = other DNA
atgatcgcgcctgagggaagcctcgtgtttcacgaaaaggcatggaatgcctacccttattgcagaacaatcgttactaatgaatacatgaaggacgactttttcattaaaatcgaaacctggcacaaaccagacctaggaactttagagaacgttcacggactggaccccaacacctggaaaaccgtcgagattgtgcacatcgacatcgctgacaggtctcaggtcgaacctgcggattacaaggcagacgaggacccagcactctttcagagtgtgaaaactaaacgcggaccgctcggtcctaactggaaaaaagagctggccaatagtcccgactgtcctcaaatgtgtgcttactag

SEQ ID NO: 234632 - DNA, 507 bp, synthetic construct
  misc_feature 1..507: note = Description of Artificial Sequence: Synthetic coding sequence
  source 1..507: mol_type = other DNA
atgggcgacctcttgatggagaagtgcagagtggtcctcccatgttctgtccaagagtaccaggtgggccagctatactcagtggcagaagcgtccaagaatgagacagggggtggcgaagggatcgaagtactgaagaatgagccttatgaaaaagacggcgagaaaggtcagtacacgcataagatctatcacttaaagtctaaagtgcccgcattcgtaaggatgattgccccagaaggtagcctggtgtttcacgaaaaagcctggaacgcttacccgtattgccgaacaatcgtgactaatgagtatatgaaagatgacttcttcattaaaatcgaaacgtggcacaagccagacctcggaactctcgagaacgtccatggattagatccaaatacctggaagaccgtcgaaatcgtgcatattgacatcgccgatcggagccaagtggagccagcggactacaaagcggatgaggacccagcgttgttccagtccgtctag

SEQ ID NO: 234633 - DNA, 822 bp, synthetic construct
  misc_feature 1..822: note = Description of Artificial Sequence: Synthetic coding sequence
  source 1..822: mol_type = other DNA
atgggagatctccttatggagaagtgtagggtcgttctgccttgttcagtgcaggagtatcaggtgggccagctttatagtgtagcagaggcctcgaagaacgaaactggcggtggcgagggtatcgaggtcctgaagaatgagccttatgagaaagatggcgaaaaggggcagtatacacataaaatataccatctcaaaagtaaggtgcctgccttcgtccgcatgatcgcacccgagggcagcctcgtattccatgagaaggcctggaacgcttatccctactgccgaacaatcgtgaccaacgaatacatgaaggatgattttttcataaagatcgagacctggcacaagcctgacctaggcaccctggagaacgtgcatggtcttgatcctaacacatggaagacggtcgagattgtgcatatcgacatagccgatcgcagtcaggttgagcccgcagattataaggccgacgaagaccctgctctctttcagtccgtgaagaccaagcgcggtcctcttggaccgaactggaagaaagagctggctaattcacctgattgccctcaaatgtgcgcatataagttggtcacaatcaagtttaagtggtgggggcttcagtctaaggtggagaatttcatccagaagcaggaaaaaagaattttcaccaactttcaccgacagttgttttgttggatagacaaatggattgatctaaccatggaggacattcgccgaatggaggacgaaacgcagaaggaattagagactatgagaaaaaggggctcagtaagaggtacctcggcagctgatgtctag

SEQ ID NO: 234634 - DNA, 4979 bp, synthetic construct
  misc_feature 1..4979: note = Description of Artificial Sequence: Synthetic coding sequence
  source 1..4979: mol_type = other DNA
atggaagccccatctgggagcgagcccggaggggatggagccggagattgtgctcaccctgatcctcgtgcacctggtgccgctgccccatcctctggacctggcccatgtgctgctgccagggaatcagagcgacagctgaggctgaggttatgcgttctcaacgagattctcggcactgagagagactacgtgggcaccttaagatttctccagtcagccttcctacatcgcatccggcagaatgtggcagattccgtagaaaaaggcttaacagaggagaacgtcaaggtgttgttttctaatattgaggatattttagaggtgcataaggactttctggcggctctggaatactgcctgcacccggaaccgcagtctcagcatgagttaggtaacgtgttcctgaaattcaaggacaaattttgtgtgtacgaggagtactgctcaaatcacgaaaaagccctgcgattgctggttgaattgaacaaaattcccaccgtgcgggctttcctcctttcctgtatgttgctcggcggaaggaagactactgacatccctctggaggggtatctgctgtcccctatccagagaatttgtaagtaccccctgttgctgaaggagctggctaaaaggacccctggaaagcatccagaccatcctgctgtgcaatctgcccttcaggctatgaagaccgtgtgctctaacattaacgaaacaaagcgtcagatggaaaagttagaggccctggagcagctccagtcccatatcgagggctgggagggaagtaatctgacagacatctgcacccagctcctgctacagggaaccctcctgaagatttctgcaggtaacattcaggagcgggcattttttctctttgacaacttactggtctactgcaaacgcaagtcccgcgtgaccggaagcaaaaagtcgaccaagcggaccaagtccattaatggctccctttatatattccggggacgtattaatactgaagtgatggaggtcgagaacgtggaagacgggacagccgactaccactctaacggctacactgtgacgaatggttggaaaatccacaacaccgccaaaaacaagtggtttgtttgtatggctaaaactgctgaagagaaacagaaatggttggacgccatcatcagggagcgcgagcagagggaaagtttgaaactcgggatggagagggatgcatatgtcatgattgccgaaaaaggagagaaactatatcatatgatgatgaacaaaaaagtcaacctgatcaaggaccggaggcggaaactgagcacggttcccaaatgctttctgggtaatgagtttgttgcgtggctgctggagattggtgagatcagcaagactgaagaaggcgtcaacctggggcaggccctgttggagaatgggatcattcaccacgtcagtgacaagcaccagttcaagaatgagcaggtcatgtataggtttagatatgacgatggaacttacaaggccagaagtgaactggaggatatcatgtcaaagggcgtgcgcctctattgtcggctccattctttgtatacccccgtgatcaaggaccgggattaccatcttaaaacatacaagtccgtgctgccagggtctaagttggtcgactggctgctggctcaaggcgattgccagacccgcgaggaggccgtagcactgggggtggggctgtgcaacaacggctttatgcatcacgtcctggagaaaagcgagtttcgcgacgagtcgcagtattttcggttccacgcagacgaggaaatggagggaacatccagcaaaaacaaacagctgagaaacgacttcaagctcgtcgaaaacattctggccaaaagactcctgatcctgccgcaggaagaagattatgggttcgatattgaggagaaaaacaaagcagtggtggtgaagtcagtccagcggggaagtctggcagaggtggccggattgcaggtggggagaaaaatatacagcattaacgaggacctggtgttcctgcggccattttctgaagttgagagtatcctgaaccagagtttctgcagccgacgaccactccgactgctcgttgcaaccaaggccaaggaaattattaagatacccgatcaacctgatactctgtgcttccaaatcaggggagcagctcccccatacgtgtatgcggtcggccgaggttcggaggctatggcggctggcttgtgtgcaggtcaatgtatactcaaggtgaacggctccaatgttatgaatgacggagcccctgaagtgctggagcatttccaggctttccggagcaggcgggaggaagctctgggcctgtaccagtggatctatcatacacatgaggacgctcaggaggctcgtgcttcgcaggaagcgagtactgaagatccctcaggcgagcaagcacaagaagaggaccaggccgactcagcatttcccttactctcgctggggccaagactgtctctgtgcgaggactcacctatggtgacattaacggtcgacaacgtgcatctagagcacggcgtggtttacgaatatgtgagtaccgctggagtgaggtgtcacgtccttgaaaaaatcgtggaaccgagagggtgcttcggactgacagcaaagatattggaggccttcgccgctaacgacagcgtcttcgtagaaaactgtcgcagactgatggctttgtccagcgccatcgtgaccatgccccacttcgagttccggaacatttgtgacacaaagctggaaagcattggccagaggattgcttgttaccaagagttcgctgcccagctgaagtccagagtctccccaccatttaaacaggcccctctcgagcctcacccactgtgtgggctggatttttgtcccacaaattgccacataaacctgatggaggtctcctatccaaaaacaaccccatcagtggggagatcatttagtattagattcgggcgaaagccttctcttatcggtttggatcctgaacagggtcatctcaaccctatgagctacacgcagcactgtattacaaccatggccgctcctagttggaagtgcctgccggctgcagagggcgatccccagggccagggcctgcacgacgggtcattcgggccagcatcaggcacactcgggcaagaggatagaggtctgtcctttctccttaaacaagaggacagggaaatacaggacgcttatttacaactgttcaccaagctggatgtggccctcaaagagatgaagcagtacgtgacccagatcaacagactgctttctacaatcacggagcctacaagtgggggttcttgtgacgcttccctggcagaggaagccagctccttgcctctagtatctgaggaatcggaaatggaccgctctgaccatggaggaattaaaaaagtctgctttaaagtggctgaagaagaccaggaggatagcgggcacgataccatgagctatcgggattcctacagcgagtgcaattctaaccgtgattcagtcctcagttacacctccgtcagaagtaatagctcgtacctgggttctgacgagatggggagcggggatgagctgccctgcgatatgcggatcccgagcgacaagcaggacaagctgcacggctgcctggagcacctcttcaatcaggtcgacagcatcaatgccctcctgaagggcccagtgatgtccagagcatttgaagaaacgaagcacttccctatgaaccatagtttgcaggagtttaaacagaaagaagagtgtaccattcggggacgcagcctgatccagatctccatacaagaggacccttggaacttgcccaacagtatcaaaactctggtggataacatccaacggtacgtggaggatggaaaaaatcagttgctactggctctacttaaatgtacagatacagagcttcaactgcggagagacgcaatattctgccaggctttggtagccgcagtctgcacattctccaaacaactgttggctgcgctaggttaccggtataacaacaatggggagtacgaagaaagctctagagatgcctcacgaaaatggctggaacaagtagcagctacaggcgtgctgctgcactgtcagtcgctgttgagccccgctactgttaaggaggagcgcaccatgttagaagatatttgggtcactcttagtgaactggacaacgtcaccttcagcttcaagcagttagatgaaaattacgtcgcaaatacaaacgtgttctaccacatagagggctcaagacaggcactgaaagtgatcttctaccttgatagctatcatttctcgaaactcccaagcagattggagggaggggcaagccttagactacataccgccctgttcacaaaagtgctggagaacgtcgagggattaccaagtcctggctcccaggctgctgaagatcttcagcaagacattaacgcacagtctttggagaaggtacagcaatattaccgaaaattgagagctttttacttggagagaagtaatcttccaacagatgcctcaacgactgcggttaaaattgatcaactgatccgaccaatcaacgccttggacgagctgtgccgcctcatgaaatcgttcgtgcatccaaagcctggcgctgccggaagcgtgggggctggccttattcccataagttctgaactgtgctatcgtctgggcgcatgtcaaatggttatgtgtggtacagggatgcagaggtcaaccctgtcagttagcttagaacaggcagcgatcctggctagatcacacgggttgctgcccaaatgcatcatgcaggcaacagatatcatgaggaaacaagggcctcgagtggagatccttgcaaaaaacctgcgtgttaaggatcagatgccccagggcgctcctagattgtatagactgtgccagccaccagtagacggtgatctgta

SEQ ID NO: 234635 - DNA, 4686 bp, synthetic construct
  misc_feature 1..4686: note = Description of Artificial Sequence: Synthetic coding sequence
  source 1..4686: mol_type = other DNA
atggaagccccatcaggctcagagccaggcggagatggcgcaggtgactgtgcccaccccgatcccagagcccctggagccgcagctccatcgagcgggcctgggccatgtgctgctgcgagggagtctgaacggcaattgaggcttcgcctatgtgtgttgaacgaaatcttgggaactgaaagggactatgtcgggaccctccggttcctgcagagcgcttttttgcatagaattagacagaatgtggcagactctgtggagaaaggattaacagaggagaacgtgaaggtcctgttcagtaatattgaagatatccttgaggtccacaaagattttctcgcggctctggagtattgtctgcatcctgaaccacagtcccagcacgagctgggcaatgtcttcttaaaatttaaggacaagttctgcgtgtacgaagaatactgctctaaccatgagaaggctctgagactgctggttgaacttaacaagatacccaccgtaagggcgttcctgctgagctgcatgctgctggggggaaggaaaacaacggatataccgctggaggggtacctgcttagccccatccaacgaatctgcaagtatccacttctgttgaaggaactggccaagcgcacccccggaaagcatccggaccacccagccgttcaatcggctctacaagcaatgaaaaccgtgtgctctaatataaatgaaacaaagcgtcagatggagaagctggaggctttggagcagctccagtctcacattgaaggctgggagggatctaatcttacggatatatgcacccagcttcttctgcagggcaccctgttgaagatctccgccggaaacatacaagagagggccttcttcctcttcgacaatctgctcgtgtattgcaaacgtaaaagtcgagtgaccgggagtaagaagtcgacgaaacgcaccaagtccatcaacggatctctctacatcttccgtgggagaatcaacacagaagtgatggaagtagaaaacgttgaagacgggacagctgattatcactccaacggctatacggtgactaatggctggaagatccataacacggctaaaaacaaatggttcgtgtgcatggcaaaaacagcagaggagaagcagaagtggctggacgctataatcagggaacgagagcagagggagtcactgaaactgggaatggagagagatgcctatgtcatgatagcagaaaaaggcgagaagttgtaccatatgatgatgaacaagaaggtgaacttgatcaaggatagacggcgtaaattgagcaccgtccccaaatgtttccttggcaacgaattcgtggcctggctgctcgaaattggcgaaatctcgaagacagaagagggtgttaacctgggacaggcactgctggagaacggcatcatccatcatgtctccgataaacatcagtttaagaatgagcaggtgatgtaccgtttccggtacgacgacggcacctataaggcgcgtagcgaactcgaggacattatgtccaagggcgtcagactgtattgccgcctgcattctctctatactcctgtcattaaggatcgagactaccatctcaagacttataagtcagtgctccccggatcaaaactggtcgattggctcttggcccagggcgattgtcagacgagagaagaagctgtagcccttggcgtaggtctatgcaacaacggcttcatgcatcacgtgctcgaaaagtcagagttccgggacgaatctcagtactttaggttccatgcggatgaggaaatggagggcacatcttcgaaaaacaaacaactcagaaacgatttcaagttggtcgagaacatactggctaaacggctgcttatcttgccgcaagaggaagactacggcttcgacatcgaagagaagaacaaggcagtagtcgtcaaatccgtgcagcggggaagccttgccgaggtggcaggattgcaggtgggccgtaaaatctacagcatcaatgaagacctagtctttctgcggcctttctcggaggttgagtccattcttaaccagagtttttgttcaagacggccactgcgcctgttagtggcaacaaaagcgaaggaaattatcaaaatacccgaccagcctgataccctgtgcttccaaattcgaggtgcagctccgccttatgtatacgccgtgggaagaggatccgaggctatggctgccggactctgtgccggtcagtgcatcttaaaggtcaatgggtccaatgtaatgaacgacggcgctccagaggtgttagagcattttcaggcatttcggagccggcgtgaggaggctctggggctgtaccaatggatctaccacacccatgaggatgcccaggaggcacgggctagtcaggaggccagcacggaggatccatctggggaacaggcgcaggaggaggaccaagccgatagcgcattccctcttctttcactggggccaaggcttagcctgtgtgaggatagtcctatggtgactcttaccgtcgataacgttcacctggaacacggggtggtgtacgaatatgtgagcactgccggtgtgagatgtcatgtactggagaagatcgtggagcccagaggttgcttcgggctgactgctaaaattctggaggccttcgctgctaatgatagtgtgtttgtggagaactgcaggcggcttatggctctgagcagtgccatcgtaactatgccccatttcgagttccgcaatatttgtgacacgaagctggagtcaataggacagcggatcgcttgttatcaggagtttgcggcacagctcaagagccgtgtgagtccgccatttaagcaggcccctctcgagcctcaccctctatgcgggctcgatttctgccccaccaactgtcacattaatctgatggaggtgagctatccaaagaccacccccagtgtgggacgttctttcagtatccgattcggacgtaagccctccctgataggtctggatcccgagcagggccatttgaatcctatgtcatatacccaacactgtattaccactatggccgcaccatcctggaaatgcctccctgctgccgagggcgatccacaagggcagggtctgcacgacggcagctttggacccgcatcaggcactttgggccaggaggaccgaggtctgtcttttctcctgaaacaggaagaccgggagatccaagacgcctatttgcagttgtttaccaaattggatgtcgctttgaaggagatgaagcaatacgtaacacaaatcaataggctgctgagtacaattacggaacccacatctgggggtagttgtgacgcctccctggctgaagaggcctccagcctcccccttgtgtccgaagaaagtgagatggatcgctcggatcatggcggaatcaagaaggtatgctttaaggttgcggaagaggaccaggaagactccgggcacgacacaatgtcctaccgggacagctactcagagtgcaattctaatcgcgatagcgttttaagttatacctcagtgagaagtaactctagttatctagggtctgacgagatggggagcggagacgagctgccctgcgacatgaggattccttcagataaacaagacaaacttcacgggtgcttggaacatttgtttaatcaagtggatagtatcaatgcactgcttaaggggccagtgatgtcacgggcattcgaagaaactaaacattttccaatgaatcatagcctccaggaatttaaacagaaagaggagtgcactattcgcggaaggtccctgattcagatatccatccaggaggacccatggaacctccccaattccatcaagaccttggtggacaatattcagcgatacgtagaagacggtaagaaccagctgctgctcgctctgctcaagtgtaccgatactgaactccagttacggcgagatgctattttctgtcaagcactggtggccgcagtgtgtacttttagtaaacagctgctggctgcacttggctaccggtacaacaacaatggtgagtacgaggagtcctcccgggatgctagccgtaagtggctcgagcaggttgccgcaacgggtgtactgctccattgccagtccctgctaagtcctgctacagtaaaagaggagcggaccatgctcgaggatatctgggtcaccctctccgagcttgacaacgtgactttttcttttaagcaacttgatgagaattacgtggccaatacgaacgtgttctaccatatcgaaggttcccggcaagctctgaaggtgattttttacctcgatagttatcacttctcgaagctgccgagccgactggagggcggagcttcgctgcgtttgcatacggccctgtttaccaaaggggaactgcaggcgtggggccgagaagatcacggaggtcgggcaaaggccaccaagcacacaggttcccagccaccagcacgcccaaggcacctgccatcccagtgctggcgaacatggcgcggatgcctgctccaagccgcaaggccaaggagaatttgctctagaacttccacccggtctccttggcgtaaattttcatctattacagccaactccgggcacttcacctggagtgggctcacctgtccccgtatgcccgcaccacgccgatag

SEQ ID NO: 234636 - DNA, 4821 bp, synthetic construct
  misc_feature 1..4821: note = Description of Artificial Sequence: Synthetic coding sequence
  source 1..4821: mol_type = other DNA
atgtccgaggatagtcgcggtgattcaagggccgagtcagcaaaagatctggagaagcagttgaggctgcgagtgtgcgtgctgtcagagcttcaaaaaactgagcgcgactatgtgggaacccttgagtttctggttagtgcctttctacacagaatgaaccagtgcgctgcttccaaggtcgacaagaacgttaccgaggagacagttaagatgctcttctccaatatcgaggacattctggctgtgcacaaagaattcctgaaggttgtcgaggagtgtctccatcccgaacctaatgcccaacaggaagtggggacatgttttctgcactttaaggataaatttagaatctacgacgagtattgttcaaaccatgagaaagctcagaagctgttgctagagctgaacaagattcggaccatccggacattcctgttaaactgtatgctcttaggcggacgtaagaacactgatgtacccttggagggatatttggtcacacctatacagaggatctgcaagtaccctttaattctcaaagagctgctaaagcgcaccccaagaaagcactctgactacgccgctgttatggaagccctccaggccatgaaagctgtttgctcaaacataaatgaagcaaaaaggcagatggaaaaactcgaggtgctagaggaatggcagagtcatatcgaaggatgggagggtagtaacataacggacacatgtaccgagatgctaatgtgcggagttctgcttaagatcagctccgggaatatccaagagagggtctttttcttgtttgacaacttgctggtgtactgtaagcgcaaacacagaaggcttaaaaactctaaggcttcaacagatggtcacagatacctgtttcggggaaggataaatactgaagttatggaagtggaaaacgtagacgacggcaccgctgattttcactccagcgggcacatcgtggtcaatggttggaagattcacaacaccgctaagaataagtggtttgtgtgtatggccaagacccccgaagaaaagcatgaatggttcgaagcgatccttaaagaacgggaacgtagaaaagggctaaagctcggcatggaacaggacacttgggtgatgatctccgaacaaggagagaagttatacaagatgatgtgccggcaaggcaacttgatcaaagaccgcaagcgtaagctgaccaccttccccaaatgtttcctgggctcagagttcgtaagttggctcctggagattggtgaaatccaccgccctgaagagggggtacacctggggcaagcactactggagaacggtataatccaccatgttacagataagcatcaattcaaaccagagcaaatgctttaccgctttagatatgacgacggaaccttctacccacggaacgagatgcaggacgttattagtaagggggtcaggctgtattgtcggctacactctttatttacccctgtaatccgcgacaaggattatcacttgcggacatataaatccgtcgtgatggcgaataaactcattgactggctaatcgcccaaggagactgccgcaccagagaagaggcgatgatctttggggttgggctgtgcgacaacgggtttatgcaccatgttcttgagaagagcgaattcaaagatgagccattattatttcgctttttctcagacgaggaaatggaaggttcaaatatgaaacacagattaatgaaacacgacctcaaggtcgttgaaaacgtaattgccaagtctctgctaataaagtccaatgaaggttcatacggatttggtctggaagacaagaacaaagttcccatcattaagctcgttgaaaaagggagtaacgccgaaatggccggtatggaagtgggcaagaaaattttcgctatcaatggagacctcgtctttatgcggcctttcaacgaagttgactgctttctgaaatcctgccttaatagtcgcaaacccctgagggttttagtttcaactaaaccaagagagaccgtgaagatcccggactcagctgatggactcggcttccagatacgaggattcggcccatccgtggttcatgctgtaggcagggggactgtggctgcagccgcagggctgcacccaggccagtgcattatcaaagttaacgggataaacgtgagcaaggagactcatgccagcgtcatcgcgcacgtcactgcctgtagaaagtaccgccgtccaacaaagcaggatagcatccaatgggtctataactcaatcgagtccgcacaagaggatctgcagaagagtcatagcaagccgccaggggatgaagcgggtgacgcgtttgactgtaaagtcgaggaagtgattgacaaattcaacaccatggctatcatcgacgggaagaaggaacatgtttccctgacggtggataatgtccacctcgaatatggtgtggtgtatgaatatgactcgacggctggcataaagtgcaatgtcgttgagaaaatgatagagccaaaaggatttttctcactgactgcaaagatcctcgaagcactcgcaaagagcgatgagcactttgtgcagaattgcactagtttgaacagcctgaatgaggtgatacctactgatctccagagcaagtttagtgctctttgtagcgagaggattgagcacctctgccagcgcatatccagctacaaaaagttttcaagagtgctgaaaaacagggcctggccgacgtttaagcaggctaagagtaagatctctcccctccacagtagcgacttctgtccaactaattgtcatgttaatgtgatggaggtgtcttaccctaaaacttcaacttccctaggatccgcgttcggagtgcagctagacagtcggaagcacaacagccatgacaaggaaaacaagagctctgaacagggaaagcttagccccatggtgtacatccaacatacaattactacaatggctgcgccatccggcttgtcgctcgggcagcaggacggccacgggcttcgatacctgttgaaggaggaagatctggaaacgcaggatatctatcagaaactactcggcaagctgcagaccgctctgaaagaggttgagatgtgtgtttgccagatcgacgacctgctttctagcattacttactcacctaaacttgaaaggaaaacgtctgagggaatcataccaacagactcagacaatgagaaaggcgagcgtaactctaaaagggtgtgtttcaacgtggccggagacgaacaggaggacagcggccatgatactatcagcaatcgggacagctatagcgattgcaattccaacaggaatagcattgcctcattcacctcaatatgctcatcccagtgtagttcctactttcactccgacgagatggacagtggcgatgagttacctcttagcgttaggatatcacatgataagcaagacaagatccactcgtgtctagaacatcttttctcccaagttgatagtattaccaatttactgaagggacaagctgttgtccgggcttttgatcagactaagtacctgacccctgggagagggctccaggaatttcaacaagagatggagcctaaattgtcttgtccaaagcgcctgagactgcatattaaacaggatccttggaacttaccctcgagtgtacgtaccctcgcgcagaacatccgtaaattcgtggaggaagttaaatgtcgtctcctgctagctctcctggagtactctgacagcgagacacagttgagacgggacatggtattttgtcaaaccctagtggcaactgtgtgcgcttttagcgaacagctaatggccgcacttaaccagatgtttgataactcaaaggaaaacgagatggaaacttgggaagcctctcgacgctggctggatcagattgccaacgctggcgtgctgtttcactttcagtctctcctcagtccgaatctgaccgatgaacaggccatgctagaggacacgttagtcgcactgtttgatctggagaaggtctccttttatttcaagccctcagaagaggaacccctcgtagcaaatgtgcccctgacttaccaggccgagggctcaaggcaggctctgaaggtctatttttacatagatagttaccacttcgaacagctgccccagcgtctcaagaatgggggaggtttcaaaatccaccccgtgctcttcgctcaggccctggaaagcatggaaggctattactacagggacaacgtttccgtggaagaattccaggctcagattaatgccgcaagtctcgaaaaagtgaagcagtacaaccaaaagctgcgcgctttttacctggacaaaagtaattcccccccaaacagcacttccaaagccgcttacgtggataaacttatgcgtcccctaaacgctcttgacgagctgtatcgattagtcgccagctttatacgctcaaagcgcacagcggcttgtgctaataccgcgtgtagcgctagcggggtaggcctgctgtccgtcagtagtgagctttgtaatcgcctgggcgcttgtcatattatcatgtgttcttccggggtgcacaggtgcacactgtctgtgacactggagcaagcaattattctcgctaggtctcacggcctcccgccaaggtatattatgcaggcaacagatgtcatgagaaagcaaggggctagggtccagaacaccgctaagaatctgggggttagggatcggaccccccagagcgctcccagactttataagctgtgtgagcccccaccgcctgccggtgaggagtat

SEQ ID NO: 234637 - DNA, 3525 bp, synthetic construct
  misc_feature 1..3525: note = Description of Artificial Sequence: Synthetic coding sequence
  source 1..3525: mol_type = other DNA
atgtcagaagatagcaggggcgactccagagcagagagcgcaaaagatctagagaaacagctccgactgcgcgtgtgcgttttgtccgaacttcagaagacggagcgggattatgttggaacactcgagtttctggtgagtgcttttctccacagaatgaaccagtgtgctgctagcaaggttgataaaaatgtaacagaggagaccgtcaagatgctcttttcaaatatcgaagatatccttgccgtgcacaaggaatttctgaaagtcgtggaggagtgcctgcatcccgagccaaacgcccagcaggaagtggggacatgctttctccacttcaaggacaaattcaggatctacgacgaatattgtagcaatcatgagaaggcccagaaacttctgctagaactcaataaaatccgcactatcagaacctttctactgaactgcatgttactgggtggtcgtaagaacacagatgtgcccttggaggggtacctcgtgacgcctatccagcggatatgcaagtacccattgatacttaaggaacttttgaaacgaacgccgagaaagcactccgactacgccgctgttatggaagctctacaggccatgaaggctgtgtgcagcaatatcaatgaagctaagcgacagatggagaagctggaggtgctcgaagagtggcagagccacatcgaagggtgggaaggtagcaacattactgatacgtgcacagaaatgttaatgtgtggtgttctgttgaaaatcagcagcgggaatattcaggaacgagtgttctttttatttgacaacctccttgtgtattgtaaaaggaaacatcggcgactgaagaacagtaaggcgtctacagatggacacagatacttgttccggggaagaattaacactgaggtgatggaagtggaaaacgtggatgacggaaccgccgacttccactcttcgggtcacatcgtagtgaatgggtggaagattcataacactgctaagaataaatggttcgtctgcatggcgaagaccccagaagagaagcatgagtggtttgaggcaattttgaaggaaagagaacgaaggaagggacttaaactgggtatggaacaagatacatgggtaatgatttccgagcagggcgagaagctctacaaaatgatgtgtagacagggcaatctgatcaaggaccgcaagcggaaactgaccaccttccctaagtgtttcctgggatcagagtttgtcagttggctcctggaaatcggagaaatacaccgcccagaagagggagtgcaccttggacaagccctgctcgagaacggtataattcaccacgttacagacaaacaccagttcaagccagagcagatgctgtatagatttagatatgacgacggcacgttctacccccgaaacgaaatgcaggatgtaatcagtaagggagttcgcttgtattgtagactccactcactctttactcctgtcatccgggacaaggactatcacctgaggacctacaagtcggtagtgatggccaacaagctgattgattggctgatcgcgcagggcgactgcagaacaagggaagaagccatgatttttggcgtgggcctgtgcgataatggctttatgcaccacgtgctggaaaagtctgagtttaaagatgaaccgctgctgttcagattcttttctgatgaggagatggaaggctcaaacatgaaacatagactgatgaaacatgacctgaaggtggtagaaaatgtcatcgccaaatcgttactgatcaagtctaacgagggttcctatggcttcggcctggaggacaagaataaagtgccaatcattaagctggtggagaaaggctctaatgctgagatggcaggcatggaggtgggcaagaaaatttttgcgatcaacggggatcttgttttcatgaggccatttaacgaagtcgattgtttcctcaaatcctgtctcaactcacgcaaacctctccgggtgttggtgtccaccaagcctcgagaaaccgtcaaaattccagattcagcggatgggctgggcttccagattcgaggattcggccctagtgttgttcatgctgtagggcgtggaaccgtggccgctgctgcgggactccaccccggacagtgcatcattaaagtcaacgggattaatgtcagcaaagagacccacgcaagtgtgatcgcacatgtgacagcctgtagaaagtaccgcagacctaccaagcaggatagcattcaatgggtctacaattcaattgagtccgcccaggaggatctgcagaagtcacactcaaaaccacccggagatgaagctggcgacgctttcgattgcaaagtcgaagaagtgattgacaaatttaacaccatggctatcatcgatggtaagaaggaacacgtgtctctgacggtcgataacgtgcaccttgagtatggggtcgtgtacgagtacgattccacggcaggcattaagtgcaacgtggtggagaagatgatagaaccaaaagggttcttctcgctcaccgccaagattcttgaggcactggctaagtcggacgagcactttgtgcaaaattgtacatccttgaattccctgaacgaagtgataccaactgatttgcagtctaagttctcggcactgtgcagcgagcgaatcgagcacctgtgtcagaggatctcctcttacaaaaaagtgagcgtactactcattttgtacaccataatcgtggagatgtaccatttcaccgaaatgattactctatataatattctggagttagtcagaccaccgaattccgagttctttttctcgtttttgcccaccaaaagaatgaagacgctgaaccaaaagaaagtgacgcatatgaagaagacaaatatccagttgcagttcagtcgtgtccttaaaaaccgcgcatggccaacgtttaagcaggcgaagtctaaaatttcaccgctacactccagcgacttctgccctacaaactgccatgtgaatgtcatggaagtgagctaccccaagacgtctacttccttaggctccgcatttggagttcagtggaaattgagtccaatggtctacattcagcacactattaccacgatggctgctccaagtgggctgtctttggggcagcaggacggccacggtctccggtatctcttggagaggaagacaagcgagggaataattcctaccgatagcgacaatgaaaagggagaacggaattcaaagcgcgtttgttttaacgtcgcgggtgatgagcaagaggattctggtcacgacacaattagcaatagagacagttattcctttagtgattgcaactcgaaccgaaattccatcgcatccttcacctctatttgttctagtcagtgtagttcctactttcattcagatgagatggatagcggatccgacgaactcccactttcggtccggatctcccatgataaacaggataagattcattcatgtctggaacacttgttttctcagtag

SEQ ID NO: 234638 - DNA, 1650 bp, synthetic construct
  misc_feature 1..1650: note = Description of Artificial Sequence: Synthetic coding sequence
  source 1..1650: mol_type = other DNA
atggcatctgcttcatctgggccaagctcgtctgtagggttttcctcttttgaccccgcagtaccaagctgtactttatcgagcgcctctggtattaagaggccaatggcttctgaagtgccatacgcaagcggaatgccaattaagaagatcggacacagaagcgtggattccagcggagaaactacttacaaaaaaactaccagttcagccctgaagggcgctattcagctgggaatcacccataccgtcgggtccctgtccactaagccagaacgagatgtgctaatgcaggacttttatgtggtggaatccatattctttcctagcgagggctccaatttgacccctgcccaccattacaatgacttcaggtttaaaacctatgctcccgtcgcctttaggtatttccgtgagctgtttggtattcggcctgatgattacctgtacagtttgtgctcagagccactgatcgaattgtgtagttctggggcatcaggtagtctgttctatgtgtcctccgacgatgagttcataattaaaaccgttcaacacaaggaggctgaatttttgcagaagctgctcccaggctactatatgaatttgaaccaaaaccctcggacgttgctgccaaagttctacggcctatactgcgtccaagccggtggcaaaaacatacgcattgtggtgatgaacaatctgctcccaagatccgtcaagatgcacatcaaatatgacctgaagggttctacatataaacgccgtgcatcacagaaggagagggaaaaacctttgccaacttttaaggatctagacttcctacaggacatccccgatggcctctttctcgacgccgacatgtacaatgcactgtgcaaaactctccagcgcgattgcctagtactgcagagctttaaaatcatggactacagcttactgatgtccatccataatattgatcacgcacaacgggaaccactgagctccgagacccaatacagtgtagatacacgtcgtccagcaccccaaaaagctctctacagcactgcaatggaatccatccaaggagaggccagaagggggggaaccatggagacagacgaccatatgggcggaatcccagcgagaaattccaagggggagcgtcttttgctgtacattggcatcatagacatcttgcagtcatataggttcgtcaagaagctggagcacagctggaaagccctggtccacgacggcgataccgtcagcgtgcacagaccgggattctatgcagagcggtttcagagatttatgtgcaacactgttttcaaaaaaattccactgaagccaagtccatcaaaaaagttcagaagcggcagttccttctcccgcagggcagggtcaagcggtaacagttgtatcacgtatcagccctctgtgtccggcgagcataaggcacaagttactactaaggccgaagtggagccaggagtacatctgggtaggccagacgtcctccctcagacaccaccactggaggagataagtgagggctcaccaatacctgacccatccttctcaccccttgtgggagagaccctacagatgctgactactagcactactttagagaagctggaggtggctgagtcagagttcacacactag

SEQ ID NO: 234639 - DNA, 1689 bp, synthetic construct
  misc_feature 1..1689: note = Description of Artificial Sequence: Synthetic coding sequence
  source 1..1689: mol_type = other DNA
atggcttcggcctcttctggtccatcctcctcggtggggttctcatcctttgatcctgctgtcccgagttgcacactgagctccgccgcatccgggatcaagagacccatggctagtgaggtcctagaggccagacaggacagctacatttcactggtgccttatgcgtcgggtatgccaatcaaaaaaatcggacataggtccgtagactcctctggagaaaccacctataagaaaacaacaagctcagccctcaaaggtgctatccagcttggaataactcataccgtgggcagtctgagcacaaaacccgaacgcgatgttctgatgcaggatttctacgtcgtggaatccatcttttttccctcagaggggtctaacctgacacccgcacaccattacaatgacttcagatttaagacctatgcaccagtcgcctttagatacttccgtgaactttttggcattagaccagatgactatctctacagcctgtgtagtgagccacttatcgaattgtgctcctccggcgcttctggatccttgttctatgtgtcatccgatgatgaattcataattaagacagtccaacacaaggaagcagagttcctgcaaaaactcctgccaggttactacatgaacctgaaccaaaacccgaggacactgctgcctaagttttacggactgtattgcgtgcaagctggcggtaagaacatacgaatagtagtcatgaacaatctgcttccacgctctgttaagatgcacataaagtatgacctgaaaggttctacctacaagagacgagcgagtcagaaagagcgggagaagcctcttcccacattcaaagatctggacttccttcaggatataccagatggattattcctggacgccgatatgtataatgctttgtgcaagaccctgcagcgagattgccttgtcctgcagtcctttaaaattatggactactcgcttctgatgagtattcacaacatcgaccacgcacaacgagagcctctcagcagcgaaacacaatactccgtggatacacggcgtccagccccacaaaaagccctctactccaccgctatggagtctatccagggcgaggctcgtaggggcggaacaatggagaccgacgaccacatgggcggaatccccgcacggaattctaagggtgagaggttactgctgtatatcgggataatagacatcctccagtcttaccgttttgtgaagaagctggagcattcctggaaggccctagtacatgacggggataccgtaagcgtccatagaccgggattttatgcagaaagatttcagcgtttcatgtgcaatacagtgtttaaaaagatccccctaaaaccaagccctagcaaaaagttccgctctggctcttctttttcaaggcgcgcaggctcaagcggaaactcatgcataacatatcagcctagcgtgagtggcgagcataaagctcaggtaacaacaaaggccgaggtggagcccggtgttcacttgggccgaccagacgtgttgccacagacccctcctctggaagagattagcgagggctcaccaatacctgaccctagcttctctcccctggtcggcgaaaccctacagatgttgaccaccagcacgaccctggaaaagctcgaggtcgctgagtctgagttcactcattag

SEQ ID NO: 234640 - DNA, 1503 bp, synthetic construct
  misc_feature 1..1503: note = Description of Artificial Sequence: Synthetic coding sequence
  source 1..1503: mol_type = other DNA
atggcctccgctagctccgggccaagctcatccgttgggttttcctccttcgatcctgccgtaccatcgtgtacactgagctccgcaagcgggataaagcggcctatggcaagcgaggtcccctatgcgtccgggatgcccataaagaaaattggacacagatctgtggatagctctggtgagaccacttacaaaaagactactagctccgccctcaaaggggcaatccagctgggcataacccataccgtggggtccctgtcaacgaagcccgagcgcgatgttctcatgcaggacttttacgtggttgagagcatattcttcccttcggaaggaagcaatcttacacccgcacaccattacaatgacttccggttcaaaacttacgcccctgtggcctttcgatacttccgcgagctgttcgggattaggccagatgactacttgtattctttatgctcagaaccgctaatagagctctgttcatctggagcttctggatcactgttctacgtttcttccgatgatgagtttattatcaagaccgtgcagcacaaggaagccgagttcctgcaaaagctgcttccaggttactatatgaaccttaaccagaaccccagaacgcttctgccgaaattttatgggctatactgtgtgcaggccggaggcaagaacatcagaattgtggtcatgaacaacctgctcccccgatcagtcaaaatgcacatcaaatacgacctgaagggttcgacctacaagaggagggcatctcaaaaggagcgggagaagcctctgccgacctttaaggacctggatttcctccaggatatacctgacgggttgttccttgacgcggacatgtataacgctctgtgcaaaacccttcagcgggattgcttagtgctccagtctttcaagatcatggattactccctgctgatgagcatccataacatcgaccatgcacagcgcgagcctctgagctccgaaacacaatactcagttgatacaagaagaccggctcctcaaaaggctctgtattcgacggctatggagagcatacagggcgaggcacggaggggtggcaccatggaaacagatgatcatatgggtggaatcccagcccgaaatagcaagggagaaaggctcttgctttatataggcattattgatatcctgcagtcataccggttcgtcaaaaaattggaacactcctggaaggctctcgtccacgatggcgataccgtgagcgtgcatagaccaggtttctatgcagagagatttcagcggttcatgtgcaacacagtgttcaagaagatcccgtgtgtccacctgggacgcccagatgtactgcctcagacacctccgctggaagaaatctctgaggggagccctatcccagatccttctttcagccctctcgtgggcgagactctgcagatgctgaccacctcaactactctagagaagttggaagtagcagaatctgaattcacccattag

SEQ ID NO: 234641 - DNA, 1653 bp, synthetic construct
  misc_feature 1..1653: note = Description of Artificial Sequence: Synthetic coding sequence
  source 1..1653: mol_type = other DNA
atggcttccgctagctctggaccatcaagctcagttggcttttcctcgttcgaccctgctgtcccatcatgcaccctttcttctgctgcctccggaattaagagacccatggcctccgaggtgccctacgccagcggtatgcccattaagaagattggacaccggtccgttgattcaagcggagaaacgacctacaagaagactaccagcagcgccctgaaaggggcaatccagctggggattacacatactgtgggctctctctcgactaagccagaacgcgatgtgctgatgcaggatttctacgtggtagaaagcatttttttcccttccgaaggctctaatctgaccccggcacatcactacaacgattttagatttaaaacgtatgctcccgttgcctttcgatattttagggagctcttcggaatccggcctgacgattacctatactccctctgcagtgagcctctgatagaattatgcagctccggcgcttcaggcagcctcttctatgtaagcagcgatgacgaattcattattaaaactgttcaacacaaggaagctgagtttttgcagaaacttctgcctgggtattatatgaaccttaaccagaatccccgaaccttacttccgaagttctacggactgtactgcgtccaagccggaggcaagaacattaggatcgtggtgatgaacaatctgctgcccaggtccgttaaaatgcatataaagtacgacctgaaagggagtacttacaagagacgcgcatcccagaaagagagagagaaacccttaccaaccttcaaagacctcgacttcttgcaggatatccccgacgggcttttccttgacgccgatatgtataacgccctgtgtaaaacactgcagcgtgattgcctggtgcttcagtcctttaaaatcatggattactctctgctcatgtctatacataacattgaccatgcccagcgcgagcccctgagttcagagacacagtatagcgttgatacacggaggccagcaccgcaaaaggcgttgtatagcacagcaatggagagtatacagggagaggccaggagaggcggaacaatggaaaccgatgaccacatgggtggaatccccgctagaaattccaagggagagaggttattgctttacatcgggattatcgacatcttgcaatcctacagatttgttaagaaactcgagcacagctggaaagcactggtgcatgatggtgacaccgtatcagtgcatagacctgggttctatgccgagcgcttccagaggtttatgtgtaataccgtgtttaagaaaatccctctgaagccgtcaccgagtaagaaatttcgcagcggctcgtccttctctcgcagagcgggtagcagcgggaatagttgcatcacttaccagccctcagtgagcggtgagcacaaggcccaggttaccaccaaggcagaagtggagcctggggtgcatttaggcagaccggacgtgctccctcagacgccccctctggaggagatctccgagggcagtcccattccagaccccagctttagccctctcgtaggagaaaccctccaaatgcttaccacctcaaccacactggagaagctcgaggtggcagaaagtgaatttacgcactag

SEQ ID NO: 234642 - DNA, 597 bp, synthetic construct
  misc_feature 1..597: note = Description of Artificial Sequence: Synthetic coding sequence
  source 1..597: mol_type = other DNA
atgtataacgccctgtgtaaaactctccagagggactgcttagtgttacagtcttttaagattatggattattctttgctgatgtccattcacaacattgaccatgcacagcgggagcctctgagcagcgaaactcagtactcggttgacactaggagacctgctccccagaaagccctctactccaccgccatggaaagcattcaaggcgaggcacgaagggggggaactatggagactgacgaccatatgggcggtatcccagccaggaatagcaaaggggaaagactgctcctctatattggaattatcgatatactgcagtcataccgttttgtgaaaaaactagagcacagttggaaagccctcgtgcacgatggtgataccgtgtctgtccatcgcccaggattttacgccgaacggttccagcgattcatgtgtaacactgtgttcaaaaagattccactccagccctggaagtcgttaaaactccagtctcagagttctcccatcaagcgcaaggcaagcgaggacctggagcaggattcagctataagcgtcatacctaggtgccagcccctgcctcagcagtgctag

SEQ ID NO: 234643 - DNA, 261 bp, synthetic construct
  misc_feature 1..261: note = Description of Artificial Sequence: Synthetic coding sequence
  source 1..261: mol_type = other DNA
atggcgagtgaagtgctggaggcaagacaggactcttacatctccctcgtgccttacgcatctggaatgcccataaagaagataggtcaccgctctgtggatagcagcggcgagaccacttacaagaagacaacgtcgtctgccttgaaaggcgctattcagctgggcatcactcatacggtagggtccttaagcaccaagcccgagcgggatgtgctgatgcaggacttttatgtggtggagtccatcttctttccctag

SEQ ID NO: 234644 - DNA, 1569 bp, synthetic construct
  misc_feature 1..1569: note = Description of Artificial Sequence: Synthetic coding sequence
  source 1..1569: mol_type = other DNA
atggcatctgctagttctggccctagtagctccgtcggattcagttctttcgaccccgctgttccttcttgtacattatcctcagccgcatccgggatcaagcgcccaatggcctctgaagtgccatacgcatctggaatgccaatcaaaaagataggtcaccggagtgtcgattcaagcggcgagacaacatacaagaagactacttctagcgcactgaagggtgcaattcagctgggcattacgcacactgtcgggagcctcagcacaaagcctgagcgcgacgtgctgatgcaagacttctacgtcgtcgagagcatttttttcccttctgagggatcaaacctgacacccgcacatcactacaacgattttcggttcaagacctatgccccagtggcttttaggtactttcgagaattgtttggaattcggccagatgattacctctattcactatgctcggagccgctgatcgagctttgcagctcgggtgccagtggatcattattttacgtgtctagcgatgatgagttcatcattaaaaccgttcagcacaaagaagccgaatttcttcagaagctgctgccaggctattatatgaacttaaaccagaatccccgtacgcttctccctaaattctatggactttattgcgtgcaagcaggcggaaaaaatatccgtattgtcgtgatgaacaatctgctgccccgttctgtgaagatgcatattaagtacgacttaaagggctcgacatacaagaggagagcctcacagaaggagcgagagaaacccttgcccacctttaaagacctcgattttttacaagatatcccagacggactgttcctagacgctgacatgtacaacgcgctgtgtaaaaccctacagcgcgattgcctcgtgttgcagagctttaagatcatggattacagtcttctgatgtctatccataatatcgatcacgctcagcgagaacctctttcttccgaaacgcagtacagtgtagacaccaggagacccgctccacagaaagccctctatagcacagcgatggagagcattcagggggaggcaagaaggggtggcaccatggagacagatgaccagttcgttaaaaaactggagcactcgtggaaggccctggttcacgacggcgatacagtcagcgtccaccggccaggtttttatgccgaacgttttcagaggttcatgtgtaacacagtgttcaaaaaaatccctctgaagccatcgccatccaagaaattccgtagcgggagctcattctcacggagagccggatctagtggaaacagctgcattacatatcagccctcagtgagcggagagcataaggcacaggtcaccactaaggccgaggtcgagccaggtgtgcatctggggaggcccgacgtgttaccacaaactccccctcttgaggaaatctcagaggggagccctatacctgatccaagctttagtcccctcgtcggggagacactgcaaatgctgacaacatcaactacgcttgagaagttggaagtcgctgagtccgagtttacccactag

SEQ ID NO: 234645 - DNA, 1623 bp, synthetic construct
  misc_feature 1..1623: note = Description of Artificial Sequence: Synthetic coding sequence
  source 1..1623: mol_type = other DNA
atgtcctcagccgcagaaaacggcgaagcagctcccggtaaacagaacgaagaaaagacctacaagaaaaccgcatcctctgcaataaaaggcgcaatccagctgggcatcggatacacagtgggtaacctaaccagcaagccggagagggacgtcctcatgcaggacttctatgtggtcgaatcggttttcttaccaagtgaagggagcaatctcaccccagcccatcactatcctgattttcgcttcaagacctatgcgccactcgcctttcggtactttcgagaactgttcgggataaaacccgacgattatctatattccatatgctctgagccattgattgagctgtctaacccgggagcctccggaagcttgttttttgtgactagtgatgacgagttcatcattaaaacagtgcagcacaaggaggccgaattcttgcagaaacttttacccggatattacatgaatttaaatcagaatccaaggaccttgctacctaaattctatggcctctattgtatgcagtcgggcggaatcaacataagaatcgtagtcatgaacaacgtgttgcctagatccatgcggatgcactttacgtacgacctcaagggttccacatacaaaagacgagcttcgcggaaggaacgcgaaaagtccaaccctacttttaaagatcttgattttttgcaggatatgcacgaaggactgtattttgacaccgagacatacaacgctctgatgaaaaccctccaacgggattgcagagtgctggaatcctttaagatcatggattattccctgctgctaggaattcattttctggaccatagcctgaaggaaaaggaagaagaaactccacagaacgtgcccgatgccaaacggacagggatgcaaaaagttctgtacagcactgcaatggagtcaattcagggacctgggaagagcggggatgggatcatcacagaaaatccggacactatggggggtattccagctaagtcacaccgcggagaaaaattgctgttgttcatgggcatcattgatatcctgcagagctaccgccttatgaagaaactggaacactcatggaaggccctcgtatacgatggggatacagttagtgtacaccgcccttccttctacgcagatcgctttctaaaattcatgaacagtcgggtctttaagaagatacaggccttaaaggcctcaccatcgaagaagcgatgcaacagtatcgccgctctcaaagcgacatcccaagaaatcgtgagcagtatcagccaggaatggaaggacgagaagagggacctgttaaccgaagggcagagcttttcatctctggacgaggaggccttgggcagtcgtcacaggcccgacttagtaccaagtaccccgagcctctttgaagctgccagcttggcaacgaccatttcttcttcatccctgtacgtaaatgaacattacccccacgacagaccaacgctttactccaactccaaggggctgccctcgtcatctacgttcactctggaggagggcactatatacctcacagccgagccaaatactcttgaggtgcaggatgacaacgcctccgtgctggacgtgtatctctag

SEQ ID NO: 234646 - DNA, 312 bp, synthetic construct
  misc_feature 1..312: note = Description of Artificial Sequence: Synthetic coding sequence
  source 1..312: mol_type = other DNA
atgtccagcgcagccgagaacggcgaggctgctccagggaaacagaacgaagagaagacttataaaaaaaccgcgagtagcgcaattaaaggcgctatccagttggggatcggttacacagttgggaacctcacctcgaagccggagagggacgtgctgatgcaggatttctatgtcgtcgagagcgtgtttctgccctcagaaggctccaatctgacccccgctcaccactaccccgattttcgctttaagacttatgcgccactggcctttcggtacttcagagagcttttcgggattaagcctgattag

SEQ ID NO: 234647 - DNA, 1623 bp, synthetic construct
  misc_feature 1..1623: note = Description of Artificial Sequence: Synthetic coding sequence
  source 1..1623: mol_type = other DNA
atgtcctcagccgctgaaaacggagaagcagctcctggcaagcagaacgaggagaagacctacaaaaaaaccgcaagcagtgctattaaaggggctatacagctgggcataggctatacggttgggaacctgacctctaagcctgaaagagacgtccttatgcaggacttctatgtggtcgaatccgtgtttctgccgagtgaaggttcaaatctgacccccgcacaccactaccctgacttccgtttcaaaacatatgctccgctggcattcaggtacttccgggagctgttcgggattaagccagatgattacctttacagtatctgctccgagcctctgattgaactgagcaatcccggagcatctggttccttgttcttcgtcaccagcgatgatgagttcattatcaagacagtgcaacacaaggaggccgaatttctgcagaagctgctgcctgggtactacatgaacttgaaccaaaaccccagaaccctcttgccaaagttttatgggctctattgcatgcagagcggcggtatcaatattcgcatcgtggtgatgaacaacgtcttgcccaggtctatgagaatgcattttacgtacgacctcaagggttcaacctataagagacgtgcatcacgcaaagagagagaaaaaagtaaccctacttttaaagacttagacttcctgcaggatatgcatgagggactatacttcgacacagagacttacaatgccctgatgaaaaccctccagcgagactgtcgggtgctggaatcgtttaagattatggattatagcctactgttagggattcatttcctggaccactcgctgaaagagaaagaggaagagacacctcagaatgtgccagatgctaaaagaactggaatgcaaaaggtgctgtattcaactgccatggaaagtatccagggtcccggaaaatctggagatggcataattactgaaaaccctgacacaatgggcggtataccggcaaagtcacatcgcggtgaaaaactcctgctttttatggggatcatcgacattctgcagagctacagactgatgaaaaagctggaacactcatggaaagccctcgtttacgatggcgacaccgtgagcgtgcatagaccttcattctatgctgaccggtttctgaaatttatgaattcacgggtgttcaagaagatacaggccctgaaagcaagtccctcgaaaaaacgctgcaatagcatagcagctttgaaagcaacctctcaggagatcgtgtcttcaattagccaagagtggaaagacgagaaacgcgacctgctgacggaaggacagtcattttcatcccttgacgaggaggccctggggtcccgccatcgtcctgatttggtgccttccactcccagcctgtttgaagcggctagcctcgccaccaccattagttcttctagcttgtacgtgaacgagcattacccacacgacagaccaacactgtattcgaactccaagggcctgcccagttcctctacctttaccctggaagagggcacgatatatcttacagcagagcctaacactcttgaagtccaggatgataacgcttctgtcctggacgtttatctgtag

SEQ ID NO: 234648 - DNA, 1350 bp, synthetic construct
  misc_feature 1..1350: note = Description of Artificial Sequence: Synthetic coding sequence
  source 1..1350: mol_type = other DNA
atgcaggacttctatgtggtggagtctgttttccttccatcagaagggtccaatctgacccctgcccatcactacccagactttaggtttaaaacttacgccccactggccttccgctattttagagagctgttcggaatcaagcccgatgattatttgtactcaatatgttcagagccactgatcgaactgtccaacccaggcgcttccggaagccttttctttgttacatccgatgacgagtttatcattaagaccgtccagcataaggaggccgagtttctgcagaagctgctgcctgggtattacatgaacctgaaccagaacccgcgtactctcttacctaaattttatggcctctactgcatgcagtcagggggtattaacataagaatcgtggtgatgaacaatgttctgcccagaagcatgcgcatgcactttacttatgaccttaagggaagcacctataaacgcagggctagtagaaaagaacgggaaaagagcaacccaacttttaaggacctcgactttctgcaggacatgcacgaaggattatattttgacaccgagacttataatgccttgatgaagaccctccagcgcgattgtagagttttggaatccttcaaaatcatggattactctctcctgctggggatccactttttagatcattccctcaaagagaaggaggaggagacccctcagaacgttccagatgctaaaagaactggaatgcagaaggtcctgtactcgacagcgatggagagcattcagggacctgggaagagcggcgatggaattattaccgaaaatccggatacaatggggggtatcccagccaagtcccatcgcggtgaaaaattgctactcttcatggggattattgatatcctgcagtcctatcgcctcatgaagaaactcgagcactcttggaaagccttggtgtacgatggagatactgtgtcagtgcacagacctagcttctacgccgacaggtttttgaagtttatgaactcccgcgtgttcaagaaaattcaagcccttaaggcctctccctctaaaaagaggtgtaactccatcgcggctctgaaggcaacaagccaggagattgtctcttcaatcagtcaggagtggaaagatgagaaacgggatctcttaacagagggacagagcttctcctctctggatgaggaggcacttggaagtcgccatcgccctgatcttgtcccgagtacaccgagcctcttcgaagctgcctccctcgccacaactatctctagcagtagtttgtacgtgaacgagcactacccacacgaccggccaacgctttatagcaactcgaaatag

SEQ ID NO: 234649 - DNA, 489 bp, synthetic construct
  misc_feature 1..489: note = Description of Artificial Sequence: Synthetic coding sequence
  source 1..489: mol_type = other DNA
atgtcgagtgcggcagagaacggggaggccgctccaggcaagcaaaacgaagagaagacatacaaaaagacggcctccagtgccataaaaggggctatacaactgggaataggatacaccgtaggcaaccttactagcaagccggagcgagatgtgcttatgcaagacttttatgttgtcgagtccgtcttcctcccctctgaggggtctaatctgacgccggcacaccattacccggatttcagattcaagacctacgcacctctcgccttcagatacttcagagagctcttcggcatcaagcccgacgattacctatattccatctgctctgagccgctcatcgagctgtctaatcctggcgcaagcgggagcctgttctttgttacgtctgacgatgagtttattataaaaactgtgcagcacaaggaggctgagtttctgcagaaactgctgcccggatactacatgaatctgaaccagaactag

SEQ ID NO: 234650 - DNA, 474 bp, synthetic construct
  misc_feature 1..474: note = Description of Artificial Sequence: Synthetic coding sequence
  source 1..474: mol_type = other DNA
atgtcaagtgcagccgagaacggcgaagccgcaccaggaaaacagaacgaagagaagacatacaagaaaaccgcttcgtctgcaattaagggagcaattcagctgggtattgggtacacagtcggaaacttgaccagtaaacctgagcgtgacgttctgatgcaggacttctatgtagtggaatctgtgtttctgccatctgaagggtccaatctgaccccggcacaccactacccagacttccgctttaaaacgtacgcaccgttagcctttcggtacttcagagagctgtttggaataaagcctgacgactatctgtattccatctgttccgagcctctgattgaactgagcaatcccggtgccagcggatccctcttcttcgtaacttccgatgacgagttcatcattaagaccgtgcagcacaaggaagccgagtttctgcagaagctgctgcctggctattacatgtag

SEQ ID NO: 234651 - DNA, 1509 bp, synthetic construct
  misc_feature 1..1509: note = Description of Artificial Sequence: Synthetic coding sequence
  source 1..1509: mol_type = other DNA
atgtctagtgcggctgagaacggtgaggcggcacccggtaaacaaaatgaagaaaagacatacaaaaagacagcgtctagtgctattaagggtgccatccagctaggaattggatacaccgtcggaaacctcacgagcaagccagaaagagacgtcctgatgcaggatttctatgtagtggagagcgtttttctgcctagcgaaggcagcaacttaacccccgctcaccattacccggacttccggttcaagacttacgctcctttggccttccgctatttccgggaactcttcggaattaaacctgacgactacttgtatagcatttgctctgagcctctgatcgagctgagcaaccccggagcatccgggtctctgttttttgtcactagcgacgacgagtttattataaagactgtgcagcataaagaggccgaatttctccaaaagcttcttccgggatactacatgaacctcaaccagaacccacgaacgctgctccctaagttttatggattgtactgtatgcagtcggggggtataaatatccggatagttgtaatgaacaacgttttgcctcgttctatgcgcatgcatttcacatacgatctcaagggatccacttacaaacgcagagcatcacggaaagagcgcgaaaaatctaatccaaccttcaaggatctggactttttacaagatatgcatgaagggctctattttgacactgagacctataacgcactaatgaaaaccctacagagagactgccgcgttctcgaatccttcaagataatggactacagcctcctcctgggaatccactttctggaccattcactcaaggaaaaggaggaggaaaccccacaaaatgtccccgacgccaagcggactgggatgcagaaggtgctgtatagcacagcgatggagtccatccagggaccaggaaagtcaggtgatggaatcataactgagaatcccgacaccatgggtggaatacccgcaaagagccatcgcggagagaagctcttgctgttcatgggaatcatcgacattctccagtcctatcgccttatgaaaaagcttgagcattcttggaaggcactggtgtatgatggggatacagtttccgttcaccgccctagtttctacgctgatcggttccttaagtttatgaactcgagggtgttcaagaaaatacaggcactcaaagcatctcccagtaagaagcgctgcaattccatcgccgcactgaaggctacctcccaggagatcgtgtcttcaattagccaggagtggaaagacgagaaaagggatttgctgacagagggacagtccttctcctcactggatgaggaagctctgggatcgcgccaccggccagacctagtacccagcacacctagtctttttgaggcagctagcttagccacaaccatctcatcctcatccctatacgtgaacgaacactatcctcacgacagaccaaccctttactcaaacagcaaatag

SEQ ID NO: 234652 - DNA, 2007 bp, synthetic construct
  misc_feature 1..2007: note = Description of Artificial Sequence: Synthetic coding sequence
  source 1..2007: mol_type = other DNA
atggagctcgaagtgcctgatgaagccgaaagcgcagaagccggagctgtgccgagcgaagccgcttgggcagcagagtctggagcagccgctggcctggcccaaaaaaaagcggcaccgacagaggtcctgagtatgaccgcccagcccggaccagggcatggaaagaaactgggccacagaggggtcgatgcctcgggggaaacgacctacaaaaagactacatcgagcactctgaagggcgcaattcagctgggcattggctacacggtgggccacctgagttccaaacccgaaagggacgtgctgatgcaagatttctacgttgtagagagcatcttttttccttctgaaggctccaacctcacaccagctcaccatttccaggacttccggttcaaaacctacgcccctgtggcttttagatacttcagagaactttttggcattaggcccgacgattatctttattccctgtgcaatgaaccgctcatagaactttcaaacccgggagcaagtggctcactattctacgtgactagtgacgacgaattcataataaagaccgtgatgcataaggaagcagaattcctacagaagttgctaccagggtattacatgaatctgaaccagaacccgaggacgctcctccccaagttctatgggttgtactgcgttcaatccggcggaaaaaatatccgagtggtggtgatgaacaacattctgcccagagtggttaaaatgcacctgaagttcgacctgaagggatctacttacaagcgtagggcttcaaaaaaagagaaggagaagagtttccctacctataaggacctggattttatgcaggacatgccagaaggtctcctccttgatgccgataccttttcagccctggttaagacgttgcagcgcgactgtctggtgctcgagtccttcaaaataatggactactccctgttgttaggcgtccacaatatagaccagcatgagcgagaaaggcaggcccaaggtgctcagagcaccagcgatgaaaagaggcccgttggccagaaagcactgtatagcactgccatggaatctatacaaggcggtgctgcgcgtggggaagccatagagtctgacgacacaatgggagggattccggctgtgaacgggagaggcgagcggctcctgctccatattggcattattgatattctacagagttacagatttataaagaaattggagcacacctggaaggctctggttcatgacggagatacagttagcgtccaccggcctagcttctacgcggaaagattcttcaagttcatgtctaacactgtgttccggaagaactccagcttgaaaagcagcccttctaaaaagggtagaggcggagcgcttcttgccgtcaagcccctgggacctactgccgcattctccgcttcccagattccgtccgagagagaggaggcccagtatgacttgcgtggagccaggagctaccccaccctggaagacgaagggcgaccagacctactgccctgcactccgccatcattcgaagaggcaacaaccgcctcaattgctacgactttgtcttccacctccctaagtattccagagcgcagtcccagcgagacctccgaacagccaaggtatcgacgacgaactcagagcagcggccaggacggacgcccacaggaggaacctcctgcggaggaggatcttcaacagataaccgtgcaggtcgagcctgcctgtagtgtggagatagtggtgccaaaagaggaggatgccggagtcgaagctagcccggcaggcgcatcagccgctgtggaggtggagaccgcctcacaggccagtgacgaagagggagcccctgcctcccaagcctctgacgaagaggatgcgcctgccacggatatatattttccgacagacgaacggtcctgggtgtattcacctctccactattccgctcaggcccctcccgcaagcgatggagaatccgatacatag

SEQ ID NO: 234653 - DNA, 2103 bp, synthetic construct
  misc_feature 1..2103: note = Description of Artificial Sequence: Synthetic coding sequence
  source 1..2103: mol_type = other DNA
atggagttggaagtacctgatgaagcagaatcagccgaggccggagcagtcccctcagaggcggcttgggctgctgaaagtggggcagcggcaggcctggcccagaagaaggccgctcctaccgaggtgttgtctatgactgcccagcctgggccagggcacggtaagaaacttggccatcgcggagtcgatgccagcggggaaaccacatataagaagaccacatccagtactctgaagggggctattcaactgggaattggctatactgtgggccatctctcctctaagccggagagagacgtgctgatgcaagacttctatgtggtggagtctatttttttcccgagtgagggaagcaatcttacccccgctcaccacttccaagattttcgattcaagacatacgcccctgtagccttccgctacttccgagagttgtttgggattaggcctgatgactacctctattctctgtgcaatgagccattaatcgaactgtcgaaccccggagctagtggcagtctgttttacgtcacatccgacgatgagtttataattaagacagtgatgcataaggaggctgagtttcttcagaagctcttgcccggatattatatgaatctgaatcagaaccccagaacactgctacctaagttttacggtctctactgcgtacaatctggaggcaaaaacatacgggtggtcgttatgaataacatcttgccacgggtagtcaaaatgcatctgaagttcgatcttaaaggtagcacttataagcggagagctagtaagaaagaaaaagaaaagtcatttccaacctataaggacctcgacttcatgcaggatatgcccgaagggctgctactggacgctgataccttcagcgcacttgtgaagaccttacagcgggattgcttggtgctggagagttttaagatcatggactactccctccttctgggtgtgcataacattgaccagcatgaacgggaacggcaggcacagggggcacagtccacatccgacgaaaaaaggccggtggggcaaaaggccctgtactccacagccatggaatccattcagggtggcgcagccaggggagaagcaatcgagagcgatgatacaatgggtgggatccctgcagtgaacgggaggggagaacgcctgttgctgcacatcggaattatagacattctacagtcgtaccgttttattaagaagctggaacatacctggaaggcactcgtccatgacggcgatactgtgagtgtgcacagaccaagcttttacgccgagcgattttttaaatttatgagtaacaccgtgtttagaaaaaactcttccctcaaatcatctccgtctaagaaggggcgaggaggtgcccttctggccgttaaacctttgggcccaaccgccgcttttagtgcttcccagattccttctgaacgcgaggaagctcagtatgaccttaggggagcacgatcataccccaccctcgaagacgaaggcaggcccgatttattgccgtgcacgccaccaagcttcgaggaggctacaacagcatcaattgccactactttgtctagcacttcactttcaatcccggagaggtctccctctgaaactagcgagcagccccgttaccggagaaggacccagtcatcgggtcaggatggcaggcctcaagaagaaccacctgctgaggaagacctgcagcagataacagtgcaggtggagcccgcttgtagcgtcgaaattgttgtacctaaggaggaggatgccggagtcgaggcctccccagcaggcgcatccgcagctgtggaggtggagactgcttcacaggccagtgacgaagagggggcaccggctagccaggcgtccgatgaggaagacgccccagcaacagacatttacttctggcgcctctggggaccgcatgcaccgacttggccatggagaagggaggggagggcagcttgtctgtgcccatatccgcctcatgtggtgactcccttccctggaaccggtctctgtgcctcttggtcaccagacggaacaggtggactgggggctatgtcctgctgtgtgagcgtgagctag

SEQ ID NO: 234654 - DNA, 1923 bp, synthetic construct
  misc_feature 1..1923: note = Description of Artificial Sequence: Synthetic coding sequence
  source 1..1923: mol_type = other DNA
atggaactcgaagttcccgatgaggccgaaagcgcagaagccggtgccgtgccatctgaagcagcttgggccgctgaatcgggcgcagcggctgggctggctcagaagaaggccgctcccactgaggtgctgtctatgacagcacagcctggacctggacacggtaagaagttggggcatcgcggtgtggacgcctccggcgaaactacatacaagaagacaacgtcctcaacattgaagggtgctattcagctcggcatcggttacactgtcggacatttgagtagtaagcctgaacgtgacgtcctgatgcaggatttttacgtggtcgaaagcatattcttcccgagcgagggaagcaacctgactcccgctcaccactttcaggatttccgttttaagacctatgcccctgtggctttcagatacttccgcgagctatttggaattcgcccagatgattacttatacagcctgtgtaatgaacccttgatcgagctgtctaatcctggtgcatccggtagccttttctacgtgacctcagacgacgaattcatcatcaagactgtgatgcacaaggaggcagagttcctgcagaagttactccctggctattatatgaacttgaaccagaaccccaggacccttctgccaaaattttacggcctttattgtgtccagtctgggggaaagaatatcagggtggtggtgatgaataacatactgcccagggtcgtgaaaatgcacctgaagtttgacctaaagggctccacttataaaaggagggcatctaagaaggaaaaagagaagtccttcccaacgtataaagacctggactttatgcaggatatgcctgaggggctgctcttggatgcagatactttttcagcactcgtgaaaacccttcagagggactgcctggtgctggagtcattcaaaatcatggactacagtcttctgttgggggtgcacaacatcgatcagcatgagcgggagaggcaagcacaaggagcccaatccaccagcgacgagaagcggccagtcgggcagaaagctctatacagcactgccatggaaagtattcaggggggtgcagcccgaggagaagctattgagtccgatgacacaatgggcggaatcccagccgtaaacggaagaggcgagagactactactgcatatcggaatcatagatatcctgcaaagctatcggtttataaagaaacttgagcacacctggaaagccctggtacacgatggcgacactgtcagcgtccaccgcccaagcttctatgccgaacggtttttcaaattcatgtctaatactgtgttccgtaaaaacagctccctcaaatcaagtccatccaagaagggcaggggaggtgcgcttctggcagttaaacccttaggacccaccgccgctttttccgcttcacagattccatctgaaagggaggaagcccagtacgatctgagaggtgccagatcctatcctactctcgaggacgagggcagacccgacctcctgccttgcacaccaccatcattcgaggaagccactaccgccagtattgctacgactctgtcatctacttccctgagtatcccggaacggtctccctcagaaacctctgagcaacccagatatcgacgccgtacacagtcctctgggcaagacggccgacctcaggaggagccaccggctgaggaagacttgcagcagattaccgttcaggttgagccagcctgctcagtcgaaatcgtggtgccaaaagaggaggacgccggtgtcgaggcgagtccagcaggcgctagcgcagccgtggaagtcgaaacagctagccaggcttcagatgaggaaggcgcaccggcaagccaagcctccgatgaggaagacgctcctgctaccgatatctacttttag

SEQ ID NO: 234655 - DNA, 576 bp, synthetic construct
  misc_feature 1..576: note = Description of Artificial Sequence: Synthetic coding sequence
  source 1..576: mol_type = other DNA
atgcagagcgtcttttatcctgcaggcaggatatccgaaaggtacgatattaagggatgtgaggtcagccggtgggttgatcccgctcctgagggatcacccctagtgcttgttttaaaggacctaaacttccagggaaagactattaatttgggtcctcagagatcctggtttctgaggcaaatggagctggatactaccttcttgcgcgaacttaacgtgctggactacagcctgctgatcgccttccaacgcttgcatgaagacgagagaggcccaggcagctcattaatattcaggactgccagatcggtgcagggcgcacaaagtccagaggaatctagagcccagaatagacgcctgcttccggatgcacctaacgccttacacatacttgacggccctgagcagaggtactttcttggcgtagttgacctggcaacagtgtacggattgagaaaaagattagagcatctgtggaaaacccttcgatacccaggcaggacctttagcactgtatcgccggctcgatacgctcgaagactgtgccagtgggtggaggcacatactgaatag

SEQ ID NO: 234656 - DNA, 1185 bp, synthetic construct
  misc_feature 1..1185: note = Description of Artificial Sequence: Synthetic coding sequence
  source 1..1185: mol_type = other DNA
atggctgccccttcgcctggccctagggaagtacttgctccttcaccggaggccggatgcagggcagtcacaagcagtaggagagggctcctgtggaggctccgtgataagcaaagcagattggggctgtttgaaatcagccccggacatgagcttcatggaatgacctgcatgatgcaagccggtctttgggccgcaactcaagtgagtatggaccaccctcccaccggcccaccatcccgcgatgatttttctgaagtattgacgcaagtccatgaaggatttgagctcggcaccctcgcaggccctgcgttcgcatggctgcgccgatcgcttggattagcggaggaagattaccaggccgctctgggcccagggggtccttatctgcagttcttgtccacctccaagtccaaagcttcattcttcctcagccacgaccagaggtttttccttaagacacagggacgcagggaggtccaagctctgctggctcaccttccacgctatgtccaacacctgcagaggcaccctcattcactgctcgcaaggctgcttggcgtccattcccttagggtggatcgtggcaagaaaacttacttcatcgtgatgcagtccgtattctacccggcaggaaggatttcggaaaggtacgatatcaaaggttgtgaggtgtcaagatgggtcgatcctgcgccagagggatcccccctcgtgttagtgctcaaagatttgaacttccaaggtaagacaatcaatctggggccacaacgatcgtggttcctgcgccagatggagcttgacacaacatttctgcgggagctgaacgttcttgattacagcttgctcatagcttttcagagactgcatgaggacgagcggggaccgggatctagcctgatcttccgcacagcacggagcgtgcagggggcacagagcccggaggagagccgagctcagaaccggagactcctgccggacgcccctaacgccctacacatattggacggacctgagcaacgatactttctaggcgtggtggacctggccacagtgtatggactgcggaaaagactcgaacacctgtggaagaccttgagatacccaggtcggaccttcagcaccgtgtctccagccagatacgcacggaggttgtgtcaatgggtcgaagcacacacagagtag

SEQ ID NO: 234657 - DNA, 1128 bp, synthetic construct
  misc_feature 1..1128: note = Description of Artificial Sequence: Synthetic coding sequence
  source 1..1128: mol_type = other DNA
atgatgtgccagagtgaagcccgacagggtcctgaactacgagctgctaaatggcttcacttccctcaacttgccctgcgacggcgtcttggtcagctcagctgcatgagccggccagcgcttaagttacgctcatggccactgacagtgctctactatctgctccccttcggggctctccgtcccttgagccgagtcggctggagacccgtgtcaagagtggccctctacaagagcgtgcctactaggcttctgagccgcgcttgggggaggctgaaccaggttgagctcccccactggctccgtcgtccagtctactcattatacatctggacctttggcgttaatatgaaagaagcggcagtggaggatctgcatcactaccggaatctgtcagagttcttcaggaggaagctgaaaccgcaggcaagacctgtgtgcggcctgcacagcgttatctctccctctgatgggaggatcctgaatttcggccaggttaaaaactgcgaggtagagcaggttaagggtgtgacctactcacttgaatctttcctagggcctagaatgtgcactgaagatctgcctttcccaccagcagcctcctgtgattcttttaagaaccaactcgtcactagagagggaaacgagctttaccactgtgtcatttatctcgcacccggtgactaccattgtttccacagtccaacagactggacagtgagccaccggagacacttcccagggagcctgatgtcagtcaatccgggaatggcccgttggattaaagagctgttttgtcacaacgagagggttgtgctgacaggagactggaagcacggcttcttctctctgaccgccgtcggcgctacgaatgtcggtagcatcagaatctactttgacagggatctccacaccaactcaccaaggcattccaagggcagctataacgatttctcattcgtaactcacaccaacagagaaggtgtgcccatgagaaagggggagcatctgggagagtttaacctgggcagtacaattgtgctcatctttgaggcccctaaggactttaactttcagctgaagacagggcagaaaattcggtttggcgaggctctggggtctctatag

SEQ ID NO: 234658 - DNA, 1227 bp, synthetic construct
  misc_feature 1..1227: note = Description of Artificial Sequence: Synthetic coding sequence
  source 1..1227: mol_type = other DNA
atggctaccagcgtgggtcaccggtgtctggggctgctccacggcgtggccccatggcgcagctccctccatccatgtgagatcaccgcccttagccagtccctgcagccactccggaaactgcctttccgggcttttagaaccgacgctcgcaagatccataccgctcccgctcgcacaatgttcttactcagaccactgccaatccttctcgtgacgggaggcggttatgcgggttatcgccagtacgaaaagtatcgggaacgggagctggagaagttgggattggagatcccacccaaactggctggccactgggaagtcgctctgtataagtccgtccctactagactgttaagccgcgcttggggaagactgaatcaagtagaattgccccattggctgagacgcccagtgtactctctctacatttggaccttcggcgttaacatgaaagaggccgctgttgaggatttgcatcattatcgaaatctcagcgagttcttcaggcgtaaacttaagcctcaggcgagacccgtctgtggcctccattcaatctcaccctctgatgggagaattctgaattttggccaagtcaaaaactgcgaggtggaacaggtcaagggcgtgacttatagccttgagtcatttctagggcctcgaatgtgtacagaagacctccccttcccaccggctgctagctgcgattcctttaagaaccagctcgttacccgcgaagggaacgagctttatcattgcgtgatctatcttgcgccaggcgattatcattgcttccactctcccactgactggactgtttcccataggaggcactttcctggctccctgatgtctgttaaccctggtatggcgcgttggataaaagaactgttctgtcacaacgagcgtgtggttctgaccggggattggaagcacggtttcttttctctcacagcagtgggggctactaacgttgggtcaattaggatctatttcgaccgggatctgcatactaactcccctcggcattctaaaggttcttataacgacttctcctttgtaactcatacaaatcgggaaggagtccccatgaggaagggcgagcacctgggagaatttaacctcggctctaccattgtgctgattttcgaagctccaaaggacttcaactttcagctcaaaacgggccagaagatccgcttcggcgaagctctaggcagcctgtag

SEQ ID NO: 234659 - DNA, 1128 bp, synthetic construct
  misc_feature 1..1128: note = Description of Artificial Sequence: Synthetic coding sequence
  source 1..1128: mol_type = other DNA
atgatgtgccagtccgaggccaggcaaggtcctgagttgcgcgcagccaagtggctgcactttccccaactcgccctgcgcagacgactgggccagctgagctgcatgagtcggccagccttgaagttgagaagttggcccctaaccgttctgtactatctactgccattcggggcacttaggcccctgagcagggttggctggagaccagtatcaagagtagccctgtacaagtctgtcccaaccaggttgctcagcagggcctggggcagattaaaccaggtcgaacttcctcactggttacgaaggcccgtatactctctatacatctggacttttggcgtgaatatgaaagaagcagcggtagaagacctccatcattacaggaatctctccgaattctttcggagaaagctcaagccacaggccaggcccgtgtgtggattgcatagcgtgatctccccatctgacggtcgtatactcaattttgggcaggtgaagaactgcgaggtggagcaggtaaagggggttacatacagcctggagtctttcctggggcctcgaatgtgtaccgaggaccttccttttcctcccgcagccagctgcgactcttttaagaaccagctggtgacgagggaagggaatgagctgtaccattgcgtgatatatctggctcctggggattaccattgtttccacagtccaaccgattggactgtatctcaccggagacattttccagggtctctgatgagtgttaacccaggaatggcacgctggatcaaggagctcttttgtcataacgagagagtagtcctgaccggcgactggaaacatgggttttttagcttgacagccgttggagctacaaatgttggttcgatacgcatctatttcgaccgggatttgcacaccaattcaccccgacacagtaagggaagttataacgatttttcttttgtcacacacacaaatcgggaaggcgtgccgatgaggaagggtgagcacctgggtgaatttaatctgggatcaactatcgtgttaatctttgaagcgcctaaggatttcaactttcaattaaaaaccgggcagaagattcgattcggagaggcgttaggcagcctgtag

SEQ ID NO: 234660 - DNA, 789 bp, synthetic construct
  misc_feature 1..789: note = Description of Artificial Sequence: Synthetic coding sequence
  source 1..789: mol_type = other DNA
atgatgtgccagagcgaggcaagacagggtccggagttacgggctgcgaagtggctgcactttcctcagcttgctctgagaagacgtctgggacaacttagttgcatgagccgccctgctttgaaattgaggagttggccattgacagtactctattacctgttaccgtttggggctttgagacccctttctagggtgggctggcggcctgtgtctcgtgtcgccctatacaagagtgtccctacacggctcctgtcacgcgcttggggccgactgaatcaggttgagttgccccactggctgaggcggccagtctattctttgtatatttggaccttcggcgtgaatatgaaggaagcggcagtcgaagacctgcatcattaccggaacctctctgagtttttcagacggaagctgaaaccacaggcaaggcctgtgtgtggactccattcagtcatcagccccagcgacgggagaattctgaatttcggacaggtcaagaattgcgaagtggagcaagtgaagggggtcacgtactccctggagagtttcctgggcccaagaatgtgcactgaggacctgccctttcccccagcagccagctgtgactcttttaagaatcagctggtgacccgcgaaggcaacgaactgtatcattgcgtgatttatctggctcctggtgactaccattgctttcattcacctactgattggactgtgagccacaggcgacactttcccggtccagcccacaaacaacccaaagctcagcagggactactacagtag

SEQ ID NO: 234661 - DNA, 687 bp, synthetic construct
  misc_feature 1..687: note = Description of Artificial Sequence: Synthetic coding sequence
  source 1..687: mol_type = other DNA
atgatgtgtcagtccgaagccaggcaaggcccagaattgcgcgcagccaaatggctgcatttcccccagcttgcattgagaaggcgcttaggtcagctctcttgcatgtcccgccctgctttgaagctacggtcctggcccctaacagtgttatactatctgctgccctttggcgcactacgtccattatccagggttggctggaggcccgtgagccgcgtcgcgctgtacaagagcgtgccaacacggctcctgtctagggcttggggtagactcaaccaggtggagctgcctcattggttaagaaggcctgtctatagtctatacatttggactttcggcgtcaacatgaaggaggccgcagtcgaagacctgcaccattaccgcaacctgtccgaattcttccgaagaaaactgaagccgcaggccagacccgtgtgcgggctgcactctgtgatctcacccagcgatggtcgaattcttaacttcgggcaggtaaagaattgcgaggttgaacaggttaagggcgtcacatactccctcgagtcatttctgggcccacggatgtgtaccgaagatttgccctttcccccagccgcatcatgtgattcattcaagaaccagctcgtgactcgtgagggaaatgagctctatcattgcgtgatttaccttgccccaggcgattag

SEQ ID NO: 234662 - DNA, 222 bp, synthetic construct
  misc_feature 1..222: note = Description of Artificial Sequence: Synthetic coding sequence
  source 1..222: mol_type = other DNA
atgatgtgtcaatctgaagccaggcaggggccagaactgagagccgctaaatggttacactttccccagcttgccctgcgacggcgattaggacagctgtcttgtatgagccgacctgccttaaaactgcgttcatggcccttgacagtgctctactacttactgccttttggtgccttgaggcctttgtctagagtcggctggcgccctgtctccagatag

SEQ ID NO: 234663 - DNA, 222 bp, synthetic construct
  misc_feature 1..222: note = Description of Artificial Sequence: Synthetic coding sequence
  source 1..222: mol_type = other DNA
atgatgtgccagagcgaagccaggcagggtcccgagctgcgagcggcaaaatggcttcatttcccacagctggctttaagaaggcgcctagggcagctttcctgcatgtctcggccagccctgaaacttcgatcttggccgctgaccgtcctgtactacctactgcccttcggcgctctgcgaccattgtcgcgggtaggatggaggccagtaagtcgctag

SEQ ID NO: 234664 - DNA, 1230 bp, synthetic construct
  misc_feature 1..1230: note = Description of Artificial Sequence: Synthetic coding sequence
  source 1..1230: mol_type = other DNA
atggccacatccgtgggacaccgctgcctcggccttctgcatggcgtggctccgtggaggagctccttacatccatgcgaaattaccgccctttcacagtcactgcagccgctgaggaagctacctttcagagccttcaggacagacgcgaggaagatacacacagctcccgctcgtactatgttcctgcttcgaccattgccgattctcttggtaacaggtgggggttatgcagggtacaggcagtatgaaaagtaccgcgagagagagctggaaaagctgggcctggaaatcccccctaaactggccggacactgggaggtggcactgtataaatctgtaccgactcggttgctgagtcgggcttggggacgactcaatcaggtggaactcccacactggctgaggagaccagtctattcactgtatatatggacctttggggtcaatatgaaagaggctgcagtggaggacctgcatcattatagaaacctgtcagaattctttagaaggaagttgaaacctcaagcacgccctgtgtgtggattgcatagtgtgatctctccgtccgatggtcgaatccttaattttggacaggtgaaaaattgcgaggtggagcaagtcaaaggggtgacctactctcttgagagctttttaggccctcggatgtgtacagaggacttgccctttcctcccgcagcatcgtgcgactcttttaaaaaccaattagttacccgcgaagggaacgaactttaccactgcgtcatatacctggcacctggtgactatcactgtttccattctcctactgattggactgtcagccacaggaggcattttcctggctcacttatgtctgtgaatcccggaatggctcgctggattaaagagctgttctgtcacaatgagcgggtcgtccttacaggagattggaagcatggatttttcagcctgacagcggtgggagctacaaatgtgggatctattcgcatctactttgatagggatctccacactaacagccctaggcatagtaaggggtcatataatgactttagctttgtgacccatacgaacagggagggggttccaatgcggaagggtgagcacctcggcgaattcaatctggggagcacaattgtgctcatcttcgaggcgccaaaagatttcaacttccaacttaagaccggacagaagatccgcttcggcgaggctctggggtccctgtag

SEQ ID NO: 234665 - DNA, 246 bp, synthetic construct
  misc_feature 1..246: note = Description of Artificial Sequence: Synthetic coding sequence
  source 1..246: mol_type = other DNA
atgatgtgccagtctgaagcgaggcagggccctgagctgcgcgcagccaagtggttacactttccacagctagccttacggaggcggctcgggcagctgtcctgcatgtcccgtcctgctctcaaattgcggtcctggcccttaaccgtcctctattaccttcttccttttggtgccctgagaccactgagcagagttgggtggcgtccagtttcacgcgtcgctctttataaatccgttccttag

SEQ ID NO: 234666 - DNA, 981 bp, synthetic construct
  misc_feature 1..981: note = Description of Artificial Sequence: Synthetic coding sequence
  source 1..981: mol_type = other DNA
atgatgtgccagagtgaggccaggcagggacctgagctgcgcgcagcaaagtggttacacttcccacagctcgcactgcggagacgactgggccaactgagttgtatgtctcgtcccgctctgaaactgcggtcttggcctctgactgtcctctattatctgctcccttttggagctctccgaccgctgtctcgcgtgggatggagacccgtgagtagagtcgctctttacaagagcgtccctacccgcttgctgtcccgcgcatgggggaggctcaatcaggtcgagttaccacactggttgcgacggcctgtctatagcttatatatctggactttcggtgttaatatgaaagaggccgcagtggaggatttacaccactatcgcaatttatctgagtttttccgcagaaagctcaaaccccaggctaggcccgtctgcggtctccatagtgtcatcagccccagcgatgggaggattctgaactttggccaagtaaagaattgtgaagtggagcaagtgaaaggcgtgacatattccctggaatcctttttgggacctcggatgtgcactgaagacctcccctttcctccagcggcatcttgcgatagtttcaagaaccagcttgtaaccagggaaggcaatgaattgtatcattgcgtgatttatctagccccaggcgattatcactgtttccactctcctacagattggactgtcagccaccgacggcattttcctggctcactgatgagcgttaatccgggaatggcaaggtggattaaggagctcttttgccataatgagcgcgtagttctcaccggcgactggaagcacggattcttttccctaacagcagttggcgctacaaatgtcggctctattcgcatctattttgatcgggacttgcataccaactctccacgccactccaaggggtcctataatgatttctccgtcgtgggctcccttactaggtag

SEQ ID NO: 234667 - DNA, 984 bp, synthetic construct
  misc_feature 1..984: note = Description of Artificial Sequence: Synthetic coding sequence
  source 1..984: mol_type = other DNA
atggagtacgctgttaattgccacgttataacttgggagcgaatcatcagccattttgatatcttcgcattcggccacttttggggatgggctatgaaggctcttctgatacggtcctacggtttatgttggactatcagcatcacctgggagctcacagaattattctttatgcacctgttacctaactttgcagaatgctggtgggaccaggtaattctggacatacttttgtgtaacggaggcggaatctggcttgggatggtcgtgtgtcgattcctggagatgaggacctaccactgggcatcatttaaagacattcataccacaaccggtaagattaagagggctgttcttcagttcacgcccgcttcttggacttacgtcaggtggtttgaccccaagagcagtttccaaagagtcgctggggtgtatttatttatgatcatctggcagttgactgaactcaatacatttttcttgaaacacattttcgtgttccaggcttctcacccgctctcttggggcaggatcctttttattggtggtatcaccgcgccaactgtcagacaatactacgcatatctcaccgatactcaatgcaaaagggtcggaacccagtgctgggtgtttggagtgataggatttctggaggccatcgtctgcatcaaatttggccaggatctgttttcaaagacccagattctgtacgtggtcctctggttactttgcgttgctttcactactttcctttgcctctacggtatgatttggtacgccgaacactatggacatcgcgaaaagacatactccgagtgcgaagacggcacctactcacctgagatcagctggcaccaccggaaaggcactaaggggtcagaagactctcctcccaaacacgccggtaataatgagtcacatagctctcgtcggcgaaataggcatagcaaatccaaggtgacaaatggcgttggaaagaaatag

SEQ ID NO: 234668 - DNA, 1422 bp, synthetic construct
  misc_feature 1..1422: note = Description of Artificial Sequence: Synthetic coding sequence
  source 1..1422: mol_type = other DNA
atggcttcatgcgtcgggagcaggaccttatcaaaggatgacgtgaactacaagatgcattttcgcatgattaacgagcagcaagttgaagatattaccatcgactttttttatcggcctcacactattacccttctctctttcactattgtctcgcttatgtatttcgcttttacgcgggacgactcagtgccagaagataacatctggcggggaatcctaagtgttattttcttcttcttaatcataagcgtgctggcgttccccaacgggcctttcaccaggcctcaccctgcactctggagaatggtgtttggattatccgtgttatatttcttattccttgtgttcctcctttttctgaatttcgagcaggtgaagagcctcatgtattggctcgaccccaatttaaggtatgccacgagggaagctgatgttatggaatatgctgtgaattgtcatgtgataacatgggaaagaatcatctcgcatttcgacatctttgccttcgggcacttttggggatgggctatgaaagctttgttgatcaggtcttatggactgtgttggaccatttccataacttgggaactcactgagcttttcttcatgcaccttctcccaaattttgctgaatgctggtgggaccaagtgattctcgacatcctgctatgtaacggcggtggcatatggctcggaatggtagtgtgtcggtttttagagatgcggacatatcactgggctagttttaaagacattcatactaccactggcaaaataaaaagggctgtactgcagtttaccccggcttcatggacatatgtgcggtggtttgaccccaaaagttctttccagagagtagcaggggtgtacctgttcatgataatctggcagctgactgaactgaatacattctttttgaaacacatcttcgttttccaggcctcccatcccctgagctggggcagaatcctcttcattggcggaattacagcgcctaccgtgagacagtactatgcttatctgacagatacccaatgtaagagagtcggcactcagtgttgggtttttggcgtcataggtttcctggaagccattgtctgcattaagttcgggcaggatctgttcagcaagacccagattctctacgtcgtactgtggttactgtgcgttgcctttaccacttttctgtgtctctatgggatgatctggtatgccgagcactatggtcaccgagagaaaacatatagcgagtgcgaagacgggacctactcccccgagatcagctggcatcacagaaaagggaccaagggtagcgaagactctcccccaaagcatgccggtaataatgagagtcacagtagtcgacggagaaatagacacagcaaaagcaaggtgaccaacggagttgggaagaaatag

SEQ ID NO: 234669 - DNA, 1464 bp, synthetic construct
  misc_feature 1..1464: note = Description of Artificial Sequence: Synthetic coding sequence
  source 1..1464: mol_type = other DNA
atgaggaggggagaacgcagggatgcaggcggacctcggcctgaaagtcccgtgcctgctgggagagcctccttggaagagccgccagacgggccaagcgccggacaggcaacaggaccaggtgaaggtaggcggagcacggaatcggaggtgtacgacgacggcaccaatacattcttttggagggcacacactctgacagtgctctttattctaacatgcaccctcggttatgtaaccctgctagaagaaactcctcaggatacagcatataacactaagaggggcatagtcgcctcaatactggtcttcttatgcttcggagtgacccaggctaaggatggtccattttcccgcccacatcctgcctactggcgattttggctgtgcgtatcagtggtgtatgaactgttcttaatcttcatcctctttcagacagtgcaagatggacgccagttcctgaagtatgttgatcccaagctgggggtgcccctgcctgagcgggactacggtggaaattgtttaatctacgaccccgacaatgaaaccgacccatttcacaatatttgggataagctggatggctttgtgcccgctcattttttaggctggtaccttaagaccctaatgatccgggattggtggatgtgcatgatcatctctgtcatgtttgagttcctcgaatattctctggaacatcaattgcctaattttagcgagtgttggtgggatcactggatcatggacgtactggtgtgcaatggcctcggaatttactgtggcatgaaaacactcgaatggctttcgctgaaaacatacaagtggcagggtttgtggaacattcccacttacaagggcaagatgaagcgtattgcgttccaatttaccccatactcctgggtgaggtttgaatggaaacctgctagcagtctcaggcgctggttggccgtgtgcgggattattctggtgtttcttctggcggaactgaacacgttttacctgaagtttgtgctgtggatgccacctgaacattatctcgtgctgctcagactcgtcttttttgtcaatgtcggaggcgttgccatgagagagatctacgacttcatggatgaccccaaaccgcacaagaaactggggcctcaagcctggctggtggccgctatcacagccaccgaactcctgattgtggtgaagtatgatcctcacactctgacactctccctacccttttacatctctcagtgctggacgctgggaagcgtgcttgctttaacttggactgtatggcggttctttctgcgcgacatcaccttgagatacaaggagactcgctggcagaagtggcagaacaaggatgaccagggctctacagtcggcaacggcgatcagcaccctctcgggctagatgaagatctgctcgggcctggtgtggctgaaggcgagggtgcaccaacgcccaactag

SEQ ID NO: 234670 - DNA, 2802 bp, synthetic construct
  misc_feature 1..2802: note = Description of Artificial Sequence: Synthetic coding sequence
  source 1..2802: mol_type = other DNA
atggccgcaagccggctggattttggcgaagtggagactttcctggaccgccatcccgaattattcgaggattatctgatgcggaaagggaagcaagagatggtcgagaaatggctgcagcgacacagtcaagggcagggagctcttggacctagaccaagcctggctggaacatcttccctagcccactcaacatgccgtggcggatcatccgtgggaggaggaaccggtccaaacgggtccgctcacagtcagccactccctggagggggagattgcgggggagttcctctatcgccttcttgggcaggaggtagtcggggagacggaaatctacaacgcagggcgtcacagaaagagcttcgaaaatccttcgccaggagtaaagctatacatgtcaaccgcacatacgatgaacaggtgacctctagggcccaggagccgctttcatcagtgagaaggcgcgcactcctccggaaagcttccagcctgcctcccacaaccgctcatatacttagtgccctgttggaatcccgcgtaaacctgcctcggtatcctccgactgccattgactacaagtgccacctcaagaagcacaacgagagacaattttttcttgagttagtgaaggacatctctaatgatctggacctgacttccctgtcttacaagattcttatcttcgtgtgtctaatggtcgacgctgaccggtgttctctgtttctggttgaaggggctgcagctgggaaaaaaacgctcgtaagtaagttctttgacgttcatgcgggtaccccattgcttccgtgttcctccaccgaaaacagcaatgaagtgcaagttccctggggtaaaggcatcattgggtacgtaggcgaacacggagagacagttaacattcctgatgcctaccaagatagacgtttcaacgatgagatcgacaaactgacagggtacaaaacgaaatctctgttgtgtatgcccattcggtcctcagacggagagattattggggtcgcgcaggccatcaataagatcccggagggagcacctttcacggaggacgatgagaaggtgatgcagatgtatttacccttttgcggcattgctatttccaacgctcagttattcgctgcttcacgtaaggagtatgaaagatctagagccctcttggaagtggtcaatgatctgttcgaagagcagaccgacctcgagaaaattgttaaaaagatcatgcaccgagcacagacacttcttaagtgtgaacgatgttctgtgttgctgctcgaagatatagagagcccagtcgtgaaattcacgaagtcctttgaactgatgtcacccaaatgtagcgctgacgcagaaaacagctttaaggagagcatggaaaaatccagctattccgactggctcattaacaattcaattgccgagcttgtcgccagcacgggtctacccgtgaacatttctgatgcatatcaagacccccgtttcgatgcagaggccgaccagatttcaggttttcacatccgcagcgttctgtgcgttccaatctggaactcaaatcatcagattattggtgtagcacaagttttgaatcgtctggatggaaaacctttcgacgacgcagaccaacggctcttcgaagcttttgtcatcttctgcggtttaggtatcaataacaccataatgtacgaccaagtgaaaaagtcttgggcaaagcaatcagtagccctggatgtgctcagctaccatgccacctgctcgaaggctgaggtcgacaaattcaaagctgccaacattccactggtctctgaacttgctatcgacgacatacactttgacgatttttccctggatgtggatgcaatgataacagcagcactccggatgtttatggagctgggcatggttcagaaattcaaaatcgactacgagacattgtgcaggtggctgctgacagtccgaaagaactaccggatggtcttataccataactggaggcacgcctttaatgtttgtcagttgatgtttgcaatgttgacaaccgctgggttccaggacatcctgaccgaagtggagattctcgcagtgattgtcgggtgtctgtgccacgacctggaccaccggggaacgaacaacgcattccaggccaagagtggatcagccttggcccagttgtatggcacaagcgcgaccctggagcaccatcatttcaaccatgccgtaatgatcctgcagagtgaaggacacaacatttttgcaaatctgagctccaaagagtattctgacctgatgcagctcctgaagcagagcatcctcgcaacggacttgacactctactttgaaagacgaacggaattctttgagcttgtctcgaagggcgaatacgactggaatatcaagaaccatagggacatttttcgctcaatgctgatgaccgcttgtgatctcggagccgttactaagccttgggagatctcccgtcaagtggctgagttggtcacctctgagttttttgaacaaggagacagagagagactggagctgaaacttacgccttccgccatctttgatagaaaccgtaaggacgaactgccacgcctccagctggaatggatcgactccatctgtatgcctctgtaccaggcactcgtgaaggtaaacgtgaaattgaaacctatgctggactccgtggccaccaacaggagcaagtgggaggagttacaccaaaagcggctcctcgccagtacagccagttcatcgcctgcaagcgtgatggtcgccaaggaggatcggaactag

SEQ ID NO: 234671 - DNA, 2052 bp, synthetic construct
  misc_feature 1..2052: note = Description of Artificial Sequence: Synthetic coding sequence
  source 1..2052: mol_type = other DNA
atgctcaaacaggctagaagacccctgtttagaaatgtcctgtcggctacccagtggaaaaaggtaaaaatcacacgcctggtccaaatctctggtgcctcactggcggagaaacaggaaaagcatcaggactttcttatacagcgacaaacaaagaccaaggatcggcgattcaatgatgagatcgacaagctaacagggtataaaaccaagtccttactctgcatgccgatacgtagttccgacggagagataatcggagtcgcccaggcaattaacaaaattcccgagggggcaccatttactgaggatgacgaaaaggtcatgcaaatgtacctcccgttttgtggaatcgctattagcaacgctcagctctttgctgcctcacgaaaggagtatgaacgctctcgcgctctgctggaggtggtcaatgatcttttcgaagagcaaactgaccttgagaagattgtgaagaagatcatgcatcgcgcacagacactgctcaaatgtgagagatgtagcgtactcctattggaagacatcgagtcacctgtcgtcaagtttaccaagtcgtttgaattaatgtcacctaagtgttccgcagatgccgagaatagttttaaggaatctatggagaaaagtagctattcagactggctgataaataattcaatagccgaactagtcgcaagcactggattgcccgtcaacatcagtgatgcataccaggaccccagattcgacgccgaggccgaccagatctcagggtttcacatcaggtccgtcttatgtgtgcccatttggaatagtaatcaccaaatcattggggtggcgcaggtgttgaatagactcgacggcaaaccatttgacgatgcagaccagaggctctttgaagcctttgtgattttttgtgggttgggtatcaataacaccataatgtatgaccaggtgaagaaatcatgggctaaacagagtgtcgccttggatgttctgagctatcatgccacgtgctcaaaggccgaagtcgataaatttaaggctgccaatatcccactagtcagcgagttagccattgacgacatacacttcgacgatttctctctcgatgtggacgccatgatcaccgccgcactgcgaatgttcatggagctcggaatggtgcagaagttcaagattgattacgaaactctgtgccgctggctgcttaccgtgcgtaaaaactaccggatggtgctgtaccataactggagacatgctttcaatgtttgccaactcatgtttgctatgttgaccactgccggattccaggatattctgacggaggtggaaattctggcagtgatcgtcggatgcttatgccatgacctggatcacagaggaacgaacaacgccttccaggctaaatcaggttcagcactcgctcaactttacggcacctctgccactctggaacaccaccacttcaatcacgcagtcatgatcttgcagagtgaggggcacaatatctttgctaacctgtctagcaaggaatactccgatttgatgcagcttttgaagcaatccattttggccactgacctgactctgtattttgagagacggaccgagttttttgaacttgtgtctaaaggggaatatgactggaatattaagaatcatcgagatatcttcaggtctatgctgatgaccgcgtgcgaccttggggctgtgacaaaaccctgggagataagtagacaagtagcagagctcgtcaccagtgagttctttgaacaaggcgacagagagagattggagctaaagctaacaccctctgccattttcgaccgaaaccgtaaagacgaactgccccgtctgcagcttgagtggatcgacagtatctgtatgcccctgtaccaagccctcgtcaaagtaaatgtcaaactgaagccaatgttggactcagtggccacaaaccggtccaaatgggaggagctgcaccagaagagactgctggcgtccacagcatctagctcccccgcatctgtcatggtcgcaaaagaagatcggaattag

SEQ ID NO: 234672 - DNA, 1470 bp, synthetic construct
  misc_feature 1..1470: note = Description of Artificial Sequence: Synthetic coding sequence
  source 1..1470: mol_type = other DNA
atgagcccaaagtgcagtgccgacgctgaaaattcattcaaggagtctatggaaaagtcgagttattctgactggctgattaacaattctatcgcagaactcgtggctagcacagggcttcctgtgaatatctcagacgcttaccaggaccccagattcgacgcggaggccgatcagatatccggtttccacataagatctgtgttgtgcgtacccatctggaactccaaccaccagattatcggagtcgcacaggtgctaaatagacttgatggcaagcccttcgacgatgcagaccaacgactttttgaggcgttcgtgatcttttgcgggctggggatcaataataccatcatgtacgaccaggtgaagaaaagctgggccaaacagtctgttgcactggatgtcctgagctaccacgctacctgttccaaggcagaggtagataagttcaaagccgcaaacatccctctggtgagcgagctcgctatcgatgatatccacttcgatgatttttccctggatgtcgatgctatgatcactgccgctctacgcatgttcatggagttgggcatggtacagaagttcaagattgattacgagacgttgtgtaggtggctgctgaccgtaagaaagaattacagaatggtattatatcataactggcggcatgcattcaacgtctgccagctcatgtttgccatgttaactacagctggcttccaagacattttgaccgaggtggaaattctggctgtcattgtgggctgtctgtgtcatgacctggatcacaggggtaccaataacgcctttcaggctaaaagcggcagcgcgttagcacagctatatggaacctcagccactttagagcaccaccactttaaccacgccgtgatgatcctgcagagcgaggggcataatatctttgcaaatctaagcagtaaagagtactcagacttgatgcagctgctaaagcaatcaatcctcgccaccgatctaactctttacttcgaacggaggacagagttcttcgaactcgtttccaagggggaatacgactggaacattaaaaatcacagagacattttccggtcaatgctgatgacagcttgtgatttaggcgctgtcacgaagccttgggagatcagccggcaggtggcagagctagtgacttctgaatttttcgaacagggagaccgcgaacgtctggagttgaagcttacccccagcgccattttcgacaggaatcgcaaagacgagttgccccgactgcaactcgagtggatcgactctatttgcatgcccctctatcaggctctggtgaaagttaatgtcaagttgaagcctatgctggattccgtggctactaaccgaagcaagtgggaggaacttcaccagaagcgcctactggcttctaccgccagcagtagccctgcctccgttatggttgcaaaggaagaccgcaattag

SEQ ID NO: 234673 - DNA, 1728 bp, synthetic construct
  misc_feature 1..1728: note = Description of Artificial Sequence: Synthetic coding sequence
  source 1..1728: mol_type = other DNA
atgcagatgtatcttccattctgtgggatcgccatctccaacgcacaactgtttgcagcctcccgaaaagagtatgaaagaagccgggctctgcttgaagtcgtcaatgacctgttcgaagagcagactgacctggaaaagattgttaagaaaatcatgcaccgggcacaaaccctgctgaaatgtgagagatgctctgttctcctgttagaggacatcgaatcgcccgtagtgaaattcaccaagagcttcgaacttatgtctcccaaatgcagcgcagacgctgaaaactcattcaaagagtcaatggaaaagagcagctacagcgactggctaattaacaattccatagccgagctcgttgcaagcacggggctccccgtgaatattagtgatgcttatcaagatccgcgttttgacgccgaagcggatcaaattagtggcttccacattcggtccgtcctgtgcgtgccgatttggaacagtaatcaccagatcattggtgtggctcaagtcctaaacagactcgatggcaagccctttgacgacgctgaccagcgcctctttgaggcgttcgtgatcttttgcggcctggggatcaacaatacaataatgtacgaccaagtcaaaaaaagttgggcaaagcagtctgttgcgctggatgtcctgtcctaccacgccacatgtagcaaagccgaggtcgataaattcaaagccgctaatattccactggtctctgaattggctattgatgacatacacttcgacgacttttcactggacgtcgacgccatgatcaccgctgcactgcgcatgtttatggagctgggcatggtccagaaattcaagattgactacgagaccttatgccggtggctgctgaccgtgcgtaagaattatcgcatggtgctctatcataactggaggcacgcctttaatgtctgtcagctcatgttcgcaatgctgacaacagccggatttcaggacattctcaccgaggtggagatcctcgcagtgattgtgggatgcctctgtcatgacctggaccacaggggaactaataatgccttccaggcaaagagtggcagcgcattagcacaactgtatggtacctccgccaccttggagcaccaccatttcaaccacgcagttatgatcctgcagtctgagggtcataacattttcgcgaatctgtcatcaaaagaatattccgatctgatgcagctgctgaagcagtctatcctggctacagatttgacactatatttcgaacgacgaacagaattttttgagcttgtctctaagggtgagtacgattggaacatcaaaaaccatagggacattttccggtcgatgctaatgacagcctgcgatcttggcgctgtaactaagccttgggagatttcgcggcaggtcgcagagctggttacctctgagtttttcgagcagggtgacagagagagactggaactgaaacttacccctagtgctattttcgacaggaacaggaaagatgagctccctcggctgcaactagaatggatcgactccatctgtatgccattataccaggcactagtcaaggtgaacgtgaagcttaagcccatgctggatagtgtcgcaacaaaccgtagtaaatgggaagagctccatcagaaacgcctgcttgcctctactgcaagcagctcccccgcatccgtgatggtggccaaggaggaccgaaattag

SEQ ID NO: 234674 - DNA, 393 bp, synthetic construct
  misc_feature 1..393: note = Description of Artificial Sequence: Synthetic coding sequence
  source 1..393: mol_type = other DNA
atgcccattagaagcagtgatggggaaatcatcggggttgctcaggcaataaataaaatccctgagggggctccattcaccgaggacgatgaaaaggtgatgcagatgtacctgccattctgcggaatagccattagtaacgcacagctgtttgccgcttctcgaaaggagtatgagcggagtcgtgccttactcgaggtagtgaatgacctgtttgaagagcagactgacctcgagaaaattgtgaagaagattatgcaccgagctcagactctgttgaagtgtgaaagatgttctgtgctcctgctggaagatatagaatcacccgtggtgaagttcacaaaaagtttcgagctgatgtccccaaaatgcagtgctgatgccgaaaactag

SEQ ID NO: 234675 - DNA, 1728 bp, synthetic construct
  misc_feature 1..1728: note = Description of Artificial Sequence: Synthetic coding sequence
  source 1..1728: mol_type = other DNA
atgcagatgtacctgcctttctgcggtattgcaatttcaaacgctcaactcttcgctgcttccagaaaggaatacgagaggtcacgggctcttctcgaggtggttaacgacctctttgaagagcaaacagatctagagaagattgtgaagaagataatgcacagagcccagacgctgctgaaatgtgaacggtgcagcgtgctgctcttggaggatattgaaagtcctgtggttaaatttacaaaatccttcgaactcatgtctcccaaatgtagtgccgatgcagaaaactcttttaaagagtctatggagaagagttcctacagtgactggctgatcaacaatagtatcgccgagctcgtggcttcaaccggtctgcctgttaacatctccgacgcctatcaggatccaaggtttgacgcggaggcggaccagatctctggatttcacatcagatccgtgttgtgcgttccaatatggaacagcaatcaccaaatcatcggagtggctcaagttctgaaccgtctcgacgggaaaccctttgacgacgcagaccaaagactgttcgaggccttcgtgatcttctgcggtctcggaatcaataatacaattatgtatgaccaggttaagaaatcgtgggccaaacagtcagtggcactggacgttcttagctatcacgcaacctgtagtaaagccgaggttgataagtttaaggccgcaaacattcctttggtcagtgaactggcaatcgacgacattcattttgacgacttttccctggatgtggacgccatgatcaccgcagcactccgcatgttcatggagctgggtatggtgcagaagtttaaaatcgactacgagacgctctgtaggtggctactgaccgtgcgcaagaactacagaatggttctctaccacaactggagacatgcattcaatgtgtgccaactcatgtttgctatgcttacaacggctggcttccaggacatcctaaccgaagtggagatcctggcagtgatcgtcggctgtctgtgtcacgatctggatcaccggggtactaacaatgccttccaggctaagtccggctccgcactggcccaactgtacggaacgtcggccaccttggagcaccatcatttcaaccacgcagtaatgattctccagtctgaagggcataatatttttgcgaatctttcctctaaagagtactccgacttgatgcagctgctgaagcagtcaattctcgccacagacctgaccctctacttcgagcgcaggacagagttcttcgaattggtgtccaagggtgaatatgactggaacattaaaaaccaccgtgacatcttcaggtctatgttgatgaccgcctgcgacctgggcgctgtgacgaagccctgggaaatctccaggcaggtggctgagctggtgacctcggagttcttcgagcagggggatcgggaacgtctggagcttaaactgaccccatcagcgatttttgataggaatcgaaaagacgaactccctagacttcagctggaatggattgacagcatttgtatgccactctatcaggctcttgttaaggtaaacgtcaagctgaaaccgatgctggactccgtggccaccaacagatccaagtgggaggaactgcatcagaaaaggcttttggccagcaccgctagcagctcaccggcaagtgtgatggtggctaaggaggaccggaattag

SEQ ID NO: 234676 - DNA, 375 bp, synthetic construct
  misc_feature 1..375: note = Description of Artificial Sequence: Synthetic coding sequence
  source 1..375: mol_type = other DNA
atgttgatgaccgcttgcgacctaggcgctgttactaaaccctgggaaatttcccgacaagtggctgagctggtgacaagtgaattttttgaacaaggcgacagggaacgccttgagcttaaattgactccatctgctatcttcgacagaaataggaaggacgagcttccgaggctgcaattggagtggatcgatagtatttgcatgcctctgtaccaggcactggttaaagtgaacgtgaagctcaaacccatgctcgactcagtggccacaaaccgcagcaaatgggaagagctgcaccagaaacggctgctggcaagtactgcctcaagctcaccagcatctgtaatggtggcaaaggaagataggaattag

SEQ ID NO: 234677 - DNA, 1638 bp, synthetic construct
  misc_feature 1..1638: note = Description of Artificial Sequence: Synthetic coding sequence
  source 1..1638: mol_type = other DNA
atgggttcgtcggcaacagagatagaagagctcgaaaataccaccttcaagtaccttacaggagaacagacagagaagatgtggcagaggctgaaaggcattctccgctgtctggtgaaacagctcgagcgcggagacgtgaacgtcgttgacttgaaaaaaaatatagagtacgcagcctccgtactggaggctgtgtatatagatgaaacacggcgtctacttgacaccgaggatgaactaagtgacattcagactgactccgttcccagcgaggtgcgggactggttggcttccacattcaccaggaaaatggggatgaccaagaagaagcccgaggagaagcctaagtttaggagtatcgtgcatgccgtgcaggcagggatttttgtggagcggatgtacagaaagacctaccacatggtcggactggcctaccccgcagctgtgatagtcacactgaaggacgttgacaagtggtcctttgatgtgtttgccttaaatgaggcttcaggggaacacagcctgaaatttatgatctatgagttgttcacaagatacgacctcattaatagatttaaaatcccagtgagctgcttgattacatttgccgaggctttggaagtgggctactccaaatacaaaaatccatatcataatctcatacacgccgctgatgtgacacagacagtgcactatattatgttacacaccgggatcatgcattggctgaccgagcttgagatactggccatggtgttcgcagctgctatacacgattatgagcacaccggaactacaaataactttcacatccaaaccagatcagatgtcgccatcctctataatgatcgctctgtcttagaaaatcatcacgttagcgcagcgtatcgactgatgcaggaagaggaaatgaatatcctcatcaaccttagtaaagatgattggcgagatctcaggaacttagtcatcgaaatggtcctgtcaactgatatgtcgggccactttcagcagataaagaatatcaggaactccctgcaacagccggaaggtattgatcgcgctaagactatgagtctgatcctgcacgccgctgatatctcgcatcccgcaaagagctggaagctacactatcgctggactatggctctcatggaggagttttttctgcaaggggacaaggaagccgagctaggacttcctttttctcccttatgtgacagaaaaagcactatggtggcacagagtcagataggtttcatcgacttcatcgttgaaccaaccttcagtctcctcaccgactcaaccgagaagatcgtgatccccctgatcgaggaagcaagtaaagccgagacttctagctacgtggcttcttctagcactactattgtggggctgcatatcgccgatgcactccgcaggagcaacacaaaggggtcaatgagtgacggcagctacagtcctgactactccttagccgctgtcgacctgaaaagttttaaaaataacctggtggacatcatccagcagaataaagaacgttggaaagagttggccgctcagggtgagagcgatctgcataaaaatagtgaggatctggtcaacgctgaagaaaaacacgacgaaacccacagttag

SEQ ID NO: 234678 - DNA, 1536 bp, synthetic construct
  misc_feature 1..1536: note = Description of Artificial Sequence: Synthetic coding sequence
  source 1..1536: mol_type = other DNA
atgggcaaaaaaatcaataaactgttctgcttcaatttcctagtgcagtgctttagaggcaagagtaaaccttctaaatgccaaatccggaaaaaggtcaaaaaccacatcgaaagattgcttgacaccgaggatgaactaagcgacatacagacagattctgttccaagcgaagtcagggactggctcgcttctacattcacaaggaagatgggaatgacaaagaagaaacccgaggagaagccaaagtttagaagtatcgtgcacgctgtccaggctggaatcttcgtggaacggatgtatcgaaagacttatcacatggtgggtttagcttaccccgcagccgtgattgtaacgctgaaggacgtggacaagtggagctttgatgtgtttgcgctgaatgaggcctctggggagcactcattgaagtttatgatttatgaactatttaccaggtacgacctgattaaccgcttcaagattcctgtttcctgcctcattactttcgccgaggctctggaagttgggtactctaagtacaaaaacccttatcacaacctaatccacgctgccgatgtaacacaaactgtgcactatattatgctgcacactggcatcatgcattggctcaccgagcttgaaatcctggcaatggttttcgctgccgctatacacgattacgagcacaccggcactaccaacaacttccacattcagacccggtcggacgtagccatcttatataacgaccgcagtgtcctggagaatcaccacgtctccgctgcctaccgcctcatgcaggaggaagagatgaatatcctaataaacctgtccaaagacgattggcgtgacctccggaatctcgtaatagagatggtgctcagcactgacatgtcaggacatttccagcagataaagaacattaggaactctctgcagcagcctgagggcatcgaccgggctaagacgatgagcctgatactccatgcagcggatataagccacccagcaaaatcgtggaagctgcattacaggtggaccatggcccttatggaggagttttttctccagggcgacaaagaagccgagctcggcctgccgttcagcccgctgtgtgacaggaagtcaaccatggtcgcccagagtcagatcggatttatagacttcatcgtcgaacctacattctctctgctgacagattcgacagaaaagatcgtgattccactgattgaagaggcgtcaaaagcggagacatcttcctacgtcgcctctagcagcactacgatcgtgggcctccatattgctgatgctctaagaaggtctaacaccaagggcagtatgtccgacggttcgtattcccccgactatagcctcgctgcggtcgatttgaagagcttcaagaataaccttgtggatatcattcagcagaacaaggagcgctggaaggaactggccgcacagggcgaatcagacttgcataagaacagtgaggacttggtcaatgctgaagagaagcacgatgagactcactcttag

SEQ ID NO: 234679 - DNA, 1560 bp, synthetic construct
  misc_feature 1..1560: note = Description of Artificial Sequence: Synthetic coding sequence
  source 1..1560: mol_type = other DNA
atggacgatcacgtgaccatacgaaagaagcatcttcaacggccaatcttcagactccgttgtctggtgaagcaactggaacggggagacgtgaacgtggttgatctgaaaaagaatattgaatatgccgcttcagtgttagaagcggtctatattgatgaaactcgacgtcttcttgataccgaggacgaattaagtgacatccagacagattccgtccccagtgaagtccgggactggctggcctccactttcacccgcaagatgggtatgaccaagaaaaaacccgaagaaaaaccaaagttccgatcaatcgtgcacgccgtgcaagcaggcatatttgtggaaagaatgtaccggaagacttatcacatggtcggtctggcatatccagccgcagtgatcgtgactctgaaagacgtggacaagtggagcttcgatgtgtttgctctaaacgaggctagtggcgagcattctctgaaatttatgatttacgagttgttcacaaggtacgatcttatcaatcgttttaaaattccggtgtcctgtctcattacatttgcggaggctctcgaggtgggatattcaaagtacaagaatccttaccacaatctgatccacgccgcagacgtgacccagactgttcattatattatgcttcacactggcattatgcattggctaaccgaactcgagatcctcgccatggtgttcgcagctgctattcatgattacgaacatacgggcacaacaaataacttccatatacagaccagaagtgatgtggccattttgtataatgatcgttcagtcctcgaaaaccaccatgtttcggccgcttacaggttgatgcaggaggaggaaatgaacatactcattaacctgtcaaaagatgactggcgcgacctgagaaacctcgtgattgaaatggtcctgtccacggacatgagtggtcactttcagcagattaaaaacatcagaaatagccttcaacaacccgaaggcattgacagagccaagacaatgtcactcatcctccatgccgctgacattagccaccccgctaagtcatggaagctgcactacagatggacaatggctcttatggaagagttctttctccaaggagataaagaagcagaactcggtctgccattctcccctctgtgcgacagaaaatctacaatggtggcacagtcacagatcggtttcatcgacttcatcgtggaacccaccttcagcctattgaccgactcaaccgaaaaaatcgtgatccccttgatcgaagaggcatctaaagccgaaacaagttcatacgtggcctccagtagcaccaccatcgtgggcctgcatatcgctgacgctctgaggcgcagcaacactaaaggatctatgtctgacggttcatacagcccagactatagcctcgccgcagtagatctgaagagctttaagaataacctagttgatattattcagcagaataaagaacggtggaaggagctagcagcacaagaggcacgcacatccagtcagaaatgtgagttcatacatcagtag

SEQ ID NO: 234680 - DNA, 1608 bp, synthetic construct
  misc_feature 1..1608: note = Description of Artificial Sequence: Synthetic coding sequence
  source 1..1608: mol_type = other DNA
atgggttcgagtgctactgaaatcgaagagctggaaaataccaccttcaagtacctcaccggggagcaaactgaaaagatgtggcagaggctgaagggcatccttcgatgtttggtaaagcagctagaaaggggggatgtcaacgtcgttgacctaaaaaagaacatcgagtatgcggcttctgtcttggaggcggtatatatagacgagaccaggagattgttagacactgaggatgaactgtccgatattcagacagattccgtcccctccgaggtgcgcgactggctggcaagtacgtttacaaggaagatggggatgactaaaaaaaagccagaagagaagcctaagtttaggagtattgttcacgcagtacaggctggcatcttcgttgaaaggatgtaccggaagacctaccatatggtaggattggcctaccccgctgctgtaatcgtgacattaaaagacgtcgacaagtggtcgtttgatgtatttgccttaaatgaagctagcggagagcatagcctcaagtttatgatttatgaattgtttacccggtacgatctcattaatcgattcaaaattccggttagctgtctgattacgttcgccgaggccctggaggtcggttacagcaaatacaaaaacccctaccacaacttaattcacgcagctgacgtgacacagacagtccattatatcatgctgcataccgggattatgcactggctgactgaactggaaatcctggccatggtgttcgcagccgctatccacgactatgagcatactggtaccacgaacaatttccatattcagactaggagcgatgtcgccatcctgtacaatgacagaagtgtacttgagaatcatcatgttagtgcagcctatcgtctgatgcaagaagaggagatgaatattctgattaacctgtcaaaagatgactggcgggatctgagaaatctggtgattgagatggttctgagcactgatatgtcaggccattttcaacagatcaagaatatccggaactcactgcaacagccagagggtatcgacagggcgaagactatgtcgctaattctgcacgctgcggatatctctcacccggcaaagagttggaaactccattacaggtggacgatggctctgatggaagaattcttcttgcagggtgataaagaggccgaattaggtcttccattctctcctttgtgcgatcgaaagagtaccatggttgcccagtcccagatcggattcattgactttatagtagaaccaaccttcagcctgttgaccgattctaccgaaaaaatagtgatcccgctcattgaggaagctagcaaagctgagacttcaagctacgtggctagctcgagtaccactatcgtaggcctccacattgcggacgcgttgcgacgttcaaatacgaaagggtcaatgtccgacgggagctactcaccagactactctctagctgccgtggatctaaagagttttaagaacaacctggtggacattattcagcagaataaagaacgctggaaggagcttgctgcccaagaggccagaactagctcacagaaatgtgaattcatacatcagtag

SEQ ID NO: 234681 - DNA, 1590 bp, synthetic construct
  misc_feature 1..1590: note = Description of Artificial Sequence: Synthetic coding sequence
  source 1..1590: mol_type = other DNA
atggacgatcacgtgaccatccggaaaaagcatttacagcggcctatctttagactgcggtgtctcgtgaaacagctggagcgcggtgatgtcaacgtggttgatctgaaaaagaacatcgagtatgctgcgtccgtgttggaagctgtgtacatcgacgagacaaggcggcttctcgacaccgaagatgagctgagtgacattcagacagatagtgttccttccgaagtgcgcgactggttggctagcacttttacaagaaaaatggggatgacaaagaagaagccggaggagaaacccaaattccgcagtattgtgcatgcagtgcaggccggaatcttcgtcgagcggatgtatagaaagacctaccacatggtgggcctggcataccctgccgctgtgatcgtgaccctgaaagatgttgacaagtggtccttcgacgtctttgccttgaatgaagccagcggcgagcattccctgaaatttatgatctatgaacttttcaccaggtatgacctgattaataggttcaagattcccgtgagctgtctgattacattcgctgaggcactggaggtcggttattccaagtacaagaacccatatcacaatttaattcacgccgctgacgtgacacagaccgtgcactacataatgctgcatactggcataatgcactggctgacggaacttgagattctggccatggtcttcgccgcagcaatccatgactacgaacataccggcacaacaaacaatttccacattcagactagatcagatgttgctattctttacaacgatagaagcgtgctcgagaaccatcatgtctccgctgcttatagactcatgcaagaagaggaaatgaacattttgattaacctgtctaaggacgattggcgggacctccgaaatctcgtgatcgagatggtgctgagtacagacatgtcaggtcatttccagcagatcaagaatattagaaactctctgcaacagcccgaaggcattgatagagctaaaacaatgtctctaatccttcacgccgctgacatttcccatccagctaaaagctggaagctccattacagatggaccatggctctcatggaagagttcttcttgcagggggacaaggaagctgaactgggactgcccttcagccctctgtgcgaccgcaagtccacaatggtagcccaaagccagataggtttcatagactttattgtcgaaccgaccttcagcttgcttaccgattccacagagaagatcgtgatacccctgattgaggaggcttccaaggccgagacttcttcttatgtcgcatctagcagcacaacaatagttggtcttcatatcgccgacgccctgcgtcgatccaacaccaagggcagcatgtctgacggctcttactctccagattacagtttggccgctgtcgacttaaagtccttcaaaaataatcttgtggacataattcaacagaataaagaacgctggaaagaactggctgcacaaggagagtctgacctccacaagaacagcgaagatctggtaaacgccgaagaaaagcacgatgagacccactcttag

SEQ ID NO: 234682 - DNA, 1608 bp, synthetic construct
  misc_feature 1..1608: note = Description of Artificial Sequence: Synthetic coding sequence
  source 1..1608: mol_type = other DNA
atgggttcaagcgccacagagatcgaagaactcgagaacactacttttaagtacttaactggcgagcagacagagaaaatgtggcagcggctcaagggtatcttacggtgcctggtgaagcagctggaaaggggggatgtgaatgtggtcgatttgaaaaaaaacatagagtacgccgctagcgttctcgaagccgtgtatattgatgagactcggcgtttgctggacacagaggacgaactcagtgacattcaaactgattctgtgccaagcgaggtgagagattggctcgcttcaacctttacgcggaagatgggcatgacaaagaaaaagcctgaggaaaagcccaaattcagatctatagtacacgccgttcaagccggaatttttgtggaaaggatgtacaggaaaacctatcacatggtggggttggcgtatcccgctgctgtaatcgttacactcaaggatgttgataaatggagcttcgacgtgttcgcacttaatgaggcttccggggagcacagcctgaagtttatgatttacgaactgttcactagatacgacctgattaaccgctttaaaatcccagtgagttgtctgatcacttttgctgaggccctcgaagtggggtactctaagtataaaaacccatatcacaatttgatccatgccgcagacgtgacacagaccgttcactacataatgctacacaccgggattatgcactggctgaccgagctcgagattctggccatggtatttgccgcagctatccacgattacgaacacactggcacaacaaacaactttcatatccagacacggagtgacgtggccatcttgtataatgatcgctcagttctggagaaccaccacgtgtcagccgcataccgactaatgcaggaagaagagatgaacatcctcattaacttgtccaaggacgactggcgcgatcttcggaacctggtcatcgagatggtgctgagtaccgatatgtctggacatttccagcagattaaaaatatcaggaactccctccagcaacctgagggtatagatagggctaaaactatgtcactgatccttcatgcagcagacatctcccatccagcaaaatcgtggaagctgcactatcgctggacaatggctctcatggaggagtttttcctgcagggagacaaagaggccgagctcggcctgccattttctccgctgtgtgaccggaagtccacgatggtggcacagagccagattggtttcatcgactttatcgttgagccgactttctccctcctaacagattccacggagaagatcgtgatacctctgattgaggaagcaagtaaagcggagacatctagctatgtcgctagttctagcaccacaattgtcgggctacacattgcagacgcattaaggcgatctaatactaaagggagtatgtctgatggaagctactcaccagattactctctggctgctgttgatctgaagtctttcaaaaataatttagtcgacatcattcagcagaacaaagaaagatggaaggagctggccgctcaggaagctcgaacaagctcccagaagtgtgagttcatacaccagtag

SEQ ID NO: 234683 - DNA, 1638 bp, synthetic construct
  misc_feature 1..1638: note = Description of Artificial Sequence: Synthetic coding sequence
  source 1..1638: mol_type = other DNA
atggggtcctcggccaccgagatcgaggaactcgagaacacaacctttaaatatttgaccggagaacagaccgaaaaaatgtggcagcgcctaaaaggcattctgaggtgcctggtgaagcagttagagagaggggacgtcaacgtggtggacctcaaaaagaatatagagtacgccgcaagcgtgctagaagcagtgtacatcgatgaaaccaggagactcctggacaccgaagatgagctcagtgacattcaaaccgatagcgtcccaagtgaggtgcgagactggctcgccagcactttcactagaaaaatggggatgaccaagaagaaacccgaggagaaacccaagtttcggagcatcgttcacgccgtgcaagccggtatattcgtggaaaggatgtatcgtaaaacctatcacatggtcggactagcctatcccgcagctgtgatagttacactaaaggacgttgacaagtggagctttgacgtattcgcactgaatgaggcctccggagagcacagcctgaaattcatgatctatgaattgttcactaggtacgatctcattaataggtttaaaattccagtttcttgcctgatcacatttgctgaagccctggaggtgggttattccaagtacaagaacccctatcacaacctgatccatgctgccgacgtgacacagaccgtgcactacattatgttgcatacagggattatgcattggctgacagagctcgaaattctggcaatggtttttgccgcagcaatccacgactatgaacatactggtacgactaacaattttcatatccagactagatccgacgtagccatactatacaatgatcgctccgtgttggaaaatcaccacgtgtctgcggcatatcgcttgatgcaggaagaggagatgaatatcctcatcaatctctccaaggacgattggcgggaccttaggaacttggtcatcgagatggttctgtctaccgatatgagtggacactttcaacagataaaaaatatccggaactctctgcagcagccagagggtatcgacagggctaagactatgagcctcatattgcacgcagcagacatctctcaccccgcaaaaagttggaaactgcattaccggtggaccatggcgctgatggaggagttcttcttgcagggcgacaaagaggccgagttgggtctgcctttcagcccactctgcgaccgtaagtcgactatggtggcccagagtcagattgggttcattgatttcattgttgagcccacatttagcttgctcactgactctaccgaaaaaattgtaataccactaattgaggaagcgtctaaggccgaaacgtcctcatacgtggctagtagtagtaccactatcgtcggtctccatatcgccgatgcccttcgaagatctaataccaaaggcagcatgtccgatggctcgtattctcctgattattcactcgctgctgtagacttgaagtcattcaaaaacaaccttgtcgatatcatccaacagaacaaagaaaggtggaaggagctcgctgcacagggcgagtccgacctccataaaaactccgaagacttggtgaacgcggaagagaaacacgatgagacccatagttag

SEQ ID NO: 234684 - DNA, 1659 bp, synthetic construct
  misc_feature 1..1659: note = Description of Artificial Sequence: Synthetic coding sequence
  source 1..1659: mol_type = other DNA
atggggtcaagcgccacggagatagaagagctggaaaatacaacctttaaatatctgactggagagcagaccgaaaaaatgtggcagagattaaaagggatactccgatgcctggttaagcaactggaaagaggggatgtaaatgttgtggatttaaagaaaaacatcgaatacgcagcaagcgttctggaagccgtgtacatagatgagacccgtcgtcttttagataccgaggacgagttatctgacattcagaccgacagtgtaccttcggaggttagagactggctggcctctactttcactcgtaaaatgggcatgactaagaagaaacccgaagaaaagcctaagtttcgctccatcgtacatgcggtgcaggccggaatatttgtggagagaatgtatcggaaaacctatcatatggtcggtctggcctaccctgcggctgtgatcgtgactctgaaggacgtggataaatggtccttcgacgtgttcgccctgaatgaggcctccggagaacactccttgaagtttatgatctacgagctgtttacgcgctatgacctcattaatagatttaaaattcctgtgagctgtctcattacctttgctgaggccctagaagtcgggtattcgaagtataagaacccctatcataatctcattcatgcagccgacgtgactcagacagtccattacatcatgctacatacgggtatcatgcattggctgacagaactcgagattctcgcaatggtgtttgcagcggcaattcacgactatgaacatactggtacaacaaataattttcatatccaaacacggtccgacgtcgctatcttgtacaacgaccggagcgtcctagagaaccatcacgtgtcagcggcttataggctgatgcaagaggaggagatgaacatattgatcaacttgagcaaggacgattggagagatctaaggaacctggtaatcgagatggtacttagtaccgatatgagcggacattttcagcagattaaaaatatcaggaatagtttacagcagcctgagggaatcgacagagctaaaactatgtcactaatcctgcatgccgcagatatctctcatcccgcaaaatcttggaagctccactatcgctggaccatggcgctgatggaggagttttttctccaaggagacaaagaggcagagttagggttgcctttttcaccattatgcgacagaaaaagtacgatggtagctcaatcccagattggatttatcgattttatcgtggaaccgaccttttccctgctcaccgactcaacagagaagatcgtaatacccctcatcgaggaggctagtaaagctgaaacttcctcgtatgttgccagcagttcaactactatagtcggactgcatattgccgacgctctgagacgatccaacactaagggttcaatgtctgacgggtcctactcccccgattattccttggcggctgtggatctcaagtcattcaagaacaacctcgtagacattatccagcaaaacaaggaacggtggaaagaactggccgcacagggctccgtcgtgtacgaagcgctgttaccttctctatctgtgttcacctcaccactccgagtttggattactagctctagatttctcctcctttag

SEQ ID NO: 234685 - DNA, 1326 bp, synthetic construct
  misc_feature 1..1326: note = Description of Artificial Sequence: Synthetic coding sequence
  source 1..1326: mol_type = other DNA
atgggcatgacgaagaaaaaaccagaggagaaacctaagtttaggagcattgttcacgccgtccaagcagggatctttgtcgagcggatgtacagaaagacataccatatggtggggctggcctaccccgctgctgtgatcgtgacactgaaggatgtggataagtggtcttttgacgtgttcgccctgaacgaggcttcaggtgagcacagcctaaaatttatgatctatgagttgttcactcgctacgatctaattaataggtttaaaattccagtgtcctgtctaatcacctttgccgaggcactcgaagttggatattcgaaatataagaacccctaccacaatctgatccatgctgccgatgtgacccaaactgtgcactacatcatgcttcatactggaatcatgcattggttgaccgagttagagatactcgctatggtgtttgccgctgctatccatgactacgagcataccggaactaccaataattttcacattcagacaaggtccgacgttgctatactgtataacgatcgttccgtgctggaaaatcaccatgtaagtgccgcttaccggctcatgcaggaagaagaaatgaatatcctcattaatctgagcaaagatgactggcgggatcttcggaatctggtcattgagatggtgctctccactgatatgagtgggcattttcagcaaatcaagaacatcaggaatagcctgcagcaaccagaaggtattgacagggcaaaaactatgagcctgattcttcatgccgcagatatctcccaccctgccaagagctggaaattgcactatcgctggactatggcgctcatggaggagtttttcttacagggcgacaaagaggccgaactagggctcccattttctcctctgtgtgacaggaaaagcacgatggtggcacagtcgcagattgggtttatcgattttatcgtggaaccaactttttctctcctaacggacagtactgagaagattgtgatcccactgatcgaagaagcctctaaggctgagactagttcttatgttgcttcttcatctacaacaatcgtgggactgcatattgccgacgccctaaggcggagtaacaccaaaggctccatgagtgacggctcctactcacccgattattccctggcagcagtcgacctcaagagtttcaaaaacaacttggtggatataatccaacagaataaggagaggtggaaggagctcgcagcacagggcgagagcgatttacacaagaactctgaagacttggtgaacgcggaggaaaaacacgatgagacgcacagctag

SEQ ID NO: 234686 - DNA, 1611 bp, synthetic construct
  misc_feature 1..1611: note = Description of Artificial Sequence: Synthetic coding sequence
  source 1..1611: mol_type = other DNA
atggagctgagtccacgatcacctccggaaatgctcgaggagagtgactgcccatctcccctcgagctgaagagtgctcctagcaaaaagatgtggatcaaactgagatcattacttcgttatatggtgaaacagctcgagaatggagaaattaacatagaggagcttaaaaagaaccttgaatataccgcttcattactcgaagccgtgtatattgacgaaacccgccagatcctggacactgaggacgaactacaggaactgagatctgacgccgttcccagtgaagtgagggattggttagcctctacatttacgcagcaggctagagccaaaggcagaagggcagaagaaaagcctaaatttcggagcattgtccacgctgtccaagccggaatatttgtggaaagaatgttcaggaggacttacacgtccgtgggacctacttattctacggccgtcctgaattgcctgaagaaccttgacttatggtgttttgatgtcttctcattgaatcaggccgcagatgaccacgccctgagaaccatagtgttcgagctgctcactcgccataacctcatctctcgctttaagatcccaaccgtctttttaatgtctttcctcgatgcccttgagaccggatatgggaaatacaagaatccataccacaatcagatacacgccgcagatgtcacccagactgtgcactgcttccttctcaggacggggatggtgcattgccttagcgaaatcgaattgctggcaataatctttgcggctgccattcatgattacgaacatacagggacaacaaactcctttcacatccaaaccaagtctgagtgcgctatagtgtataacgatcggtccgttctggagaaccatcacatttcctctgtctttcggctgatgcaggatgacgagatgaacatttttataaacttaaccaaggacgaatttgtcgagctccgggctctggtgatcgagatggtcctggcaacggatatgtcatgtcatttccagcaggtgaaaacgatgaaaacagcccttcagcagttggaacgcattgacaaacccaaagctttgtccctgctgctgcatgctgctgatatcagtcacccaactaaacagtggctggtgcattccaggtggacaaaagcactcatggaagagttctttcgacagggcgacaaggaagctgaattaggactgccattttctccgctatgcgaccgcactagtacacttgttgcacagtcccagatcggttttatcgattttatcgtggaaccaacattttccgtgctgaccgacgtggccgaaaaatctgtacagcctcttgccgacgaagacagtaagtctaaaaatcagccatctttccagtggcgccagccatctctcgacgtggaggtcggagaccccaatccagatgtcgttagttttaggagcacttgggtgaaaaggatccaggagaataagcagaagtggaaagagagagccgcttccggtataactaaccagatgtcgattgacgaactgtccccctgcgaggaagaagcccctccatcccccgcagaggatgagcacaatcagaacgggaacctcgactag

SEQ ID NO: 234687 - DNA, 1488 bp, synthetic construct
  misc_feature 1..1488: note = Description of Artificial Sequence: Synthetic coding sequence
  source 1..1488: mol_type = other DNA
atggtgaaacaattggagaacggggaaatcaacattgaggagctgaagaagaatttggaatatactgcttccctgctggaggccgtctatatagatgaaaccagacagattctcgacactgaagacgagctccaggaactaaggtcagacgcagttccatcagaggtgcgagactggctggcctccacattcacacagcaggcccgagctaaaggtaggagagcggaagagaaaccgaaatttagatccatcgtgcatgcagtccaggccggtatttttgtcgagcggatgtttcggcgaacttatacctctgtggggccaacttacagcactgcggtgcttaactgtctgaaaaatctggacctctggtgctttgacgttttctccttaaaccaggctgccgacgaccatgccctccgaacaattgttttcgagctcttaacgagacacaacctgattagccggttcaagatcccgacggtctttcttatgtctttccttgacgcactggaaactggctacgggaaatataagaacccttaccacaaccaaatccacgccgctgacgtgactcagacagtccactgcttcctgcttagaaccggcatggtccactgcctcagcgaaatcgagctgcttgccattatatttgccgctgccatccacgactacgaacacaccggaactacaaactccttccacattcagaccaaaagtgaatgtgcgatagtgtataacgaccggagcgtcctggagaaccaccacataagctccgtctttagactcatgcaggacgacgagatgaacattttcataaacttaacgaaggacgagttcgtggaactacgtgctctggtgattgagatggtgttagctacggacatgagttgtcacttccagcaggtgaagactatgaaaaccgccctacaacaacttgagcggattgacaaacccaaggctctgtccctgctacttcacgcagccgatatttctcatccaaccaaacagtggctggtgcactcgcggtggacgaaagccctgatggaagagttcttccgccagggagataaggaggcagagctcggcctgccattttcccccttgtgcgatcgaactagtacactggtcgctcagtcacagatcggctttattgatttcattgtggagcccaccttttcggtgctgactgacgttgccgagaagtcggtccaaccactggccgatgaggattccaaaagcaagaatcaacctagcttccagtggcggcaaccgagtcttgatgttgaggtgggtgaccctaacccagacgtggtgagtttccgttccacatgggttaagagaatccaagaaaacaaacagaaatggaaggagcgtgccgcaagcggcattactaatcagatgagtatcgatgagctaagcccttgtgaggaagaagctcccccttcgcccgcagaggatgagcacaaccagaacgggaatctcgactag

SEQ ID NO: 234688 - DNA, 1551 bp, synthetic construct
  misc_feature 1..1551: note = Description of Artificial Sequence: Synthetic coding sequence
  source 1..1551: mol_type = other DNA
atggctaatccagtcccagtgcagcggtctcacctacagggccctatactaagactccggtacatggtcaaacaactggagaatggagagatcaatatcgaggagttgaaaaaaaatttggaatatacggcgtctctcctggaggccgtgtacattgatgagactcgccaaattttggatactgaagatgaacttcaggagttacggtcagacgccgtgccgagcgaagtgcgggattggctggcatccacctttacacagcaggccagggcgaagggccgtagagctgaggaaaagcccaagttcaggagcatcgtccatgccgtgcaagctgggatctttgtggagcggatgtttaggagaacgtacacaagcgttggcccaacttacagtacagcggtgctgaattgtttgaaaaacctggatctttggtgttttgatgtcttcagcctgaatcaggccgcagatgatcatgctctgagaaccatcgttttcgagttattaaccagacataatctcattagccgatttaaaataccaacggttttcctgatgagctttctggatgcattggagacgggctatggaaaatacaaaaacccctatcacaatcagattcatgccgcagacgttacacagactgttcattgtttcttactgcgaaccggcatggtccactgtttatccgaaattgaactgctagctatcattttcgcggcagctattcatgactatgagcacactggcactacaaactcttttcatatccagacaaaaagcgagtgtgctatcgtgtataacgacagaagtgtactggaaaatcatcacatcagttctgtttttagactaatgcaggatgatgaaatgaacatttttatcaatctgactaaggacgaattcgttgaactgcgggcactggtgatcgagatggtattggcaaccgacatgtcttgtcactttcagcaggtgaaaacaatgaaaaccgccctgcagcagttggagcgcatagataagcccaaggctctgtcattgcttctgcatgccgcagatataagtcatcccacaaagcagtggctggtgcacagcagatggaccaaggcattgatggaggagttctttagacagggtgataaggaggccgagttgggcttacctttcagtcccttgtgtgacagaacatccacacttgtggctcaaagtcaaattgggtttatcgatttcatcgtggagcctactttttcagtgcttactgatgtcgccgagaaaagtgtgcagcctctggctgatgaggatagtaagagtaaaaatcagcccagtttccaatggcgccagcctagtttggatgtggaggtgggggaccctaacccagacgtcgttagtttccggtcaacctgggtcaaaaggatccaagaaaacaagcagaagtggaaagagagggctgccagcggcattactaatcagatgtccatcgacgaactttccccctgcgaggaggaggctccgccttcccccgctgaagacgaacacaaccagaacgggaatctggactag

SEQ ID NO: 234689 - DNA, 2310 bp, synthetic construct
  misc_feature 1..2310: note = Description of Artificial Sequence: Synthetic coding sequence
  source 1..2310: mol_type = other DNA
atgacggatgccggaaacagaaaggaggggttcaagaaatgccgatccgccacattttcaattgatgggtactccttcaccattgtagctaacgaggctggagataagaacgccagacccttggcccgtttctcacggagcaaatctcagaattgcctctggaattccctgatagacggtcttaccggcaacgtgaaggagaagcctcggcctaccattgtgcacgatcctagaccacccgaggagatcctcgccgacgaactgccccagttggatagctcagaggtcttggtcaaaaccagcttccgtctgaggtcactcgttaagcagcttgagagaggcgaagcttccgtcgtagacttgaagaagaacctcgaatatgccgcaactgtacttgaatccgtctacattgacgaaacccggcgactcctggacactgaggatgaactttctgatatacagagcgatgctgtgccaagcgaagttcgcgactggcttgcctctacgttcactcgccagatgggcatgatgctgcgaagatcagacgagaagcccaggttcaaatccattgtccacgcagtgcaggccggaatttttgtggagcggatgtacaggagaacatctaacatggtaggtttgtcctatccacccgctgtgattgaggccctgaaagacgttgataaatggtcctttgacgtattttccctcaacgaggcctctggagaccatgccctgaagttcatcttttacgagctgctgacacggtatgacctgatcagcaggttcaagatccctatctccgctttggtctctttcgtagaggccttggaggtgggatactccaaacacaaaaacccctaccacaacctgatgcacgcggcagacgtcacccagaccgtacattacctgctgtacaagactggcgtagcgaattggctgacagagctggaaatctttgcaataatttttagcgccgctattcacgattatgaacatacaggcaccacaaataatttccacatccagacgaggtccgatcctgctattctgtacaatgaccggagtgtgctggaaaatcaccacctcagtgcagcgtataggttgttacaggatgatgaggagatgaacatcttaattaatctcagcaaagatgattggcgagagttcagaactctggtgatcgagatggtcatggctaccgacatgtcctgccacttccaacagatcaaggccatgaaaaccgcgctgcagcagcccgaggccatcgagaagcctaaagctctgagtctcatgctgcacactgcagacatcagtcacccggctaaggcatgggacttgcatcataggtggacaatgagccttttagaggagttctttcgacagggagatagagaggcagagttaggcctccctttctctcctctgtgtgatcgcaaatcgactatggtggcccagagccaagtggggtttatagatttcattgtggagccaaccttcacggtcctgacggacatgacagagaagattgtatcacccctgatagacgaaacctctcagaccggaggcacgggccagcggaggtcttccctcaactctatctcgtcatctgacgcaaaacgatcgggtgtaaagacgtccggctctgagggatcagccccaataaacaactcagtgatctcagtggattataagtctttcaaggcaacatggacagaggttgtgcacattaaccgcgaacgctggcgtgctaaagtgccaaaagaggaaaaggctaaaaaagaagccgaagagaaggcaaggcttgccgctgaggagcagcagaaggaaatggaggcaaaatctcaggccgaagagggagctagtggcaaagctgagaagaaaacttccggggaaacaaaaaatcaggtgaatggcacccgggcaaacaaatctgacaacccgaggggaaagaatagcaaggctgagaagagctcaggagagcagcagcagaatggcgattttaaggacggaaagaataaaaccgacaaaaaggaccacagcaatataggcaatgatagtaaaaaaaccgatggcaccaagcagcgtagccacgggtcccccgctccaagcacctcctctacttgtaggctgactctcccagtgatcaaacctccccttcgccacttcaagagacccgcatacgcttctagtagttatgcccctagtgtaagtaaaaagactgatgagcaccccgctcgctacaagatgctggatcagagaataaagatgaaaaaaatccaaaacatctcccataactggaatcgcaagtag

SEQ ID NO: 234690 - DNA, 2130 bp, synthetic construct
  misc_feature 1..2130: note = Description of Artificial Sequence: Synthetic coding sequence
  source 1..2130: mol_type = other DNA
atggagagccccacgaaagagatcgaagaattcgagagtaatagccttaagtacctgcaacccgagcagatagaaaaaatctggcttcgactccgtggcctccgtaagtataaaaagacttcacagagactgcgttctctagtgaagcagcttgagagaggcgaggccagcgtagtggatctgaaaaagaatctagaatacgctgcaacagtgctggaatccgtctacattgacgagaccaggcgcctccttgacacggaggacgagctgagtgacatccagtctgacgctgtgcctagcgaggttagagattggttggcctccaccttcacaaggcagatgggaatgatgcttcgacgcagcgacgagaagccaaggtttaaatccatagtgcacgctgtccaagccggtatattcgtagagaggatgtaccgcagaacctctaacatggtggggctctcgtacccccctgccgtgatcgaggcactgaaggacgtagataagtggtcctttgacgtctttagtctgaacgaggctagcggggaccatgccttgaaattcattttttatgagctgctgaccagatatgatctaattagcagattcaaaatccccatcagcgccttggtctcttttgtggaggctctcgaggtcggctattcaaagcacaagaacccctatcacaacctgatgcacgcagcagacgtgactcaaacggtgcactacctcctgtacaagactggagtggccaactggctgacagaattggaaattttcgctattatattttccgccgcaatccacgattatgagcacacaggcacaaccaacaattttcatatccaaacccgctccgatccggcaattctctacaacgatcgctctgtgctagaaaatcaccatctgtccgcagcttatcgcctgttacaggacgacgaagagatgaacattctgattaacctctccaaggatgactggcgtgaatttcgcactttagtgattgagatggttatggccaccgatatgtcctgccacttccagcagatcaaagctatgaagacagccctgcagcagcctgaagcaatcgaaaaacctaaagcacttagtttgatgctgcacactgccgatattagccatcctgccaaagcgtgggacctgcatcaccggtggacaatgtcgctgctagaagagttttttcgccagggagaccgcgaggccgaactgggtttaccattctcaccactgtgtgaccggaagagtacaatggtggcgcaaagccaagtgggcttcatcgacttcattgtggaaccaacgtttaccgtgctcacggacatgacggagaaaattgtgtctccattgatcgacgaaacctcacagactggagggacaggccagcgcaggagctccctgaattcaattagcagttctgatgcaaagaggtcaggtgtgaaaacatccggaagtgaaggtagcgcccctatcaataattctgtgatcagtgtagattacaaatcatttaaagccacctggactgaggtcgtccatattaaccgggagcggtggcgggcaaaggtcccaaaggaggagaaagccaagaaggaggcagaagaaaaagctaggctcgcagctgaggaacaacagaaggagatggaggccaagtcccaggcagaagaaggggcaagcggaaaggctgagaagaaaacatcgggcgagactaagaaccaagtcaatggaaccagagccaacaaatctgataaccccaggggtaagaatagcaaagccgaaaagtcatctggtgagcaacagcagaatggtgacttcaaagatggcaagaacaaaacggataagaaggatcactcgaatatcgggaacgacagcaagaagactgacgggacgaagcaaagatctcatggatcccctgctccctcgacgtcctctacttgcaggctgaccctgcccgtaattaagcccccacttcggcatttcaaacgccctgcttatgccagttcctcgtacgcccctagcgtaagcaagaagacagatgagcacccagccaggtacaagatgctcgatcagcgcattaaaatgaagaagatccaaaacatcagccacaactggaacaggaagtag

SEQ ID NO: 234691 - DNA, 1905 bp, synthetic construct
  misc_feature 1..1905: note = Description of Artificial Sequence: Synthetic coding sequence
  source 1..1905: mol_type = other DNA
atggaaagccctaccaaagagatcgaagaattcgaaagtaacagtctcaagtaccttcagccagagcagattgagaagatctggctccggctgaggggccttcgaaagtataagaaaacctcacagcgcctgagatctctggtgaagcagttggaaaggggggaggcctcggtggtggatctgaagaagaatttggagtatgctgccacagtgctggagtccgtatatatcgatgagacacggcgattactggatactgaggatgagctatccgatattcagtccgatgccgtgccaagcgaggtacgcgactggctagcatctacattcaccagacagatgggcatgatgctccgaaggtccgacgagaagcccaggttcaagtctatcgtacatgccgtccaagctgggatcttcgtggaacggatgtatcgcaggactagcaacatggtgggattgagctatccacccgcagtaatcgaggcactgaaggatgtcgataaatggtcctttgatgtcttttcactgaacgaggccagtggcgaccatgctctcaagttcattttttatgaattactcacgcgctatgacctgatcagccggttcaagattccgatttcagctcttgtaagtttcgtggaggccctggaggttgggtacagcaaacacaaaaacccatatcataacctgatgcacgctgccgacgtcacacaaactgtgcattacttgctgtacaaaacaggtgttgcaaactggcttactgagctggaaatcttcgccatcatcttttctgctgctattcatgactatgagcataccggaacaaccaataacttccacatccagacccggagcgaccctgcaatcctgtataacgatagatctgttctggaaaaccaccacctctcagccgcatacaggttgctgcaggatgacgaggagatgaacatcctcataaatctctcaaaggacgactggagggagttccgcactctggtgatcgagatggtgatggccaccgacatgtcttgccactttcaacagataaaagctatgaaaacagctctccagcagcccgaagccattgaaaaacctaaagcactgtccttgatgctgcataccgccgatattagccatcccgctaaagcctgggatctccaccatcggtggacaatgagcctgctggaagagttctttcgacagggagatcgggaagcagaacttggtctacccttcagccctctctgtgaccggaagagcaccatggtggcgcaatcacaggtcggttttatcgattttattgtcgaacctacttttacagtgctcaccgacatgacagaaaagatcgtcagcccattgattgacgagacatcacagacaggagggacgggtcagagacggagttcacttaattccataagctccagcgacgccaagcgatcgggggtaaaaacgtctggcagcgagggatctgccccaataaacaattcggtcatttccgtagactataagagttttaaggccacatggaccgaggtggtacatattaaccgggagagatggcgggcaaaagtccccaaagaggaaaaggcaaagaaggaagcagaagagaaggccagattagccgctgaggaacaacagaaggagatggaggccaagtcccaggccgaagagggtgcatcaggcaaggccgaaaaaaagacctctggtgaaaccaagaaccaggtcaacggcactcgtgcgaataagtctgacaaccccaggggtaaaaattctaaggccgagaagtcatccggcgaacaacagcagaacggtgattttaaagatgggaaaaacaaaactgataaaaaggatcactcaaatataggaaatgacagcaaaaaaacagacgactcccaggagtag

SEQ ID NO: 234692 - DNA, 1905 bp, synthetic construct
  misc_feature 1..1905: note = Description of Artificial Sequence: Synthetic coding sequence
  source 1..1905: mol_type = other DNA
atggaatctcccaccaaagaaatcgaagagttcgaaagcaattcactgaagtacctgcagcctgagcagattgaaaagatatggctgcggctgcgaggcctgcgcaaatataagaagacctcgcaacgattgcgttctctcgtgaagcagctggagaggggtgaggcttccgtcgtggatcttaaaaaaaacctggagtatgctgccacagtgcttgagtccgtctatatagatgaaactcggaggctactggacacagaggacgagctcagcgacattcaatccgacgccgtgcctagcgaggtccgggactggctggcatccacattcacaaggcagatgggcatgatgttgcggcgatccgacgagaagccacggttcaaatccatcgtccatgctgtgcaggcaggaatttttgtggagcggatgtacagaaggacaagcaacatggtgggcctaagctaccctcctgccgtgattgaagccctgaaggatgttgataaatggtcatttgatgtctttagtcttaatgaagcttctggagatcatgcccttaaattcatcttttatgaattgcttacacggtatgacctgatttcccggtttaagataccgatatcagcactggtgtcttttgtggaggcactcgaggtgggttactcgaagcataagaacccctatcacaatctgatgcatgccgctgatgttacacagactgtccattacctgctgtataaaacgggtgtggctaattggctcaccgagttggaaatcttcgctatcatctttagcgccgcaatacatgactacgaacatactggaacgaccaataattttcacatccagacgaggagcgacccagccattctgtacaatgaccggtccgtgctggagaatcaccatttaagcgctgcataccggctgttacaagatgatgaagaaatgaatatcctaattaatctaagcaaggacgattggagagagttccgcaccctggtgatagaaatggtcatggccaccgacatgtcatgccattttcagcaaataaaggctatgaagacagccctacagcagcctgaagcaattgaaaagccaaaagcactctcgctgatgcttcacaccgctgatatctctcacccggcaaaagcctgggacctccaccaccgctggacaatgtcactcctcgaagagtttttccgtcagggtgacagagaagctgaactggggctgcccttttcgccactgtgcgaccgaaagtcgaccatggtagcccagtctcaggtgggatttatcgattttattgtggaacccactttcacagtgctgacagacatgaccgagaagatcgtgtccccattaattgacgaaacatcccagactggcggaaccggccagcgtcgttccagcctgaatagcatctcttcctcagatgcaaagaggagcggtgttaaaacaagcggatctgagggctcagcccctatcaataacagcgttatttcagtggattacaaaagctttaaggcgacatggaccgaggtggtgcacatcaacagggaacgctggcgcgctaaggtgccaaaagaagaaaaagccaagaaagaggcagaggaaaaagccaggctggctgcagaggaacagcagaaggaaatggaggccaaatcgcaggctgaagaaggggctagtggcaaggcggagaagaagacttcgggcgagacgaagaaccaggttaacgggacccgggctaacaagtctgataatcctcgtggaaaaaactccaaggccgagaagagctccggtgaacaacagcagaacggagatttcaaggatggtaaaaacaagactgacaagaaagatcattcaaacattggtaacgactcaaagaagaccgatgacagccaggaatag

SEQ ID NO: 234693 - DNA, 141 bp, synthetic construct
  misc_feature 1..141: note = Description of Artificial Sequence: Synthetic coding sequence
  source 1..141: mol_type = other DNA
atggagtccccgacaaaagaaatcgaggaatttgaatctaattccctgaagtacctgcagccagagcaaatagaaaagatctggctgcggctccgaggactgcgaaagtacaagaagacgagccagcggttacgcagttag

SEQ ID NO: 234694 - DNA, 2130 bp, synthetic construct
  misc_feature 1..2130: note = Description of Artificial Sequence: Synthetic coding sequence
  source 1..2130: mol_type = other DNA
atggaaagtcctacgaaggagatcgaggagttcgaatccaactccctcaagtacctccaacctgagcagatcgagaaaatctggttgcgccttcgcggactcaggaaatacaagaagactagccagaggctgcggagcctcgtgaagcagctggagagaggggaggctagcgtagtggacctgaagaagaacctggagtatgcagccaccgtgcttgaaagcgtttacatcgatgagacaagaagactcctggataccgaggatgagttgtccgatatacaaagcgacgcagtccccagtgaggtgcgggactggctggcttccacctttacacggcagatgggtatgatgctgagaaggagcgacgaaaagccccgtttcaaatcaattgtccacgctgtgcaagccggaattttcgtggagaggatgtatcggagaacctctaatatggtgggcctgagctatcctcccgcagtgatcgaagctttgaaggatgtggataagtggtcttttgatgtgttttctcttaacgaagcttcaggagaccacgcactcaaatttattttctatgagcttctaacaaggtacgatctgatctctcgttttaagatccccatatctgccctcgtctcgttcgtcgaagctcttgaggtcggatattccaaacacaagaacccataccataatctcatgcatgcggctgacgtgacacaaactgttcactatttactgtacaagactggagtcgctaactggcttaccgaactggagatattcgcaattatctttagtgctgcgatccacgactatgagcacacaggaaccaccaacaacttccatatacaaaccagatcagatcccgctatactttataatgatagatccgtcctggagaaccatcatctgtcagccgcttaccggctgttgcaagatgacgaggaaatgaacattctgattaacctcagtaaggatgactggagagagtttcggaccctggtgatcgaaatggttatggccaccgatatgtcatgtcattttcagcagataaaggcaatgaaaaccgccctgcagcagcccgaagcaatcgaaaagcccaaggcactgtctctgatgttgcacaccgcggatattagccaccccgctaaggcctgggacctgcatcacaggtggaccatgagcttgctggaggagtttttccgacagggagatcgtgaagccgagctgggactgcccttttcacccctttgtgacagaaaatctacaatggtagcccagagtcaggtcggcttcatcgacttcatcgtggaacccacttttaccgtactcaccgatatgaccgagaaaatcgtgtcacccctaatagatgaaacctcgcagaccggaggcacaggacagcgcaggagcagcttgaactctatcagcagctctgatgcaaagaggagtggcgtcaagaccagcggatccgagggatctgcaccaatcaataactcggtgatttccgtcgattataaatctttcaaggccacctggaccgaggtcgtccatattaaccgggagcggtggcgggcaaaagtgcctaaggaagagaaggccaaaaaggaagcggaggagaaggctaggctcgccgctgaggagcagcagaaggagatggaagcgaaatcacaggccgaagagggagcatctgggaaagccgagaagaagacatctggcgagaccaagaaccaggtgaacggaaccagagccaacaaaagtgacaaccctaggggtaaaaattctaaggccgagaaaagctccggggagcagcagcaaaatggagacttcaaagatgggaagaacaagactgacaagaaggaccactctaatatcggtaacgactcgaagaaaacagatggaaccaagcagaggtcccacggcagcccagcccctagtacatcaagtacatgtagactgaccctgcccgtcataaaaccccctctgaggcactttaaacgcccagcttacgcaagctcctcctacgcacccagcgtgagtaagaaaactgacgagcaccctgcaaggtataaaatgctggaccagcgtataaagatgaaaaaaatccagaacatttcacacaactggaaccgaaagtag

SEQ ID NO: 234695 - DNA, 3339 bp, synthetic construct
  misc_feature 1..3339: note = Description of Artificial Sequence: Synthetic coding sequence
  source 1..3339: mol_type = other DNA
atgcgtcgggacgagagggatgctaaagcgatgaggtccctgcaaccacctgacggcgctggatctccgccagagtcactgcgtaacgggtatgtgaaaagctgcgtctctcccctccgccaggacccccctcgaggatttttttttcacctgtgcagattttgtaatgtcgagctaaggccgcctccagcaagtccccaacagcctcgcaggtgttccccgttttgccgggcacggctctcacttggcgcattggctgctttcgtgttggccctgctgttaggggcagaaccagaaagttgggcggctggagccgcatggctgagaacccttctaagtgtgtgttcccacagcttgagccccctattttctattgcctgcgccttcttttttctcacatgcttcctcactaggaccaagcgcggacctggcccaggtcggtcctgcggctcttggtggctgctcgcacttccggcttgctgctatctgggcgacttcttggtgtggcagtggtggagttggccatggggggatggggatgcagggtctgcagcgccacatacaccaccggaagcggctgcgggtcgtctgctgcttgtgttgagttgcgttggactcttgctgaccctggctcaccctttgaggctccggcactgtgttttagttcttttgctggcctcattcgtgtggtgggtatctttcacaagtctgggtagtctgccaagcgccctcaggcctctcctttctggcctagtgggaggcgctgggtgtctgcttgcccttggcctggatcactttttccagatcagagaagccccacttcacccacgtctgtcctcagccgcagaagagaaggtgcccgtgatccggccaaggcggaggtctagttgcgtgtctctaggggagactgcggcaagctactacgggtcctgtaaaatcttccgaaggccttcattgccttgcatcagtcgggagcagatgattttgtgggattgggacctcaaacagtggtacaagccccactatcagaacagcggtgggggaaatggcgtcgatctgtctgtactcaatgaggcgcgtaatatggtttccgatctattgaccgatcctagcctgccaccacaggtgatttcttctctccgctccatatcgtcgcttatgggagcgttcagtggttcctgcaggcccaagatcaaccccctcacccccttccccggattctacccatgcagcgaaattgaggaccctgccgagaagggcgacagaaagctgaacaagggactgaataggaactccctccctacaccccagttgcggaggagttcaggcacctccgggctgctccctgtggaacagagtagtaggtgggataggaacaatggcaagagacctcatcaggaatttggcatttcaagtcaaggttgttatttgaatgggcctttcaactcaaaccttcttacaattcctaaacagcgaagcagctctgtgagcctgacccatcacgtgggactgcggagagcgggtgtgctttcaagtctgagccccgtcaatagcagcaaccacggccctgtttcaactggctcattgaccaaccgaagcccaatagaatttccagacaccgccgactttctgaataagcccagtgtgatcctccagaggagtctgggcaatgcacctaatacacctgatttctaccagcagttgcgcaactcggacagcaacctgtgtaatagttgcgggcaccagatgctgaaatacgtaagtacctcggaatctgacggcacggattgttgcagcggaaaatcaggggaggaagagaatattttcagcaaagagagctttaaactgatggaaacacagcaggaagaggagactgagaagaaagactcgagaaaactgttccaagaaggcgacaaatggctcactgaggaggcccagtccgagcaacaaacgaacattgaacaggaagtcagcctcgatctcatcctggtcgaggagtacgactccctcatcgagaagatgtctaattggaatttcccaatcttcgagctcgttgaaaagatgggggaaaagagcggacgaatcctgtcccaggtgatgtataccctcttccaggacaccggcctgctggagatcttcaagattcctacgcagcagtttatgaactattttcgcgcacttgaaaatggctatcgcgatattccttatcataatcgtatccatgccactgacgtgctgcacgcggtctggtaccttacaacacgcccagtgcccggtttgcagcagattcacaacggctgtggtaccgggaatgagactgactcagacggcaggattaatcacggaaggattgcctacatctcatctaagtcatgttcaaaccctgacgaaagctacgggtgcctgtccagcaacatccctgcactggagttgatggcgctctatgtagccgctgctatgcacgattacgatcaccctggccgaacgaacgcatttctcgtggcaaccaatgcacctcaggcagtgttgtacaacgaccgcagcgtacttgaaaaccaccatgccgcttcggcctggaatctgtatctcagccgccctgaatacaatttcctccttcacctcgaccacgtcgagttcaagaggttccggtttctagtgatcgaggccattcttgccactgacttgaaaaaacactttgattttctcgcagagttcaacgccaaggcaaatgatgtcaatagcaacggaatcgagtggtccaacgaaaacgacagactgttggtgtgccaggtgtgtatcaaactggcagacatcaacggacctgctaaggtgcgcgacctccacttgaagtggaccgaggggatagtgaacgaattttatgaacaaggcgacgaagaggctaacctcggtctgcctatctccccttttatggaccgctcctcccctcaactggctaagctgcaggagagttttatcacacacatcgtcggccctttatgcaacagctatgacgccgctggtttgctcccgggacagtggctggaagcagaggaagataatgacaccgagagcggcgacgatgaggatggcgaggaattagacacagaggatgaggagatggaaaacaacctgaacccgaagccacccaggagaaagtccagaaggcgtattttctgtcagctcatgcaccatctcacagaaaatcataagatatggaaagagattgtcgaagaagaggaaaagtgtaaagccgacgggaacaagcttcaggtcgaaaactcatcgctgccacaggctgatgagattcaggtgatcgaagaagccgacgaggaggaatag

SEQ ID NO: 234696 - DNA, 3186 bp, synthetic construct
  misc_feature 1..3186: note = Description of Artificial Sequence: Synthetic coding sequence
  source 1..3186: mol_type = other DNA
atgaggagggacgagcgcgatgcaaaagccatgaggagcctgcagcctccagatggagctggtagccccccagaaagcctgcggaacggatatgtcaaatcctgtgtgagccctttgcgacaggatcccccacgcggttttttctttcatctttgtcggttttgtaatgtcgagctgcgcccaccacccgcttcccctcagcagcccaggagatgctccccgttctgcagggccaggttgtcactaggcgctcttgcagcctttgtgctcgcactcctactgggcgctgaaccggagagctgggctgcaggcgctgcctggctaaggacgctgctctctgtgtgttctcactctctctcacctctgttcagtatagcctgcgcctttttttttcttacctgttttttgactcggaccaaaagaggtcccggaccagggagatcttgcggttcttggtggctgctagcactgcctgcgtgttgctatttgggcgacttcctggtttggcaatggtggtcctggccctggggcgacggggatgccggatccgcggcaccccacacaccccctgaagccgcagccggaaggttgttactcgtactcagttgcgtaggtcttctcctcaccttggcccaccccctccggttacgccactgtgtgctagttctgctgctcgcgagcttcgtctggtgggtaagctttacctcactgggatcccttccttcagctttgcgtccactgctgtcaggccttgtcgggggagccggatgcctgcttgccctgggcttagatcatttctttcagatccgagaggccccacttcatcctaggctctccagcgcggctgaggagaaggtgccagtgattcggccaagaaggagatcaagctgcgtatcacttggggagactgccgctagctactacggatcttgcaaaattttccgcaggccaagcttgccctgcatcagtagggagcagatgattttgtgggactgggacttaaagcagtggtacaaaccacattaccagaactctgggggtggtaatggcgtggacctgagcgtcttgaatgaagcgcgaaatatggtctccgacctactgacagatcctagtctcccaccgcagggcctgaatcgtaattcactgcccacacctcaactgcgcagaagcagcggaaccagcggcctgctccccgtggaacaaagctctcggtgggatcggaataatggcaagcgccctcaccaggagtttggaatcagtagccagggctgctacttgaatggacctttcaatagtaacctcttgacaatccccaagcagcggtctagttctgtgtcgctcacacaccacgtggggctgagacgggctggcgtactcagctcattgagccccgtgaactcttcaaatcacggaccagtgtccacaggatctctcaccaatagatcaccaattgagttccctgatacagccgactttctgaataaacctagcgttattctgcaacgaagcctgggtaacgcacctaataccccagatttctaccaacaactgagaaacagtgacagcaacctgtgcaactcctgcgggcatcagatgctgaagtacgtgagcacgagtgaaagcgatggaacagattgctgtagcggtaaatcaggtgaggaggagaacatattcagcaaagagagctttaaattaatggaaacgcagcaggaagaggagacggaaaaaaaggactccaggaagttgtttcaggaaggggacaagtggttaaccgaggaggcacagagtgagcaacaaaccaatatcgagcaggaagtctctttagacctaatacttgtggaagagtacgattcacttatcgagaaaatgagcaattggaacttccccattttcgaactagtagaaaaaatgggcgaaaaaagcggcagaattcttagtcaggtaatgtacacgctgttccaggatacagggctattggaaatttttaagatacccacccagcagttcatgaattactttagagccctggagaatggttaccgagacatcccttaccataatcgaattcacgccacagatgtcctgcacgcagtgtggtacttaacaaccagacctgtgcctggtctccaacagatccataacgggtgcggcactgggaatgagactgacagcgacggaagaattaatcacggtaggattgcttacatttcctccaagtcctgctctaatccagacgagtcctacggatgtctcagcagtaacattcccgctctggagctgatggctctatacgtcgctgctgctatgcacgactatgaccatccagggaggactaacgcctttctggttgctacgaacgcacctcaggccgtcctttataatgatcgctctgtcctggagaatcaccacgctgccagtgcatggaatctgtacttgtcgcgcccagaatataatttcctcctgcacttagaccatgttgagttcaagcgcttccgatttctcgtcattgaggctattcttgccacagacttgaagaaacattttgatttccttgcagagttcaatgccaaggcgaatgacgtaaatagtaacggaattgagtggagcaacgaaaacgacagactcctagtttgccaggtgtgtatcaaattggccgacataaacggacccgctaaggttcgcgacctacatctcaagtggactgaagggattgtcaacgaattctatgagcagggagatgaggaagcgaatcttgggcttccgatttccccgttcatggatagaagctcccctcagctggccaagttacaggagagttttatcacgcacatcgtcggaccgctatgcaacagctacgatgctgccggtctcctgcctggacagtggcttgaggccgaggaggataacgatacagagagcggcgatgacgaggacggggaagaactggatacagaggacgaggaaatggaaaacaacctcaacccaaaaccgccacgacgtaagtcccggagaaggatcttttgccagctgatgcatcatcttaccgagaatcacaagatctggaaggaaatcgtggaagaggaggagaagtgtaaagcggacggcaacaagctgcaggtggaaaactcctccctgcctcaggccgacgaaatccaggtgattgaagaggctgacgaggaggagtag

SEQ ID NO: 234697 - DNA, 2583 bp, synthetic construct
  misc_feature 1..2583: note = Description of Artificial Sequence: Synthetic coding sequence
  source 1..2583: mol_type = other DNA
atggcaagaccaagaggactgggcaggatccctgaattgcaactggtggcttttcccgttgcagtcgcagcagaagatgaagcctttttgcctgagccacttgctccccgagccccacgccgtccaaggagccccccatctagtccggtgtttttcgcttctccatcccccacattccgccgtcggttgcgcttgctacgctcctgccaggacctgggcaggcaggcttgggccggtgcaggattcgaggcagaaaacggcccaacacccagtcccggtagatcccctcttgactcccaggcctctcccggactggtgctgcatgctggtgcagccacttctcagcggagggagtctttcttgtacaggagtgattccgattatgatatgtcacctaagactatgtcgaggaactccagcgtcaccagcgaggcccatgccgaggatctcatagtgactccgttcgcgcaagtcttggcgtccctccgtagcgttcggagcaacttttccttgctcaccaacgttcccgttccatccaacaaaagatctcctctgggcggtcctacccctgtatgcaaagctactctgagtgaggaaacgtgccaacagctggcccgtgagacacttgaagagttggattggtgcctcgagcagctggagacgatgcagacatatcgttccgtgagcgaaatggcgagccataaattcaagaggatgctgaatcgtgaactcacccatttgagcgagatgtcccgctctggtaaccaagtgagcgaatacatttcaaccaccttcctggataagcaaaacgaggttgagataccttcaccaaccatgaaagaacgggaaaaacagcaggctccacggcctcggccatctcaacctccacctccacccgttccacatctccagcccatgtcccagattaccggcctcaaaaaactcatgcacagcaacagccttaacaactccaacataccccgattcggagttaaaactgaccaggaagagttgctggcgcaggaacttgagaacctgaataaatggggactgaacattttctgtgtttctgattatgccggagggagatccttgacatgtataatgtacatgatcttccaagagagagatctgcttaaaaagttccgtattccggtcgatacaatggtgacatatatgctgacactggaggaccactatcatgcggacgtggcttatcataacagcctgcacgctgccgacgtgcttcagtcgacccacgtattgttggccactcccgctctggacgccgtcttcacagacctggaaatcttggcagctttattcgcagctgccattcacgatgtggaccaccctggtgttagtaatcagttcctgattaataccaactccgagctggcgctgatgtacaatgacgagtccgtgctggaaaaccaccacctggcagtgggttttaagctgcttcaggaggacaactgcgatatatttcagaacctttcaaagcgccagcgacaatcactgcgaaaaatggttatcgatatggtgttggcaactgatatgagtaagcacatgactctgctggccgacctgaagacaatggtcgagactaaaaaggtgacatcttctggcgtgttactgctcgacaattattccgaccgaatacaggttctaagaaatatggtacattgcgctgacctctccaatccgaccaaacccttggagctctatcggcagtggacagacaggattatggcagaattttttcagcagggcgatagagaacgagaacgtggtatggaaataagccctatgtgtgataagcacaccgcctccgtggagaagtcccaggtaggtttcatcgattacatcgtgcaccctctgtgggagacctgggcagatctcgtacatcctgacgcacaggagatcctggacactcttgaagataaccgggattggtattatagcgcaattaggcagtccccaagtccgcctccagaagaggagagccggggacctgggcatcccccactgccggataagtttcaatttgaactgacgttggaggaggaggaggaggaagaaatcagtatggcgcaaatcccctgcactgcccaggaggccctgaccgcccaaggactctcgggcgtggaggaggccctggatgccactattgcctgggaggcgagcccggctcaggaaagcctggaagtcatggcccaagaagctagcctggaggccgagcttgaggcagtttatttgactcagcaggcacagagcaccgggagcgctccagtggcccctgatgagttttcttcccgagaagagttcgtcgtggccgtgtcacattcatctcctagcgccttagcacttcaaagtcccctgctgcccgcttggcgcactttgagcgttagtgaacacgccccaggactccccggtttgccttcaaccgcagccgaggtcgaagcacaacgcgagcaccaggctgccaagcgcgcatgcagcgcttgcgcagggacttttggtgaagacaccagcgccttgcctgcccctggtggcggtgggagtggcggagaccctacttag

SEQ ID NO: 234698 - DNA, 1944 bp, synthetic construct
  misc_feature 1..1944: note = Description of Artificial Sequence: Synthetic coding sequence
  source 1..1944: mol_type = other DNA
atgccactggtagactttttctgtgaaacgtgctccaagccctggctggttggctggtgggatcagtttaagaggatgttgaaccgcgaactgactcatcttagtgagatgagccgctccgggaaccaggtttccgagtacatctccactacctttttggacaaacagaacgaagtggaaatcccgtccccgaccatgaaagagagggaaaagcagcaggctccacgacctcgcccatcacagcctcctccgccacccgtcccccacctgcagcccatgtcccaaattactggacttaaaaagctcatgcattctaacagtcttaacaactcaaacattccgagattcggagtcaagacagatcaagaggaactactggcacaggagctggaaaacctcaataaatggggccttaatatcttctgtgtgagtgactacgccggaggccgttccttaacatgcattatgtatatgatttttcaggagcgtgacctgttgaaaaaatttcgcatcccagtagatactatggtgacgtacatgcttacccttgaggatcactatcacgcagacgtcgcctaccacaattccctgcacgccgctgatgtgcttcagtctacccatgtactccttgctactcctgcactggacgcagtgtttaccgatctagagatcctggctgcactattcgctgcagctattcatgatgtcgaccaccctggagttagcaatcagtttttgatcaacacgaatagcgaactggcactgatgtataatgacgagagtgtcctcgagaaccatcacctcgccgtcggtttcaaattgcttcaggaagataactgtgacatttttcagaacttatcaaagaggcagaggcagagcctgcgaaaaatggttatcgatatggtgttggcaacagacatgtcaaagcacatgaccctgctggccgacctgaaaacaatggttgagacaaagaaggtcacctcctccggcgtgcttctgctcgacaattactccgacaggattcaggtgctaagaaacatggtgcattgtgcggacctgtcgaatcctaccaagccattggagctgtacagacagtggacagataggatcatggccgagttcttccaacaaggtgacagagaaagagagcgcggtatggagataagcccgatgtgcgacaaacacacagcaagtgtagagaagagtcaggtgggctttattgattatatcgtgcatccgctatgggagacttgggcggatctggtgcatccagacgcccaagaaatcttggacacattagaggataacagggactggtattactcagctattaggcagagccccagtccccctccagaagaagagagtagggggccaggccaccctccgttgcccgacaaatttcaattcgagctcacattggaagaagaggaggaggaggaaataagtatggcgcagattccctgtaccgcccaggaggctctcacagctcaggggctttcgggcgtcgaggaagcactggatgcaaccatagcctgggaggcgtccccagctcaggaaagcttggaggtgatggctcaggaggcctccttggaggctgaacttgaggctgtgtatctgacacagcaggcccaatccactggcagcgcaccggtagcgccagatgaatttagtagtcgagaagagtttgttgttgctgtgagtcattccagtccaagtgccctcgcactgcagagccctctgctgccggcatggcggacattgagcgtgagcgaacacgcacctggcctgcccggtctcccctctacagctgccgaggtggaggcgcagcgcgaacaccaggccgctaaaagggcctgctcggcctgcgcagggactttcggagaggatacctctgccctgccagctcctggaggcggtggatcggggggagaccctacgtag

SEQ ID NO: 234699 - DNA, 2661 bp, synthetic construct
  misc_feature 1..2661: note = Description of Artificial Sequence: Synthetic coding sequence
  source 1..2661: mol_type = other DNA
atggagccacccaccgttcccagtgaacgatccctgtcactaagtttacccggaccgagggaggggcaggcaaccctgaaacctcccccacagcacctctggcgacagcccagaacaccaatccgcatccagcagaggggttatagcgacagcgcagaacgggcagagcgcgagcgccaacctcatcggccaattgaacgagctgacgccatggacacctctgacagacccggactgcgcaccacacgaatgtcatggcctagcagctttcacggaaccggcactggatcaggcggagccggtggcggatcctctcgcaggttcgaggccgagaacgggcctaccccaagcccgggaagaagccctcttgatagtcaggcgagcccagggctggtcctacacgccggtgccgcaacttctcagcgcagagagagttttctgtaccgctctgactcagactacgacatgtctcccaaaactatgtcccggaattctagcgttactagcgaagcccatgccgaagacctgatcgttacaccctttgcacaggtacttgcctccctgcggagcgtacgctctaacttttctctactgactaacgtgcccgtgccttcaaataaaagaagtcccctgggagggccaactcccgtgtgtaaggctacactctcagaggagacctgtcagcagctggccagagagacgctcgaggaactggactggtgtttagaacagctggagacaatgcagacctaccggtctgtgtctgagatggctagccacaagttcaaacggatgctcaacagagaactcacccatttgtctgagatgtcaagatctggcaaccaagtctccgagtacatttctacaacattcctggacaagcagaatgaagtcgagatcccctctccaactatgaaagagcgcgaaaaacaacaggccccaagaccacgtcctagtcaacccccaccacccccagtccctcaccttcagccgatgagccagattaccggactgaagaagctaatgcattcaaatagcctgaacaattctaatatccctagattcggggtgaaaaccgaccaggaagagctgctggctcaagagctggagaatctcaataagtggggattaaacatcttctgtgtaagcgactatgccggaggcaggtctctgacgtgcattatgtatatgatcttccaggaaagagacctgctgaagaagtttcgcattcccgtggacacaatggtgacatacatgttgactttagaagaccattaccatgcagacgtggcataccataatagcctgcacgcagcagacgttcttcagagcacacacgtattgctggcaacccccgctctggacgcggtattcaccgacttagagatcctggctgcactttttgccgcagctatccacgatgtggatcacccgggtgtaagcaaccaatttttgataaacactaattctgaactggcgttaatgtacaacgacgagtctgtcctggagaaccaccatttggcggtcgggttcaagctgctccaagaggataattgcgatatattccaaaatctgtccaagcgacagcgacaaagtctccgaaagatggtcattgatatggtgctggctaccgacatgtccaagcacatgacactgttagcggatctgaagacaatggtagaaaccaaaaaagtcacttcgagtggcgtgctgctgcttgacaattatagtgaccggattcaggtcctgcgcaacatggttcattgtgccgacctctcaaatcccacaaagcccctcgaactgtatcgacagtggacggaccggatcatggccgagttctttcaacagggggatcgggaacgcgagcgcggaatggagatctcccccatgtgcgataagcacactgcttcagtcgagaaaagccaagtaggctttatcgattatattgtgcaccctctctgggagacttgggctgacctcgtgcaccccgatgcgcaggagatcctagacaccttggaagacaatcgagactggtactactccgccattcgtcaatcccccagtccccctcctgaggaggaaagcagagggcctggacacccccctctccctgataaatttcaatttgaacttaccctggaagaggaggaggaggaagagattagcatggcccaaatcccttgtacagctcaggaagccctgaccgcacagggcctgagtggagtggaggaggccctcgatgcaacaatagcttgggaggcctcccctgcccaggagtcccttgaggtcatggcacaggaagcaagtttggaggctgagttggaagcagtttatctcacacaacaggcccagtctaccggtagtgcaccagtcgcccctgatgaattttcctcccgagaggagtttgttgtcgctgtcagccatagttccccgagcgcacttgccctgcagagccccctgctccccgcatggaggaccctgtcagtgtcagaacacgcgcctggcctcccaggactgcccagcactgccgctgaggtcgaagctcagagggagcaccaagctgctaaaagggcctgttccgcgtgtgctggcacatttggagaggatacctccgccttaccagccccagggggaggaggttcagggggtgacccgacctag

SEQ ID NO: 234700 - DNA, 972 bp, synthetic construct
  misc_feature 1..972: note = Description of Artificial Sequence: Synthetic coding sequence
  source 1..972: mol_type = other DNA
atggtccttccgtccgaccagggcttcaaactgttggggaatgttctgcagggacctgagccctatcgccttctcacgtccggactcaggctacatcaagagctggagaacctgaacaaatggggcctcaatattttttgcgtctccgactacgcgggaggaaggagcttgacctgcattatgtacatgatcttccaggagagagatctcctgaagaaatttcggatacccgtggacaccatggtaacctacatgctcacactcgaggaccattaccacgccgacgtggcctatcataacagtttgcacgcagctgacgtcctgcagagtactcacgtcctgctcgccactcccgcattggatgccgtgtttactgacctggagattctggctgccctcttcgctgccgctatccatgacgtggaccacccgggtgtctctaatcagttcctaataaacactaattcagaactcgcactgatgtacaacgacgagtcggtgctggaaaatcaccaccttgcagtcggattcaaattattacaggaggacaactgcgatatttttcagaatctgagtaagaggcaacgccagtccctgaggaagatggtgatcgacatggttctcgccacagatatgtccaagcacatgaccctgcttgccgacctaaagaccatggtggaaactaagaaagtaacatctagcggagtactcctgctggataattattcagacaggatccaagtcctgcgcaacatggtccactgtgctgacctgtctaatccgaccaaaccacttgagctttacagacagtggacggatcgtataatggctgagttcttccagcagggagacagggagcgtgagcgaggcatggagatcagccctatgtgtgataaacatacggcaagtgtggagaaaagtcaggtacaggctcgagggattgatggccgagcccagggtgaattctactag

SEQ ID NO: 234701 - DNA, 2595 bp, synthetic construct
  misc_feature 1..2595: note = Description of Artificial Sequence: Synthetic coding sequence
  source 1..2595: mol_type = other DNA
atgaagcgtagccgatccgcactgagcgtcgccggaaccggcgatgagcggtctcgggaaactcccgaaagtgaccgtgcaaatatgttaggagcagacctccgacggccaaggaggagactgtcctcagggccaggactgggctgggcgcagcctgagccatccgatcccggagtcccgttgccgcctaggcctacgaccttacctttactgattccacccaggatttctatcacaagagcagaaaatgattcctttgaagccgagaacggccctacccccagtcctggacggtcccctctcgacagtcaggcgtccccaggcttggttctgcacgccggtgctgcgacctcccagcgcagagagagctttttgtataggtccgacagcgactatgacatgtctccaaaaaccatgagtaggaattcctccgtgacttcggaagcacacgctgaggatctgatagtgacaccctttgctcaggtactggcatccctcaggtcagtgcgtagcaacttctccctgctgactaacgtgcccgtgcccagcaacaagcgctctccccttggcggaccaactcccgtatgcaaagcaaccttatcagaggagacctgccagcagcttgccagagagacgctggaagagctagattggtgcctcgagcagcttgagacaatgcagacttaccggtcagtctcggaaatggcttcccataaatttaagagaatgcttaatagagagctgacacatttgtctgagatgagtaggtccggtaaccaggttagtgagtacatctccactactttcttagataaacagaacgaggtggagataccttctcctactatgaaggagcgtgagaagcagcaagctcctagaccccgtcctagtcagcctccaccccctcctgttcctcacctccagcccatgtcacagatcaccgggcttaagaagctcatgcactcgaactccctgaacaattctaatatccccaggtttggagtcaagaccgaccaggaggaattgctggcccaagaactggagaacctcaacaagtgggggcttaacattttctgcgttagcgactacgcaggcggaagaagcttgacatgcataatgtatatgatttttcaggagagagacttgcttaagaaattcagaatccctgtcgataccatggtgacatacatgttgacactggaggatcactatcacgccgacgtggcctaccacaactccttgcacgcggcagatgtactccagtctacacatgtgctcctggctacacctgccctagacgctgtcttcaccgatctggagatcctggctgctctcttcgccgctgccatccacgatgtggatcaccccggtgtgagcaaccaattcctgatcaacacaaattctgaactggcgctcatgtataatgacgagagcgtgttagagaatcatcacctggccgtcggctttaaactcctccaggaggataattgcgacattttccagaacctgagtaaacgccagcggcaaagtctccggaaaatggtcattgatatggtcctggcaacagacatgagcaagcacatgactcttcttgctgatctgaagactatggttgagaccaagaaggtgacctcctccggcgtcttgctgctggacaactacagcgatcggatacaagtccttaggaacatggtgcattgcgccgacctgtcaaatcccacaaaacccctggagttgtatagacagtggacggaccggataatggcagaatttttccagcagggtgaccgtgagcgcgagcggggaatggaaatttcccccatgtgtgacaaacatacggcctctgtggaaaagtcccaggtggggttcatcgactatatcgtgcatccactctgggagacatgggctgacttggtgcaccccgacgctcaggaaattctggacactctggaagataaccgggattggtactattctgcaatacggcaatcccctagccctccccctgaagaagaaagccgaggccctggacacccaccactgccagataaatttcaatttgagcttacactggaagaggaagaagaggaggaaattagcatggcacaaataccgtgcacagcccaggaggctctgaccgcccagggcctgagcggagtggaggaggccctggacgctaccatcgcctgggaagcttcaccagctcaagaaagtcttgaggtgatggctcaagaagcaagcctggaggccgagctagaagccgtatacttgacacaacaggctcagagcacaggctctgcgccagttgcccctgatgagtttagtagtcgcgaggagttcgtggtggccgtctcacattcctcaccgtccgcgctggcactgcagtctccactccttcctgcctggaggacattgtccgtctccgagcatgcccctggtctgccgggtttaccctccacagctgctgaggtagaggcccagcgggagcaccaggcagcgaaaagagcgtgcagcgcatgcgctggcactttcggcgaggacaccagcgctctgccagccccaggcggagggggaagcggcggagatccgacctag

SEQ ID NO: 234702 - DNA, 309 bp, synthetic construct
  misc_feature 1..309: note = Description of Artificial Sequence: Synthetic coding sequence
  source 1..309: mol_type = other DNA
atggtggagaccaaaaaggtcacaagcagcggtgtgctactgctggataactacagtgatagaattcaggtgctgaggaacatggtacactgtgcagaccttagcaatcccaccaagccccttgagctctaccgacagtggaccgatcgcattatggccgagttttttcagcagggggacagagaaagagaacgtgggatggaaatcagtcctatgtgtgataaacacaccgcttctgtcgagaaaagtcaggtcggtttcatcgactatatcgttcacccattatgggaaacatgggctgatctctag

SEQ ID NO: 234703 - DNA, 2478 bp, synthetic construct
  misc_feature 1..2478: note = Description of Artificial Sequence: Synthetic coding sequence
  source 1..2478: mol_type = other DNA
atgcggagcggcgctgctcctagagctcggccacgccctccagccctggccctcccgcctacaggaccagaaagcctcactcattttcccttctccgatgaggacacgaggcgtcatcccccaggcagatccgtcagcttcgaggccgaaaacgggccaactccttctcctggaaggtcgcctcttgattcccaggccagccctgggctggtgttacatgccggagctgcaacctcccagagacgggagagttttctctatcgctcagacagtgactacgatatgagccctaaaacaatgagtaggaattctagcgttacctcagaagcacacgccgaggacctaattgtgaccccttttgcccaggtcttggcctcattgaggagcgtgcgatcaaacttttccctgctgacaaacgtgcccgtgcctagcaataaaaggagccccctgggcggacccactcccgtgtgcaaagcaacgctgtctgaggagacatgtcagcagctcgcaagagagacactggaagagttggattggtgccttgagcagctggagaccatgcagacctaccgtagtgtatctgagatggccagtcataaattcaagcgcatgctgaaccgagagctgacccacttgtcagagatgtcaagatccggcaaccaggtttccgagtatattagcactacatttcttgataagcagaacgaggttgagattcccagcccaaccatgaaagaaagagaaaagcagcaggccccaaggcccagaccctcacagccacctccgccacctgtgccccatcttcagccaatgtctcaaattaccggcctgaagaaactcatgcatagcaattcactgaataatagcaatattccccgttttggtgtcaaaacggaccaggaggagttacttgcgcaggagctcgagaatctgaataagtggggcctgaacatattctgcgtgagcgattatgctggagggagatctctgacgtgcatcatgtacatgattttccaagagagagatctgctgaagaaattccggatccctgtcgatacaatggtgacatacatgcttacactggaagatcactaccacgcagatgtcgcttaccacaatagccttcatgctgccgacgttctgcagtccacacatgtgctgttagctacacctgctcttgatgcggtctttacagacctggagattctggcagccctgttcgcagctgccatacatgacgtagatcacccgggagtgagtaaccagttccttataaacacgaactcggaactcgccctgatgtacaatgatgagtccgtcctggaaaaccaccatcttgcagtgggattcaagctgcttcaggaagacaattgtgacatctttcagaatctgagcaagcggcagcgccagtctctgcgtaagatggtcatcgacatggtcctcgcaacggatatgtccaaacacatgacactgctcgcagacctgaagacgatggtggaaactaaaaaggtaacatccagcggggtcctgcttcttgacaactactctgataggatacaggttctgagaaatatggtgcattgcgctgatttgagtaaccccaccaaaccgctcgagctgtaccgtcaatggactgatcggatcatggccgaattttttcagcaaggagacagagagcgggagagaggtatggaaattagtcctatgtgtgacaagcacacagcaagtgttgaaaagagccaggtgggtttcattgattacattgtccatccactgtgggaaacctgggctgatcttgtccatcccgatgcccaggagattctggatacccttgaggataatagagactggtattacagcgccatcagacaatctcctagccctccacctgaagaagagagccgaggccctggtcacccacctctgcctgacaaattccagttcgaattgaccttagaagaggaggaggaggaagaaatcagcatggctcaaattccgtgcacagcccaagaagctctgaccgcccagggtctgtctggcgttgaagaagccctggatgctaccatcgcatgggaagcatctcccgcacaggaaagtctggaggttatggcacaggaagcctccctagaggcagaattggaggctgtctatctgacccagcaggctcagtctacaggatcagctcctgttgccccagacgaattcagctctagagaagaatttgttgtagctgtgtcccatagctctccatccgcactggccctgcagagcccattgttaccagcatggaggacgctgtccgtatccgaacacgccccaggactgccaggactcccttctactgcagctgaggtggaagctcagagggagcatcaagctgctaagagagcctgctccgcatgcgctgggaccttcggagaggatacttctgctttgcccgcaccaggcggtggcggttcgggaggcgatcccacctag

SEQ ID NO: 234704 - DNA, 2211 bp, synthetic construct
  misc_feature 1..2211: note = Description of Artificial Sequence: Synthetic coding sequence
  source 1..2211: mol_type = other DNA
atgaagaagtcacggagtgtgatgactgtaatggccgatgacaacgtcaaggactactttgagtgctctctgtccaagtcgtactctagttcctctaacaccttagggatcgacttgtggcgcggacgacgctgctgttccggcaatctgcagctgcctcccctgtcccagagacagagcgagcgcgctagaacacctgagggtgacggtatctctcgtcccactactcttccgctgacaaccctcccatcgatagcaataactaccgtaagccaggagtgtttcgatgtggagaacggaccaagtcccggacgaagcccgctcgaccctcaggcgtcctcctcggcaggcctggttctgcacgccacattcccaggacattcacaaaggcgtgagtcttttctctaccgatctgacagcgattatgacctaagcccaaaagctatgagtcgtaacagcagcctgccatcggagcaacacggtgatgatctgatcgtgacgccgttcgcccaagtactcgcgtccctgcgaagtgtgagaaataatttcacgatcctcaccaatttacacgggaccagcaacaagcgcagccctgctgcctcccagcctcctgtgagcagagtgaatcctcaggaggagagctatcaaaaactggccatggagacgctcgaagaactggattggtgcctagaccagctcgagaccatacaaacctataggtccgtgagcgagatggcctctaacaagttcaaacggatgttgaaccgggaactgacccatctctctgagatgtctcgcagcggtaaccaggtgtccgaatatatatcaaacacatttttggacaaacagaacgatgtggaaatcccttcacccacacagaaagatagagaaaagaaaaaaaagcagcagttgatgacccaaatctctggcgtcaaaaagctgatgcacagttcatcgcttaacaatacgagcatttctcggttcggtgttaataccgagaacgaggatcacttagcgaaggagctggaggaccttaacaagtggggactcaacatctttaacgtagccggatactcccataatcggccactgacctgcataatgtatgctatttttcaggaacgggatctgttgaaaacctttcggattagcagtgatacttttattacatatatgatgactttagaagatcattaccactccgacgtagcctaccacaactcactgcatgccgcagacgtggctcagtcaactcatgttttgctgagcacccccgcattagatgccgtctttaccgatttggaaattctggccgctattttcgcggctgccatacatgacgtggatcacccaggggtctctaaccagtttttgataaacacaaattccgaattggcactcatgtataacgacgagtcagtgctagagaatcaccatcttgctgttggatttaaattgctccaagaggaacattgcgatatatttatgaatctgaccaaaaaacagcgacaaactctgcgtaaaatggtgatcgacatggttctggctaccgatatgtccaaacacatgtcattattggccgacctgaagacgatggtagaaacaaaaaaagtaacaagttcaggcgtgctgctgctcgataactataccgatagaatccaggtgctcaggaacatggtacattgtgctgatttatccaatccgaccaagagcctggaactttatagacaatggacggatcgcattatggaggagttcttccagcagggcgataaggagcgggagcgagggatggagatttccccgatgtgcgacaaacacactgcatccgttgaaaaaagtcaggtcggctttatcgactatatcgtgcatcccctgtgggagacttgggcagatctcgtgcagccggacgctcaggatatactagacaccctggaggacaaccgtaactggtatcagtccatgatcccccagtctcctagcccacccctggatgaacaaaaccgcgattgccaaggcctgatggagaaatttcagtttgagctgactctggacgaggaagactccgaaggcccagagaaagagggggagggccacagttacttcagtagtacaaagacgctttgcgtaatcgaccctgaaaatcgcgactctcttggagaaacagatattgacatcgcaaccgaggataagagcccagtggatacatag

SEQ ID NO: 234705 - DNA, 2211 bp, synthetic construct
  misc_feature 1..2211: note = Description of Artificial Sequence: Synthetic coding sequence
  source 1..2211: mol_type = other DNA
atgaagaaaagccgttctgtcatgaccgttatggccgacgataatgtgaaagattactttgagtgctctctgagtaagagttattcgtcaagctcaaacactctcggaattgatctgtggagggggaggcgctgttgctccggaaatctgcagctgccgcctttatcgcagcggcagtccgagcgggctcgcactccagaaggggatgggataagtcggccaactactctgcctctaacaaccttaccatccatcgctatcaccaccgtttctcaggaatgcttcgacgtggaaaacgggccatcacccggtcggtcgcctctggatcctcaggcgagttcctctgcaggtttggtactccatgccacttttcccggtcacagccagcgaagggagtcctttctttatcggtcagactcagactacgacctttcccccaaggcaatgtctcgtaattcctcactcccttccgagcagcacggggacgatttaatcgtcaccccttttgcccaggtactggccagcctgcgatcggtgaggaataacttcaccatcctgacgaacctgcacggaacctccaacaagagatcccccgcagccagccaacctcctgtctcacgagtgaacccccaggaggagtcctaccagaaactggccatggagacgctagaggagctggactggtgtttggaccagctagagactatccaaacttacagatcagttagcgagatggcgagcaataagtttaaaagaatgctgaaccgagagttgacccacttaagcgaaatgtctcgttctggaaatcaagtctcagagtacatttctaacaccttcttggataagcaaaacgatgttgaaattccatccccaactcagaaagatcgtgaaaagaagaaaaagcagcagttgatgacccagataagcggggtgaaaaagctcatgcacagctcgtccctgaataacacctcaatatctcgcttcggcgttaataccgaaaacgaggatcatctggctaaggaactggaggatctgaacaagtggggtctgaacattttcaacgtggccggttattcccacaatcgccctcttacctgcataatgtatgcaattttccaggagcgcgatctactgaagactttcagaatcagcagcgatactttcataacatacatgatgacgctggaggatcactatcactctgacgtggcttatcacaactctctccacgccgcagacgtggcacagtcgactcatgtgttattatcgactccagccttggatgctgtgttcaccgatttagaaattctggccgctatcttcgccgcagccatccacgatgtcgaccatcccggtgtcagcaaccagtttctcattaataccaattccgaactagcccttatgtacaacgacgaatcagtgctagaaaaccatcacctcgccgtagggtttaagctgctgcaggaggagcactgtgatatcttcatgaatcttactaaaaaacagaggcagacactgcgtaaaatggtaatcgacatggtcctagccaccgacatgtccaagcatatgtcccttctcgcagatttaaagacaatggtggaaaccaaaaaggtgacttcaagcggagtactactgttggataattataccgacagaattcaggttctcagaaatatggtacattgtgctgacctcagtaaccccactaagagcctcgagctgtataggcagtggaccgaccggataatggaggagtttttccagcagggcgacaaggaacgcgagagggggatggagatcagcccgatgtgcgacaagcacacagcgagtgtcgagaaatctcaggttggattcatcgattacatcgtgcacccattgtgggaaacatgggctgatcttgtgcagccagacgcccaagatatcctggacacattagaggacaacaggaattggtatcagtctatgattcctcagtctccaagcccccctttagacgagcagaacagagactgccagggcttgatggagaaattccagtttgagttgaccttggatgaagaagacagcgagggccctgaaaaggagggagaaggacattcttacttctccagcaccaagactctctgcgtgattgatcctgaaaaccgggattccctgggcgagactgatatcgatatcgccaccgaggacaagtcaccagtggacacatag

SEQ ID NO: 234706 - DNA, 1695 bp, synthetic construct
  misc_feature 1..1695: note = Description of Artificial Sequence: Synthetic coding sequence
  source 1..1695: mol_type = other DNA
atgaaggagcatggcggaactttcagcagcaccggtatcagtgggggaagtggggattcagctatggattccctgcagcctctgcagcccaactatatgccagtgtgtttgtttgccgaggagagctaccagaaactggccatggaaaccctagaagaactagattggtgcctggaccagctcgaaacaatccagacttaccgcagcgtaagcgaaatggccagcaacaagtttaagcgaatgctgaatagagagcttacgcacctttccgagatgtccagaagcggcaatcaggtcagcgagtatatttccaataccttcctcgacaagcagaacgatgttgagatcccctctcccactcagaaggaccgggaaaaaaaaaaaaagcagcagcttatgacccaaatctctggtgtcaagaaactgatgcatagctcctcactcaacaacacgtccatcagcagattcggggtgaatactgaaaacgaggatcacttagcaaaagagctggaggatctgaataagtgggggctgaacattttcaacgtggcaggctacagtcacaaccgaccactgacctgtattatgtacgccatattccaagagcgggatcttcttaagacttttaggatctcctcagatacgttcattacatacatgatgaccctggaagaccactatcacagtgatgttgcatatcacaactctctgcatgccgctgatgtcgcacagtctacccacgtgttactgagtacacccgctcttgacgccgtattcacagacttggagattctcgcggctatcttcgccgcagctatccatgacgtggatcaccctggggtcagtaaccagttcctcatcaacacaaacagcgaactggctctgatgtacaacgatgaatcagttctggaaaaccaccaccttgctgtgggttttaaactccttcaggaagagcactgcgatatcttcatgaatcttactaaaaagcagagacagacattgcgcaaaatggtgatcgatatggtcctggctaccgatatgtcgaagcatatgagcctacttgccgacttaaagaccatggtggagactaagaaggtgacatcatccggggtactgttactggataactacaccgaccgaatccaggtactgaggaacatggtgcactgtgccgacctgtcaaaccctactaaaagtctcgagctgtatagacagtggacggacagaattatggaggagtttttccagcagggagataaagagagagagcggggaatggaaatcagtccaatgtgcgacaagcacaccgcctcagtggaaaagtcacaggtcgggtttattgactacatagtgcatccgctttgggagacatgggccgatctggtgcagcctgatgcccaggacattctggataccctggaggacaatcggaattggtatcaatctatgatccctcaatccccttctccgccactggatgagcaaaaccgggattgtcagggcctgatggagaaatttcagtttgagctaactctggacgaggaggattccgagggccctgagaaggaaggggaggggcactcctacttctcctccaccaagacactctgtgtgattgacccggagaatcgggactcactgggagaaactgacatagatattgcaaccgaagataaatctccggttgacacgtag

SEQ ID NO: 234707 - DNA, 2211 bp, synthetic construct
  misc_feature 1..2211: note = Description of Artificial Sequence: Synthetic coding sequence
  source 1..2211: mol_type = other DNA
atgaagaaatcccgttcagttatgacagtgatggccgatgataatgtgaaagattacttcgagtgctctctgagcaagtcttattcctccagttccaataccttggggattgacctgtggcgaggtcgtagatgttgctccggcaatctgcagctgccgccattatctcagagacagtctgagcgggcacggacccccgagggcgacggcatatctcgtcctaccactctgccattgactaccctgccgagcatcgccatcacaactgtgtcccaggagtgcttcgacgtggagaacgggccttcaccaggtagaagtccgctcgatccccaagctagcagtagcgccggtctggttttacatgccaccttccccggtcattctcagcggagggaatctttcttgtaccgctcagactccgattacgacctgagtcctaaagccatgtccaggaacagctcattgccgtctgagcaacacggagacgatctaatcgtaacccctttcgcccaggttctggcatcactcagatccgtgcggaacaactttactattctgaccaacctccacggcaccagtaataaaagatctccagccgcatcccaacctccagtcagtagggttaatccacaagaggaatcttaccagaaactggccatggagacgctcgaagagctggattggtgcctcgaccaattggagacaatccagacctaccggtctgtttcggagatggcctccaataagtttaagcggatgctgaacagagagcttactcatctatcagaaatgtccagatccgggaatcaggtcagcgagtacatcagcaacacatttcttgataaacaaaacgacgtcgagatccccagcccaacgcagaaggatagggagaaaaaaaagaaacagcaactgatgactcagatttctggcgtaaaaaagctgatgcactcttcttctctgaacaatacttcaatctcgcgattcggtgttaacactgaaaacgaagatcacctggccaaggagctcgaggacctgaacaagtggggactaaatatcttcaacgtggcgggatactcacataaccgccctttaacctgtattatgtatgccatctttcaggagagagatctcttgaagacatttcgcatctcttctgacacgtttattacatatatgatgacattagaggaccactatcacagcgacgtggcttaccataatagcttgcatgcagcagatgtcgcccagtcaacgcatgtcctgctcagcaccccagcactggacgcagtgttcactgaccttgagatcctagccgctattttcgccgcagcgatacatgacgtagatcaccctggggtttccaaccaattcctcatcaacacaaacagcgaactcgctctgatgtataacgatgagtccgtgctcgagaatcaccatctggccgtgggctttaagctgcttcaagaggagcactgcgacattttcatgaatcttacgaaaaagcagcgccagacactccggaagatggtcattgacatggtactcgccaccgatatgagtaaacatatgagtctgctggctgatctaaaaactatggttgaaaccaagaaggtgacctctagcggcgtcctactgctcgataactataccgaccggatccaggtcctccgcaacatggtccactgcgccgacttatctaacccaactaaatctctggagctgtatcgccagtggaccgaccgcatcatggaggagttcttccagcagggcgataaagaacgggagcgaggcatggaaatctccccaatgtgcgataagcacaccgcctcagtggagaaatcccaggtgggtttcattgattatatcgttcaccctctgtgggaaacctgggctgacttagttcagcctgatgcacaggacatcctcgacacgctggaagataaccggaactggtaccagtcaatgatccctcaatcgccctctccacccttagatgagcaaaacagggattgccagggcctcatggaaaagtttcaattcgagctgacactggacgaagaagactcggaaggacccgaaaaagaaggcgagggacactcatattttagctccacaaagactctgtgcgtaatcgatcctgagaatagagactccctgggggagaccgacatcgatatcgccaccgaggacaaatctccagttgacacctag

SEQ ID NO: 234708 - DNA, 2166 bp, synthetic construct
  misc_feature 1..2166: note = Description of Artificial Sequence: Synthetic coding sequence
  source 1..2166: mol_type = other DNA
atgactgccaaggacagttctaaagaactgactgccagtgaacctgaggtgtgtatcaagacatttaaagagcagatgcacctggagcttgagctgccacggctaccgggtaatagacccacatccccaaagatatcacctcgcagtagccctagaaacagcccctgtttcttcagaaaactattggtgaataagtctatcaggcaaaggcggagattcacggtcgcccacacatgcttcgacgtcgagaacggaccatctcccggtcggagccctctcgatccccaagccagttcgtctgcgggtttagtgttgcacgcgacttttccgggacattctcaaagaagagaaagcttcctttaccggagcgattcagactatgatttgtcccctaaggcaatgagccggaattcctccctcccctcagaacagcatggcgacgacctcatcgtaactccattcgcccaggtgctggcctctttgcggtctgtacggaacaactttaccattctgacaaacctgcatggaacatccaataaaagatcccctgccgcttctcagccccctgtttcccgcgtgaaccctcaagaagaaagttatcagaagctggccatggaaaccctcgaggaactggattggtgccttgaccagctggagaccatacagacttatcgcagcgtgtcagaaatggccagtaacaagttcaaaagaatgcttaacagggagctgacccacctgtccgaaatgagccgcagtgggaatcaggtgtctgagtacatctctaacacctttctggacaagcagaatgacgtggagattccgtcaccgactcagaaggaccgagagaagaagaaaaagcagcagctgatgactcagatctctggcgtgaagaaactgatgcatagcagcagtctgaacaatacatccattagtcggtttggagtgaacaccgagaacgaggaccaccttgcgaaggaactcgaggatctcaataagtggggactcaacatcttcaacgtcgctggatattcgcacaatagaccgctgacatgcataatgtacgctattttccaggagagagacttgttgaagaccttcagaatcagttccgacacatttattacatatatgatgacgttggaagaccactaccatagtgatgtggcctaccataactcgctccatgccgcagacgtcgcacagagtactcatgtattgctcagcactcctgcattagacgcggtattcaccgatctcgaaattctggcggctatcttcgcagccgcaatccatgacgtggaccacccaggagtgtcgaatcagttcctcattaacaccaattctgagctcgccctgatgtacaacgacgagtctgtgctggaaaaccatcacctggccgtagggtttaaattgctgcaagaagagcattgcgatatattcatgaaccttacaaaaaaacagaggcaaactttacgtaagatggtaatagacatggttctggccaccgatatgagcaaacacatgtcactgctcgcagatcttaaaactatggtagaaacaaagaaagtcacctcatcaggtgttttgctcctggataattatacagatcgcatccaggtcctgcggaatatggtgcattgtgccgacctttctaatcctacaaagtcgcttgagctttacagacagtggactgatagaatcatggaggagttttttcagcaaggtgataaggagcgggaaagaggcatggagattagccccatgtgtgacaaacatactgcctctgttgagaaatctcaagttgggttcatagattacatcgtccaccctctttgggagacttgggccgatttggtccagcccgatgcccaggacattttagacacactcgaggacaatagaaactggtaccagagcatgattccccagtccccttcaccccctttagatgagcagaaccgggattgccagggactcatggagaaatttcagtttgagcttactctagatgaggaagactcagaaggtcccgaaaaggagggagagggtcatagctactttagctcaactaaaaccctctgtgtcattgatcctgaaaatcgggattcactgggcgaaactgatatcgacatagccaccgaggataagtctccagttgatacatag

SEQ ID NO: 234709 - DNA, 2043 bp, synthetic construct
  misc_feature 1..2043: note = Description of Artificial Sequence: Synthetic coding sequence
  source 1..2043: mol_type = other DNA
atgcaggggccaccagccccagccccagtaccaggaccaggctcccccagaggcagtccaaggggcagtccaggcctgttccgaaaactgttggtaaaccaatcaattcggctgcagagacgcttcactgtggcacaccctctctgcttcgatttggaaaacgggctgagttgcggacgcagggctttagatccccagtccagccccggactgggcagaataatgcaggccccagtaccccatagccagaggcgcgagagctttttatatcggagcgacagtgactacgaactgtctcccaaagccatgtccaggaactctagtgtggcaagtgatctccatggcgaagacatgatcgtcaccccattcgcccaggtgctggcatctctacggacagtcagatccaacgtggctgccttagcaagacagcaatgtcttggggctgcaaagcaagggccagtgggtaacccttcgagttccaatcagttgcctcccgcagaggatactggacagaaactggctttggagactcttgatgaattagactggtgtctcgaccagcttgagacattacagactaggcattccgtgggggaaatggcaagtaacaaattcaaacggatcctgaaccgagaactgacacacctaagcgagacatcgcgttctggcaaccaggtgtccgagtacattagccgcacatttctggaccagcagacggaagtggaattaccgaaggtgaccgctgaggaagcaccacaacccatgtcccgcatctccgggctgcacggcttgtgccactcagcatcactgtcatcagcgacggttccaagattcggtgtgcagacggatcaagaggagcagctggcaaaggagctcgaagacaccaacaaatggggcctggacgtgttcaaggtggccgagctctccggtaataggcccctgaccgctattatcttcagtattttccaagaacgagatctgctgaagaccttccagatcccagccgacacacttgccacttatctcctgatgctggaaggtcactatcacgcgaatgtagcgtatcacaactctttgcacgcagctgatgtcgcacaatctacccacgtgctgttggccaccccagcactggaagcagtatttacagacctagagatccttgcagccctgtttgccagcgctatccacgatgtagatcacccaggcgtgtcgaatcagttcttgataaacaccaattcggagctcgctctgatgtacaacgatgcctccgtgttggaaaaccaccacttagcagtcggatttaagttgctgcaggcagagaattgtgatatctttcaaaacctgagcgctaagcagagactaagccttcggagaatggtgatcgatatggtcctagctacggatatgtctaagcacatgaatcttttggccgacctgaagactatggtcgagaccaagaaggtcacatcactcggagtcttgctgttggataactatagtgatcggatccaggtgcttcaaaatttggttcactgtgcggacctgtctaatcccaccaagcccctgccgctgtacagacaatggactgacagaatcatggctgagttttttcagcaaggcgaccgggaacgggaaagcgggctcgatatctcacctatgtgtgacaaacacaccgcatctgtggagaaaagccaggtcggcttcattgattacatcgcacaccccctctgggagacgtgggcggaccttgtccatcccgatgcgcaggacctgctcgacactctggaagataaccgcgagtggtatcagtctaaaatcccaagatctccatctgacctcactaatccagaacgcgacggaccggacagattccagttcgagctcaccctcgaggaggccgaagaagaggacgaggaagaggaggaggaaggagaggaaacggcacttgcgaaagaggcacttgagctcccggacacggagctcctgagccctgaagcaggcccagaccctggcgacctccccctggataatcagagaacctag

SEQ ID NO: 234710 - DNA, 1281 bp, synthetic construct
  misc_feature 1..1281: note = Description of Artificial Sequence: Synthetic coding sequence
  source 1..1281: mol_type = other DNA
atggcgagcaataagtttaagcgaattctcaacagggaacttactcatctaagcgagacatcgagatctggcaatcaagtgagcgagtacatatcccggacctttttagatcagcagacagaggttgaactgcccaaggtaacagccgaagaggcgcctcaaccaatgtcccggatctcgggcctccacggactgtgtcacagtgcctccttgagttccgctacggtaccacgctttggcgtgcagaccgaccaggaggagcaattagccaaggaactagaggacactaataaatgggggctggacgtatttaaagttgcagaactatcaggtaaccgtccactgacggccataattttcagcatctttcaagctgtgtttacggacctggagattctcgctgctctgttcgccagtgccattcacgacgtggatcaccctggagtcagtaaccagttcctcatcaatacgaactcagaattggcactcatgtataacgatgcctccgtactagagaaccaccacctcgctgtcgggttcaagttgcttcaggctgagaactgtgatatatttcagaatctttctgctaaacagaggttgtcattaaggcgaatggtcatcgacatggttctggctacggacatgtctaaacacatgaatttgctcgccgacctgaagactatggttgagacaaaaaaggtaacaagtctcggtgttctgcttttggataattactccgatcggattcaggttctccagaacctcgtgcattgcgcagaccttagcaatcctacaaagccactgccactgtatcgccagtggaccgacaggattatggccgagttttttcagcaaggagacagggaaagggaaagtggcctggatatatcccccatgtgtgacaaacacacggccagtgtcgagaaaagtcaagtgggcttcatcgattacatagcccaccccctgtgggaaacctgggcggatctcgtgcacccagatgcacaggacctcctcgatactttggaggataaccgcgagtggtaccaaagcaagattccacgaagcccatccgatctgaccaacccagaaagggacggcccagacagatttcagttcgaactgaccctggaggaggcagaagaagaggacgaggaggaggaggaagaaggcgaggagaccgctctcgcaaaagaagcattagagcttccagacaccgagctgctatctccggaagcgggtcctgatccgggagacctgccacttgacaatcaacggacctag

SEQ ID NO: 234711 - DNA, 2139 bp, synthetic construct
  misc_feature 1..2139: note = Description of Artificial Sequence: Synthetic coding sequence
  source 1..2139: mol_type = other DNA
atggagaacttaggggtcggtgaaggcgcagaagcctgctccaggctgagtagaagcagaggcaggcatagcatgacccgagcacccaaacacctttggagacaacctcggagaccgatccgtatccaacaacggttctattccgacccagacaagagtgctggatgccgggaacgcgacctctctcctcggcctgagttacgtaagtctagattatcctggcctgtctcgtcttgtaggcgctttgaccttgaaaacggactgagctgtgggagacgggcacttgatccacagtcatcccctggactgggtcggattatgcaggctcccgtgccgcatagtcagcgacgtgagtccttcctctataggtctgattcagattatgagctgtcacccaaggctatgagcagaaactccagcgtggcctcagacctgcacggagaggatatgatcgtgacgcccttcgcccaggtcctcgcgagcctcagaaccgtgcgcagcaacgtggctgctctggccaggcagcagtgcctgggtgccgcaaagcagggtccggtcggtaatccctccagctccaaccagcttccgcctgcggaggatactggtcaaaaactcgccctagaaacgttggacgagctggactggtgtttagaccagctggagactctccagacgcgacattccgttggggagatggcctccaataagtttaagcggatcctaaatagggaactgacacacttaagcgagacctcaagaagtggaaatcaggtctcagagtatatcagtcgcacatttttagaccagcagacagaagtggagctgcccaaagtgaccgccgaagaggcccctcagccgatgtctcgcattagcggactgcatgggctctgtcactcagcctccctgtcgagtgctaccgtgcccaggttcggggtgcagacagatcaggaagaacagttggcaaaggagctcgaggatactaataagtggggcttagatgtcttcaaggtagctgagctctccgggaacagaccacttaccgctatcatcttcagtatcttccaagaaagggatttgctgaaaacttttcaaattccagcggataccttggcaacctatctgttgatgctcgaagggcactaccacgctaacgtcgcttaccataactctctacatgcagctgacgtggctcagtccacccacgttcttctggccacccccgctcttgaagccgtattcaccgaccttgagatcctggcagccctcttcgcgtccgccattcacgatgttgatcatccaggcgtaagtaatcagtttctgataaacactaattctgaattggcacttatgtacaatgacgcctccgtgctcgagaatcatcacctggctgtcggatttaagctactccaggcagagaattgtgacatcttccagaacctctctgccaagcagcggctgtctctgagacgcatggtgatcgacatggttctggccacagacatgtcaaaacacatgaatttgctcgctgatctgaaaaccatggtcgagactaagaaagtaacgagccttggggttcttctgctggacaattattcagaccggattcaggtcctccagaatctagtgcattgtgcagacctcagcaatccaactaagcccctccccctctaccggcaatggaccgatcgaattatggccgagtttttccagcaaggagatcgggaacgtgagagcggcttagatatctctcccatgtgcgataagcacaccgcctctgtggagaagtcacaggtcgggttcatcgattatatcgctcaccctctatgggagacctgggccgatctagtgcaccctgatgcacaggacctgctggatacactcgaggacaacagggagtggtatcagtctaaaattccgcgaagtccgagcgatcttactaacccagagagagacggacctgatagattccagttcgagctaaccctggaagaggcagaagaggaggatgaggaggaagaagaggagggcgaagagaccgcattagcgaaagaggccctggagctgcctgacacggagctactgagccccgaggctgggccagatcctggcgatctgcctctggacaatcagcggacatag

SEQ ID NO: 234712 - DNA, 1821 bp, synthetic construct
  misc_feature 1..1821: note = Description of Artificial Sequence: Synthetic coding sequence
  source 1..1821: mol_type = other DNA
atgcaggctccagtccctcattcacagagacgcgaaagttttttgtaccggagcgactccgattatgagctgagcccaaaggccatgagcaggaactcatcagtggcctccgaccttcacggtgaagacatgattgtaaccccttttgcacaggttctggcctccctacgaacagtgcgctctaatgtagctgcattagcaagacagcagtgtctgggggctgcaaaacagggcccagtaggcaacccatcttcaagcaaccagctgccacctgcagaagacacaggccagaaactcgcactggaaactctggatgagctggattggtgtctggatcagctcgagaccctgcaaaccaggcactccgtgggagagatggcaagcaacaaatttaaacgtattctgaaccgagagctgactcacctttccgagactagccgttcaggcaatcaggtttctgaatacatttcccggaccttcctcgaccagcaaaccgaggttgagctgcccaaagtgacggcggaggaggcgcctcagcctatgtcgcggatctcaggactgcatggtctgtgccactctgccagtctgtcatcagctacggtcccacgttttggcgtgcagacagatcaagaagaacagctggcaaaggaactggaggacactaataagtggggcctcgatgtgtttaaagtggccgaactgtcagggaatcggcctttgacggcaattatttttagcatctttcaggagcgagacttacttaaaacgttccagatcccagccgacaccttagctacctacctcttaatgctggaaggtcattaccacgctaacgtagcataccacaactccctgcacgctgccgatgttgctcagtccactcacgtgcttctggctactcctgctctggaagccgttttcactgaccttgaaatcctggcggcacttttcgctagcgccattcatgatgttgaccaccccggagttagcaatcagttcctgatcaacacgaacagcgaactcgcactgatgtataatgatgcaagcgtgctggaaaaccatcatctggccgtgggctttaagctcctgcaagccgagaactgcgatattttccagaacctctcagctaagcagagactgagtctgagaagaatggtcattgatatggtcctggctactgacatgagtaagcacatgaatttgctggccgatctgaaaaccatggtggagaccaagaaggtaacctcactgggcgttttgctactggacaactactccgatcggatacaggtactgcagaatctcgtgcactgcgctgacctctcaaacccaacaaagccactgcctctatatcgccaatggacagatcgaataatggcagagtttttccaacagggtgacagagaacgcgagtcgggactggatatatcacctatgtgtgataaacatacagcctcagtcgaaaaaagtcaagtgggcttcatagactatatcgctcatcctctatgggaaacatgggccgatctggtccaccccgatgcgcaagacttgctggatacgctggaagacaatagggaatggtaccaaagcaagataccccgtagtccctccgatctgactaatccagagcgagatggccctgacagatttcaatttgaattaaccctcgaggaggccgaagaagaagatgaagaagaggaggaggagggggaagagaccgcgctggctaaggaggccctggagcttcctgacaccgagctgctttctcctgaagccggtccagacccaggagatttgcctctcgataatcagcggacttag

SEQ ID NO: 234713 - DNA, 2376 bp, synthetic construct
  misc_feature 1..2376: note = Description of Artificial Sequence: Synthetic coding sequence
  source 1..2376: mol_type = other DNA
ggcacacaggccggtctaaggagcggtgcacccagcggtcaccgccaactgctaggggtcgggcctacgctgtcacctagcagcaccttctatcgattctcgacctccggggcagattccagcagcctgagccctccactgccggctctgggccgtacacgtgaacagacactgctgggagctcggagcagaggcagggtgctgctccccgctatacccgacccctttctatggcggatggagaatctgggcgtgggggagggggcagaggcatgttccagactgagccgctcgcggggaaggcactccatgactcgcgctcccaagcacctctggaggcagcccaggaggccaattcgcatacagcagcgtttttattccgaccctgacaagagtgccggatgccgggaacgagatctgagccccaggcctgaacttagaaagtccagattgagttggcccgtatcctcttgtaggaggttcgacttagaaaacgggctaagctgtggtagacgcgctcttgacccccaaagctctcctggattaggtaggataatgcaagcgcctgtgccccattcacagaggagggagagcttcctgtaccgaagtgatagcgattacgagctttctccaaaggcaatgtctagaaatagtagcgtggccagtgacctgcacggggaggatatgatcgttacaccctttgcacaggtattggcttccctgcgcacggtgcgaagcaatgttgcggctttggccaggcagcagtgccttggagctgccaaacagggacccgtggggaacccttcatcctcgaaccagctaccacctgccgaggataccggacagaaactcgctttggaaactctcgacgagctggactggtgtttagatcaacttgagacccttcaaactcgacattccgtgggcgagatggcaagcaataagtttaaacgaattctgaaccgcgaactcactcacctcagtgagacctctcgctcaggaaaccaggtctctgaatacattagtaggaccttccttgaccagcagactgaagtggagcttccgaaggtaaccgcggaggaggctccccagccaatgtccaggatttctgggctgcatggcttgtgtcacagcgcctcattgtcctcagccaccgtcccgcgttttggcgtgcagaccgatcaggaagagcagctggccaaggagctcgaagacacaaacaaatgggggctcgatgtgttcaaagtggctgagctcagcggcaataggcccctgactgctattatcttctctatcttccaggagcgcgacttactgaagaccttccagattcccgctgacaccctcgccacctacctgctgatgttagagggccattatcacgctaatgtggcctatcacaattcacttcacgccgcagatgtggcccagagtacacacgtgctgctggctacgcccgctttggaagccgtctttacagatctggagattctggcagctctgttcgcaagcgccattcatgatgtcgatcatccaggggtgtcgaaccaattcttgatcaacacaaattctgagctcgccttaatgtataacgatgcctccgttctagaaaatcatcatttggcagtggggttcaagctgctgcaggcagagaattgcgacatttttcaaaacctgtcggccaagcagcgtctgtccttgcgtagaatggtaatcgacatggtgttggccaccgatatgagtaagcacatgaacctcttagcagatctcaaaactatggtggagaccaaaaaagttacatcccttggagttctgctgctggacaattattcggaccgcatacaggtgctgcaaaacctagtgcactgcgccgacctgtcaaacccaacgaagccattacctctgtatcggcagtggaccgatcggatcatggcagagttctttcagcaaggggaccgggaacgcgagtcgggattagacatcagccctatgtgcgacaagcacacggccagtgtggagaaaagccaggtgggtttcattgattatatagctcacccgctgtgggagacttgggctgacctggttcacccggacgctcaggatttgctggatacattggaagataacagggagtggtaccagagcaaaattcctagatcacccagtgatctgacgaacccggagcgggatggccctgaccgctttcaatttgagctcacactggaggaagccgaggaagaagatgaagaagaggaagaagaaggtgaagagactgcattagcgaaagaggcgctggaactgcctgacactgaactgctgagtcctgaggcagggcctgatccaggggatctcccactggacaaccagaggacctag

SEQ ID NO: 234714 - DNA, 2103 bp, synthetic construct
  misc_feature 1..2103: note = Description of Artificial Sequence: Synthetic coding sequence
  source 1..2103: mol_type = other DNA
gctgttcaaaagaggagtcgggctgcaggagcgcgatctagccttcacgctgttctggctatgcagggaccaccagcacccgctcccgtgcccggaccaggttcccctcgcggatcaccccgtggctcccctgggctcttcaggaagctccttgtaaatcagagtataaggctgcagagacgatttacagtagcgcacccactgtgcttcgacctggagaatggcttgagctgtgggcgaagagccctcgatcctcaatcttcacctggcctgggcagaataatgcaggctccggttccccacagccagagaagagaaagtttcttatacagatccgacagcgattatgagttatccccgaaggcaatgtccagaaactcttctgtggcctctgatctacatggtgaagatatgattgtcactccattcgctcaagtgttagccagcctaaggaccgtccggagtaatgttgcagcgttagctcgccagcagtgcttaggtgctgcgaaacaggggccagtaggcaatccatcatcatctaaccagctgcctcctgccgaagacactggtcagaaactggccctagaaaccctggacgagctggactggtgtttagatcagctggaaaccttgcagacacggcactccgtgggtgaaatggcctctaacaagttcaaaagaattctaaatagagaactcacccacttgtctgaaactagccggtctgggaaccaagtgagtgagtatattagccggacttttctcgaccagcagaccgaagtggaactgccaaaagtgaccgctgaagaagcaccgcagcctatgagtagaatctctggattacacggcctttgccacagcgcctcattgtcttctgccacagtgcccaggttcggcgtccagactgaccaagaggagcagctggcaaaggagctggaggataccaacaagtggggccttgatgtctttaaggtagcagagctaagcggcaatcggcctctaaccgctatcattttctcaatctttcaagagcgagacctgctgaagacatttcaaatcccagccgacaccttggctacctatcttctgatgttagagggccactaccacgccaatgtggcatatcacaattcactgcacgctgctgacgtggcccaatcaacgcatgtgctgcttgctacacccgctttggaggccgtattcactgatctcgagatcctcgccgctctgtttgctagcgcaatccacgatgttgaccacccaggtgtgtctaaccaattccttatcaacacgaactctgaactcgccttgatgtacaacgacgcgtctgtgctcgaaaaccatcatttagctgtgggattcaagctgctccaggcggaaaactgtgacatctttcagaatctgtcagccaagcagaggttgtcgctcaggaggatggtgatcgatatggtgctggccaccgacatgagtaaacatatgaacctgttggccgacctaaagaccatggtggagactaaaaaagtgactagccttggggtgcttctgctcgataattattctgaccgcatccaagtcctgcagaatttagtacactgtgcagacttgtcaaatccgaccaagcctctgcctttgtaccgccaatggacagatagaattatggctgaattttttcagcagggcgaccgcgaacgcgaaagcggcctggatattagtcccatgtgtgataagcataccgcttccgtcgaaaagtcccaggtgggctttatcgactatatcgctcatcccctgtgggaaacatgggctgacctagtgcatccagacgcccaggacctcttggatacattggaggacaacagggagtggtaccagagtaagatcccgagaagtccgtccgatctgactaatccggagagagatgggccagatcgatttcaatttgagttaacacttgaggaagctgaggaagaagacgaagaggaagaagaggagggagaggagacagcccttgctaaggaagctctggaactcccagataccgaactcctcagtccagaggccggacctgatcctggagatttgccgctggataaccagcggacctag

SEQ ID NO: 234715 - DNA, 1446 bp, synthetic construct
  misc_feature 1..1446: note = Description of Artificial Sequence: Synthetic coding sequence
  source 1..1446: mol_type = other DNA
atggcatcaaacaagtttaagcgcatcctcaaccgggagttgacgcatttatcggaaaccagtagatccggtaatcaggtgagcgagtatatctctcgcactttcttagatcagcagactgaggttgagctccctaaagtaaccgccgaagaggccccacaaccgatgagtcgcatcagcgggctgcacgggctttgtcacagcgccagcttgtcaagtgctaccgtcccaagattcggggtgcagacggatcaggaagaacagctggccaaggaactggaggatactaataagtggggtctagacgtgttcaaggtcgcagagttatcaggtaatcggccactgaccgcaatcatattcagcatttttcaagaacgcgatttattgaaaactttccaaatccccgctgacacactggctacctatttgctcatgctggagggtcactaccatgccaacgttgcctaccacaatagcttgcatgccgcagatgttgcccagagtacacacgtgctgttggccacccctgccttagaggccgtattcaccgacctggaaatcctcgctgccctgttcgcatctgctatacacgatgtagaccaccccggagtgtctaatcaattcctgattaataccaattccgagctggcgttaatgtataacgacgcctcagtgctcgagaaccatcaccttgcagttgggttcaagctgcttcaggccgaaaattgcgacatcttccagaatttatcagccaagcaaaggctatcattaaggcgtatggtcatcgacatggttctcgccaccgatatgtccaaacacatgaacctgctcgcggacctcaagaccatggtcgagacgaaaaaggtaacctccctgggcgtcttgctgctagataactactccgatcgcattcaggtgctgcaaaatctggtccattgcgcagatctgagcaatcctactaagccactcccgctgtatcgacaatggactgaccgaattatggccgagttctttcagcagggagaccgcgagcgtgagagcggattagatatctccccgatgtgcgacaaacatactgcttccgtcgagaagtcccaggttggtttcatcgactacatcgcgcatccactgtgggagacatgggctgacctagtgcacccagacgcacaggatctgctcgacactctggaagacaaccgggagtggtatcagtcaaaaattcctcgatccccttcggacctgactaatccggagcgggatggacccgatcgtttccagttcgaactcacactggaagaggccgaagaagaggacgaggaggaggaagaagaaggggaggagaccgcactggccaaggaagccctggagctgcccgacacagaactcctgagccctgaggctggaccggacccaggcgacttaccattggacaaccagaggacctag

SEQ ID NO: 234716 - DNA, 2466 bp, synthetic construct
  misc_feature 1..2466: note = Description of Artificial Sequence: Synthetic coding sequence
  source 1..2466: mol_type = other DNA
atgcaaaggtatagaggtagacagacggtgtttggagccggagtgttgggtggagtctcatccgctccgagcttcaacactccatcccctcgtagctcccctcttttctacccttccgcaccttccggccacaggcaactcctcggagtgggacccactctgagtcctagcagtacgttctataggttttctaccagcggcgctgattcctccagcctgagcccgccattgcctgcacttggacggacaagagagcaaaccctcctgggcgcacgatcacgcggaagggtactcctgcccgctatcccagaccctttcttatggcggatggaaaatctgggagtcggagaaggagccgaagcgtgctcccgcctgagcagatcacggggtaggcacagtatgacacgggcacccaagcacctatggcgccagcctcgtagaccaatcagaatccagcaacggttctactcagaccccgataaatctgctgggtgtcgggaacgggacctgtcccccagacctgagctgagaaagagccgactctcttggcctgtttcatcttgtcgacgcttcgatttggagaatggcttatcctgtggacggagagcccttgaccctcagagctcaccagggctgggtaggataatgcaagccccagtgcctcactcccagcggagagagtcctttctgtaccgctcagatagcgattacgagctgtcaccaaaggctatgtcccgaaactctagcgtcgcctccgatctacacggagaggacatgatcgttactccttttgcgcaggttctggcatcactgagaaccgtccggtccaacgtcgccgcactggctagacaacagtgtctcggcgctgctaagcagggtcccgttgggaatcctagctcaagcaatcagttgcctcccgctgaggataccggacaaaagctggccttggagaccttagatgagctcgactggtgtcttgatcagttagagaccctacagacacgccattcagtgggagagatggcgagcaacaagttcaaacggattctgaacagagaactgactcatctgagcgagacctccagatcagggaatcaggtctctgaatatatctcacgcaccttcctggaccagcagaccgaggtcgagcttcctaaagtgacagctgaggaagctccccagccaatgtcgcgcatttctggcctccacggcctttgccacagcgcatccttgtcaagtgcgaccgtgcctcggttcggagtgcagacggaccaggaagagcagttagctaaagagttagaggataccaataagtggggactggatgttttcaaggtggcagagttgagcggtaacaggccactgacagccatcatattctccattttccaagaaagagatctgctgaaaacctttcagatacctgctgacacactcgccacttacctgcttatgttagagggacactaccacgctaacgtggcctatcacaactcgctacacgccgcagatgtcgctcaatctacccatgtgttgttggccactcctgctttagaggccgtctttactgatctagagattctagctgccctgtttgcctctgccatacatgacgttgatcacccaggcgtctctaatcaattcctcatcaacactaactcagaactggctttgatgtataatgacgctagtgtcctcgagaatcaccaccttgccgttggattcaagcttctccaggctgaaaactgtgatatctttcaaaatctctcggcaaaacaacgtctatcattgagacggatggtgatcgatatggtgctagcaaccgacatgtccaaacatatgaatcttctcgcagatctgaagactatggtcgagaccaaaaaagtgactagcctaggcgtcctgctactagataattacagtgatcgcatccaggtgctacagaatctcgtccattgcgcagatctcagtaacccgactaaacccctccctctctacaggcaatggaccgatcggattatggcagagttttttcagcagggcgatagagagcgggaatctggattggacatctcccctatgtgtgataaacatacagccagcgtagaaaagtcccaagttggcttcattgattacatcgcccatcccctgtgggaaacctgggccgatcttgtccaccctgacgcccaggatttactggatacactcgaagataatagggagtggtatcagtcgaaaatcccacggtccccttccgatctcactaatcctgaaagggatggccctgacaggttccagtttgagctcacactcgaggaagccgaagaggaagatgaagaagaagaagaggagggagaggaaaccgctctggctaaagaggcattagaactgcccgatacagagctgctgtcacctgaagcaggcccagaccctggcgaccttcccctggataatcagagaacctag

SEQ ID NO: 234717 - DNA, 1557 bp, synthetic construct
  misc_feature 1..1557: note = Description of Artificial Sequence: Synthetic coding sequence
  source 1..1557: mol_type = other DNA
cctctgcgaattcggccactactgcctactgcctaccacctgttgcccactgggccaggccagtccgccgataggtccgagcagcggggagggccatgcccacctgctatgcccagaagctcccagttcaaacgcatattaaacagagaactgactcatctgtccgaaacttcccggagcggcaatcaagtgtctgagtatatttctcgcacatttctcgatcagcagactgaggtggagctccccaaagtgacagcagaagaagctcctcaacccatgtcacgaatatccgggctgcacggcctgtgccactccgcttccctgagctccgccactgtgcccaggttcggtgtccagacggatcaagaggagcagctggcaaaagaactggaggacaccaacaaatgggggttggacgtattcaaggtagccgaactctccggaaaccgtccgttaacggctatcattttcagcatttttcaggagagggatctcttgaagacgttccagatccctgcagataccctcgctacatacctcctcatgctggagggccactatcacgcgaatgtggcgtatcacaactctctgcatgctgccgatgtggcccagagcacgcacgtactgttagcaactcctgctctcgaggctgtcttcacagatctggagatactagccgctctgtttgcttccgcaatccatgatgtcgaccaccctggcgtgtctaatcagttcctcattaacacgaattctgaactggcactgatgtacaacgatgcaagcgtgctggagaaccaccacctcgcagtgggtttcaagttgctgcaggccgaaaactgcgacatctttcagaacttatccgccaagcagaggctgtccctgaggcgtatggtgattgatatggtgttggccaccgacatgtcgaaacatatgaatctcctcgctgacctaaaaacaatggtggaaacaaaaaaggtcacttccttgggagtactcctgctggacaactattcagatcgcatacaggtccttcagaatctggttcactgtgccgacctgagcaacccaaccaaacctctgccactgtacagacagtggactgatagaattatggccgaattcttccagcagggagatcgtgagcgggaatccggactggacattagtcctatgtgcgataaacatacggcgtccgtcgaaaagagccaagttggattcattgattacatcgcacaccctctctgggaaacttgggcagatttggtgcaccctgacgcccaggacctactggacacgctggaggataatcgggaatggtatcagtccaaaatccccaggtctccatctgatcttacgaaccccgagcgcgatggacctgacagatttcagttcgagctcacgttggaggaggcagaggaagaagatgaagaggaggaagaggagggagaagaaaccgcactagctaaggaggcactggaattgcctgatacagagcttttgtcaccagaggccggacccgatcccggagacctccccctcgataatcagcgcacttag

SEQ ID NO: 234718 - DNA, 6723 bp, synthetic construct
  misc_feature 1..6723: note = Description of Artificial Sequence: Synthetic coding sequence
  source 1..6723: mol_type = other DNA
atggaacagacgtggacaagggactatttcgccgaagatgacggcgaaatggtccctcggaccagccacactgccgctttccttagcgataccaaagatcgcggtcctccagtgcagtcacagatttggcgctccggcgaaaaagttccgttcgtgcaaacctactccctgagggcctttgaaaaaccccctcaagtccaaacacaggctcttcgggatttcgaaaaacatctgaatgaccttaagaaggagaacttcagtctgaagctccgaatatatttcctcgaggagcgcatgcagcagaaatatgaggcatcacgagaggacatttataaacgaaacattgagctgaaagtggaagtggagtccctaaagcgcgagcttcaggataagaaacagcacctggacaagacttgggcagacgtcgagaacctcaactctcaaaacgaggcggaactccgacggcagttcgaggagagacagcaggaaaccgagcacgtctacgaacttctggaaaacaaaatccagttgcttcaagaggagagccgactcgctaagaacgaggcagcgagaatggccgctctcgtcgaggcagagaaggaatgtaatttggagctgtcagagaagctcaagggggtgacgaaaaattgggaggatgtgcccggtgatcaagtcaagcctgaccagtataccgaggctttggctcagagggataagcgtatcgaggagttgaatcagagcctcgcggctcaggagcgcttggttgagcagctcagtcgtgaaaagcagcaactgctgcacctgctcgaggagcccacaagcatggaagtccagcccatgaccgaggagttgctgaaacaacagaaactaaactctcacgagacaaccatcacgcaacagagcgtaagcgactcacacctggccgagttacaggaaaagattcaacagaccgaggcgacaaataaaatactgcaggaaaaattgaacgagatgtcttacgaactcaaatgtgcccaggaatcctcccagaagcaagacggtaccattcagaatctcaaggaaaccctgaagtctcgcgaaagagaaacagaggaattgtatcaggtgatagagggccagaacgataccatggctaaattacgcgagatgttgcatcagagccaactcgggcaattgcacagctccgagggcacgagtcccgcacagcagcaggtggcacttctggatctgcaaagcgcactattttgcagtcagctggaaatccagaagctgcagcgggtcgtgaggcagaaggagaggcagttggcagatgctaagcaatgtgtccagtttgttgaggctgctgcccacgaaagcgaacagcagaaggaagccagttggaaacataatcaggagcttcgaaaggccctccaacagcttcaggaggaactgcagaacaagagtcagcagctacgagcttgggaggccgagaagtataatgagatcagaacccaagagcagaatatccagcatctgaatcactctctcagccataaggaacaactcttgcaggagtttagggaattattacagtatcgcgacaatagcgacaaaactcttgaggccaatgagatgttgctggagaaactcagacagcgtatccatgataaggccgtggctctggagagggcaattgacgaaaaatttagcgcgctcgaggagaaagagaaggagcttcggcagctgcgactagccgtccgtgagcgggaccatgacctagagagacttagggacgtactctctagcaatgaggcaacaatgcagtcaatggagtcactcttaagggccaagggactggaggtggaacagctgtctacaacctgccagaacttacaatggttgaaggaagagatggagaccaaatttagccggtggcagaaggagcaagaatccattatacaacagttacaaacttctctacatgataggaacaaagaggttgaagacctgtccgcaacgcttctgtgcaagcttggccctggtcaatctgagattgccgaggagttatgccagcggctacaaaggaaggaacgcatgctgcaggacctcctctctgaccgaaataagcaggtgctggagcacgaaatggaaattcaggggctcttgcaatccgtaagtaccagggaacaggagtcccaggcagccgcagaaaagctggttcaggcactgatggagcgaaactccgagctgcaagcactgcggcagtacctcggaggccgagactccctgatgagtcaagcacccatctcaaaccaacaagccgaggtgaccccaacaggttgcctcggcaagcaaacagaccagggctcaatgcagatcccgtctcgggacgactccacatccttgaccgcaaaagaggatgtctccatccctaggagtacattgggtgacttagatacagtcgctgggctcgagaaggaactctctaacgccaaggaagaattggaattaatggccaaaaaggagcgcgagagtcagatggaactgagtgcattgcaatccatgatggctgtgcaggaagaggagctacaggtgcaggcggctgatatggagtccctgacaagaaatatccagataaaggaggacttgataaaggatctgcagatgcagctggtagaccccgaagacatacctgctatggaaagactcactcaggaagtgctgctcctgagggagaaagtagctagcgtggagtcgcagggtcaggagatctcaggcaaccgacggcaacagctgttgctcatgctggaagggctggttgacgagcgcagccgcctgaatgaagcactacaagctgaacggcagctgtattcctcgttagttaagttccacgcccaccccgaaagtagtgagcgtgacaggacactgcaagtggaactggagggcgcacaagtcctcaggtctcgcctggaagaagtactgggtaggagtctagaaaggctgaacagattggagacccttgcagcgataggcggagccgctgccggagatgacacagaggatacgagtacagagttcacagacagtattgaagaggaagccgctcatcattctcatcagcagctcgtcaaggtggccctggagaagtccttggccaccgtcgagacccagaacccttccttcagcccgccttccccgatgggcggtgactcaaataggtgcctacaggaggaaatgctgcatcttcgtgccgagttccaccaacacttagaggagaaacggaaagctgaggaggagcttaaagaactcaaggcccaaatagaagaggccggattctcaagcgtgagccacatccggaatactatgctgagtctctgcctggagaatgccgaactgaaagagcaaatgggagaggccatgtcagatggatgggaaattgaagaagacaaggaaaaaggtgaactcgataatcagagtcagcctcgcgacccaggccctcaatccgccttcagtctcccaggatcaacccaacacctgcgctcccagctgtctcagtgcaagcagcgctatcaggacctccaagagaagctgctgctgagtgaggcaactgttttcgctcaggcgaatgaattggagaagtaccgggtgatgctgactggggagtctctggtgaaacaggacagcaagcagattcaggtggatttacaggacttaggctacgagacttgcgggcgatccgagaacgaggccgagcgtgaggagactacatcaccagagtgcgaggagcataattcccttaaagaaatggtgctcatggaagggttgtgctctgaacagggcaggcgcggatccacactggcttccagtagtgagaggaagcccctagagaatcagcttgggaaacaggaggaatttagggtttacggaaagtccgaaaacattctcgtgctgagaaaagacatcaaggacctaaaggcacagctacagaatgcaaataaggtcattcagaatttgaagtcccgggtgaggtccctgagtgtgaccagtgactattccagctcactggaaaggccctggaagctgcgggctgtgggcaccttggagggttccagcccccatagcgtgccagacgaggatgaggggtggctctcagatggtaccggggctttttacagtccaggccttcaggccaaaaaagatctggagagcctgattcagagagtgagtcaactcgaggcccaattgcccaagaacggcctcgaagagaaacttgcggaggagttacgatctgcctcttggccagggaaatacgactctctcatccaggaccaggccagagagctgtcctatctgagacaaaaaatcagggagggacggggaatctgctacctgatcacccgtcacgcgaaagacacagtgaaatcttttgaagatcttctgagatccaatgatatcgattactatcttggccagagcttccgagagcagctggctcaggggtcacagctgactgagagactgacaagtaaactcagcaccaaggaccataaatctgaaaaggaccaggccggtctggaacctctcgccctgcggctttcaagagaactgcaggagaaggagaaggtaattgaggtgctccaagcaaagctggacgcacggagtctgactccatcttctagccacgcactgtccgatagtcacagaagtccttcctccacaagtttcttaagtgacgagctcgaagcctgttcagatatggatatcgtgagcgagtatactcattacgaggagaaaaaagcaagtccgtctcacagcgactctatccaccactctagccactccgctgtcttatcttccaagcccagcagcacctcagcaagtcagggcgctaaggccgagagcaactcaaaccccataagtctgcccaccccgcagaatacaccaaaggaagcgaatcaagcacacagcggcgcttctacggtaccacccgcatctaccgctaccttattatcaaacgatctggaggcggacagtagctattatttgaacagcgcccagccacactctcctcccagaggaacaattgagctcggcaggatcctggaacccggttacctcggctcatcaggtaagtgggatgtcatgcgaccccagaagggttccgtgtcgggggatctatccagcggatctagcgtgtatcaactgaacagcaagcccacaggtgcagacctccttgaagaacatctgggggagatcagaaatttaaggcaacggctcgaagaatccatctgtatcaacgatcgactccgtgagcaactcgagcatagactgacgagtaccgcacgtggacgcggaagcacgagtaatttctatagccagggactagagtcaatcccacagctctgtaatgaaaaccgggtcctgagagaggacaatcggagactgcaagcacagctgtcacatgtgagccgggagcactctcaagagactgagtcattaagggaggccctgctttcttctaggtcccatctgcaagaactggaaaaagaactcgagcaccagaaggtcgagcggcagcagcttctcgaagatcttcgggagaagcagcaagaggtgcttcactttcgcgaagagaggttatccctgcaggagaatgacagtcgcctacagcacaaactagtgctgttacagcaacaatgtgaagagaaacaacaactctttgagtcgcttcagtcagaactgcagatctacgaagccctgtatggtaatagtaaaaagggtctcaaagcttacagcctggatgcatgtcatcagattcctctctccagcgacctgagtcacctggtggcagaagttagagcgctgagagggcagcttgaacagtcaatacagggtaataattgcctgaggttgcagcttcaacagcagctggaaagtggagccggtaaggcctccctatcaccttcctcgatcaaccagaactttcctgccagcacagacccaggaaataaacagctgctgctgcaagatagcgcagtgagccccccagtcagggacgttgggatgaattcgccggctttggtgtttccaagtagcgcatctagcacaccaggctccgagacccccataatcaatagagctaatgggctgggtttggacactagccccgtgatgaagaccccacccaaacttgagggcgacgcaactgatggcagtttcgccaacaagcacggcaggcatgttattggccatatcgacgattacagcgctctgcggcagcagattgccgagggcaaactactcgtgaagaaaattgttagcctcgtacgctccgcatgctcgttccccggactcgaggcccagggcactgaagtcttaggtagcaaagggattcacgagttgagaagctccacaagcgcgctgcaccatgcactggaagagagcgcctcactgcttacaatgttctggagggccgcactcccaagcacacacataccagtcctccctggtaaagtcggagagtcaaccgagagagagctcttagaattgcgtactaaagtgagtaaacaggaaaggctgttgcaaagcaccaccgagcatctgaaaaacgctaatcagcagaaagaatcaatggaacagtttattgtatcccagctcactcgaactcatgacgtgctgaagaaagccaggaccaacctggaggtgaagtccctgagagctctcccatgtacgcctgctctgtac

SEQ ID NO: 234719 - DNA, 3399 bp, synthetic construct
  misc_feature 1..3399: note = Description of Artificial Sequence: Synthetic coding sequence
  source 1..3399: mol_type = other DNA
atgaaggagatctgtagaatttgcgctagggagctctgtgggaatcagaggaggtggatcttccataccgctagcaagctgaatcttcaagtgctgctgtcacacgtgcttggcaaggacgtacccagggacgggaaagcggagttcgcctgttcaaagtgcgcattcatgctagaccggatataccggtttgatacagtgattgcccgtattgaggctcttagtattgagcggttacaaaaactgcttctcgagaaggataggctcaagttttgtatcgcctctatgtatagaaagaacaatgacgattccggcgcagagattaaagctggcaatgggactgtcgacatgtccgtgctgcctgacgcacgctactctgcactgctacaggaggacttcgcctatagtggattcgagtgctgggttgaaaacgaggatcagatacaggagccccatagctgtcacgggagtgaaggacctggcaacagacctcggcgttgtcgcggttgcgcggctctccgcgttgctgattcagactatgaagccatatgcaaagtgcccagaaaagttgcgcgatcaatcagttgtgggccttctagccgatggtctacctccatttgtacagaagagccggctctgtctgaggtgggtccccctgacctggccagtactaaggtgccaccggacggggagtctatggaagaagaaaccccgggatcatccgtagagtccctggacgccagtgtccaggcctcccccccacaacagaaagatgaggagacggagagaagcgcaaaggaactgggcaagtgcgactgctgctccgatgaccaggctccacagcatggttgcaaccacaaactggaattagctttgtccatgattaaaggcttggattacaagccaatccaatccccacggggttcaagactccccatccccgtgaagagcagcttgcccggtgcgaagccaggccctagcatgaccgacggcgtgtcttccggcttcctcaaccggagcctgaaacccttatataagacgccggtatcctaccccctggagctatccgatctgcaggaattgtgggatgacctgtgtgaggactaccttcctctgcgcgtccagcctatgaccgaggagttactgaagcagcaaaaacttaactcacacgagacgacaattacccagcagtcagtcagcgattcccatcttgctgaactgcaagaaaagatccaacagactgaggctacgaacaagattctccaggagaagctcaatgagatgagctacgaactgaagtgtgctcaggaaagcagccagaaacaagacgggacgatccaaaatctgaaagaaactctcaaatctcgggagcgagagaccgaggaactgtaccaggtcattgaaggccaaaacgacacaatggctaaactgcgtgaaatgctgcaccagtcccagctgggccagctgcatagctccgaaggcaccagccccgctcagcagcaggtggcactccttgatttacaaagcgccttattttgcagccagctggagatccagaaattacaaagagtggtgaggcagaaggaacggcaacttgcagacgctaagcagtgcgttcagttcgtagaggccgctgcccacgagtccgagcagcagaaagaagcatcgtggaaacacaatcaggaactgcggaaagcccttcagcagctgcaagaggaactgcagaataagagccagcagttacgggcttgggaggcggaaaaatacaacgagatacggacgcaagaacagaatattcaacacttgaaccatagcctaagccataaggaacaactgttgcaggagtttagggaactcctgcagtaccgcgacaattccgacaagactctcgaagcaaacgaaatgctgttggaaaagctccgccagagaatacacgataaagccgtggcactggagcgtgccattgatgagaagttctcagccctagaggagaaggagaaggaacttcgccagctaaggctggccgtaagagaaagggatcatgaccttgagcgactgcgagatgtgctctcgtctaatgaggctaccatgcagagtatggaatccttgctcagagcaaaaggactggaggttgaacagctgtctaccacctgtcagaacctgcagtggcttaaggaggaaatggaaactaagttttcccgatggcagaaagagcaagagagcattatccagcagttgcagacttcgctgcatgaccgtaacaaagaggtggaagacctgtctgccaccctgctctgcaagctgggacctggacagtccgaaatcgctgaagagttgtgccagcgcttgcaaaggaaggagaggatgcttcaggacctcttaagtgatcgcaataaacaagtgctggagcacgagatggagattcagggactgcttcagagtgtctcaactcgcgaacaggaaagccaggctgcagctgagaagttggtgcaggcccttatggaaagaaattctgaactgcaggctctccgtcagtatctaggtgggcgagattcactgatgagccaggcccctatctctaatcagcaggctgaggtgacacctactggctgcctgggcaaacagactgaccaagggtcaatgcagatcccttctagagatgactcgacgagtctgactgccaaggaggacgtgtccatcccacggtccacgttgggagacctcgacaccgtggcaggcttggagaaagagctctctaatgcaaaggaggaactagagctgatggctaaaaaagagcgggagagccaaatggaattgagcgcccttcaatccatgatggcagttcaagaagaagaactccaggtgcaggctgcggacatggaaagcttgactcgcaacatccagataaaagaggacctgattaaagatctccagatgcaactggtcgatcctgaggatatcccagccatggagcggttgacccaggaggttctgctgttgagagagaaagtcgcctccgtcgaatctcagggtcaggaaatctccggaaacaggcggcagcagctgctcctcatgctggaagggctagtggacgagagaagcaggttgaacgaggccttgcaggccgagagacagctttactcctctctggtgaagttccacgcccaccccgaatcctcagagagggatcgcaccttacaggtagaacttgagggagcccaggtactccggtcacggttggaggaggtgcttggcaggtccctcgagcgccttaataggcttgaaacattagccgctatcggtggggcagcagccggagacgatactgaggacacctctaccgaattcaccgactcaatcgaggaggaggctgctcatcacagccaccagcagctttag

SEQ ID NO: 234720 - DNA, 522 bp, synthetic construct
  misc_feature 1..522: note = Description of Artificial Sequence: Synthetic coding sequence
  source 1..522: mol_type = other DNA
atgagtaacggctatagaaccctatctcagcatctcaacgatctgaagaaggagaacttctcccttaagttgcgcatttacttcctggaagagcgcatgcagcagaagtatgaggcttccagggaggacatctacaaacgcaatattgagctgaaggtggaggtggaatccctgaagcgagagctccaggacaagaagcagcacttggataagacttgggcagatgtggagaacttgaactctcagaacgaggctgaactcagacggcaattcgaggagcgacagcaggagaccgaacacgtgtatgaattgctcgaaaacaagattcagctgctgcaggaggaatccaggctcgcgaaaaatgaggccgctcgcatggccgctctggtcgaggctgagaaggagtgcaatctcgaactatctgaaaaactcaagggcgtgaccaagaactgggaggacgtgcctggagaccaggtcaaacccgaccaatacactgaggctttggcccagcgcgataagtag

SEQ ID NO: 234721 - DNA, 933 bp, synthetic construct
  misc_feature 1..933: note = Description of Artificial Sequence: Synthetic coding sequence
  source 1..933: mol_type = other DNA
atgaaagggactgattcaggatcctgttgccggagacggtgtgattttggctgctgttgcagagcctctaggcgagctcactacaccccatacagaagcggagatgctaccaggactccacaatcaccaagacagactccctctcgagaacgtcggagacctgagcccgctgggagctgggcagcggctgccgaagaggaagaagcggctgccgctgccaccccctggatgcgggactatttcgccgaggatgacggtgagatggtaccaaggactagccacaccgcagcctttctgtccgacaccaaagacagaggccctcctgtccagagtcagatctggaggtcaggtgagaaagttccctttgtgcaaacctatagtttgcgagcattcgaaaaacctccacaggtccaaacccaggcactacgggattttgaaaaacacctgaatgacctgaagaaggagaacttcagcctgaagctgcggatctactttctggaggagcggatgcagcagaagtatgaggcgagccgggaggacatttataagagaaacatcgaactgaaggtggaggtggagtcactcaagcgagagttgcaggataagaaacagcacctcgacaagacctgggcagatgtggagaacctgaactcccagaacgaggcagagctgcggaggcagtttgaagagcgccagcaggagaccgagcacgtttacgaattactggaaaacaaaattcaacttctccaggaagaaagtaggctagcaaaaaatgaagcagcccgtatggccgcactggtggaggccgagaaagaatgtaatctagaactgtccgaaaaactcaaaggcgtgacgaaaaattgggaggacgtgccaggtgaccaggtgaagccggatcagtatacggaggccctagcccagagggacaagtag

SEQ ID NO: 234722 - DNA, 2910 bp, synthetic construct
  misc_feature 1..2910: note = Description of Artificial Sequence: Synthetic coding sequence
  source 1..2910: mol_type = other DNA
atgtccaatggttaccgcactctgtctcagcacctcaatgacctcaaaaaagagaactttagcctaaaactgcggatctatttcttagaggaaagaatgcagcagaagtacgaagcaagccgcgaagatatctacaaaagaaacatagaactgaaagtggaggttgagtcgttaaaacgtgaactgcaggacaagaagcagcacctggataaaacctgggccgacgtggagaacctcaacagccaaaatgaggcagaactgcgaagacagttcgaagagcggcagcaggagaccgagcacgtctacgaacttttggagaacaagatacagttgttacaagaagaaagtcggctggccaagaacgaggcagctaggatggccgctctggtggaggccgaaaaggaatgtaacttggaactttctgaaaagctgaaaggtgtgacaaagaattgggaggatgttccgggtgaccaggtcaaacctgaccagtatacagaggcgttggcccaacgcgacaaaagaatcgaggagcttaaccagtctctcgccgctcaggagaggttggtagagcagctgtctagggagaagcagcaattgcttcacttgctagaggagcccaccagtatggaagtgcagccgatgacagaggaactgctcaagcaacagaaactcaacagtcacgagacaacaatcactcagcagagcgtttccgatagccacctggccgagctgcaggagaaaatacagcaaacggaggctaccaataagatcctgcaggagaaactcaacgaaatgagttatgagctcaagtgtgcccaggagtcctcccagaagcaggacggtacaatccagaacctgaaggagaccctgaaaagccgcgagagagagactgaagagctttaccaggttattgagggacagaatgacacaatggctaagcttagagaaatgctgcaccagtcgcaattaggacaactccattcctctgaagggacctcccccgcacagcagcaggtggctctgctggatctgcaatcagcgctgttttgttcgcaattggaaattcagaagctccagagagttgtgcggcagaaagagaggcagttggccgacgcgaaacagtgtgtgcagttcgtagaggctgcggctcatgagtcagaacagcagaaggaggcttcatggaaacacaatcaagaattgcggaaagccctgcaacaactgcaggaagagctgcagaataagagccagcagctcagagcctgggaagcagaaaagtataatgagatcagaactcaggaacagaacattcagcacctgaatcatagcctcagccacaaggaacagctgctgcaggagtttcgagagctgcttcagtatcgagacaattcagacaaaacactagaggcgaatgagatgttactcgagaaattgaggcagagaatccatgacaaggctgtcgccctggagagggcaattgatgagaagttcagcgctttagaagaaaaggaaaaggaactccgccagctgcggttggcagtcagggagagagaccatgacctggagagactccgcgacgttctatcatccaacgaggccaccatgcagtccatggaaagcttgcttagagctaaagggctagaggttgagcagctgtctactacatgccagaacctccagtggttgaaagaagaaatggaaactaaattctctagatggcagaaagaacaggagagtattattcaacagctccagactagcctccatgaccgtaacaaggaggtggaagatctgagcgcaactctactgtgcaagctaggcccaggacagagtgagatcgcagaagaactgtgccagcgcctccagcggaaggagcgcatgctccaagaccttctttctgatcgcaataaacaagtactcgagcacgagatggaaatccagggtcttctgcaaagtgtgtcaacacgggagcaggaaagtcaggccgctgcagaaaagttagtgcaggccttaatggagcgcaacagcgagctgcaagcacttcgacaatatctcggcggtcgcgactccctgatgtctcaagcacctatcagcaatcagcaagctgaagtgacgcccactgggtgtttgggcaaacagacggatcagggctcaatgcagatcccgtcacgcgacgattccacctcactcacagcaaaagaggacgtatctatccctcgctcgacactcggtgatctggatactgtggcgggattggagaaagaactgagcaacgccaaggaggagctggagcttatggcaaaaaaggagcgagaaagccaaatggagttatctgccctgcaaagcatgatggccgtgcaagaggaagaacttcaggtccaagccgctgacatggagagcttaactcggaacatccaaattaaggaggatctgataaaggaccttcagatgcagctggttgacccagaagatatccctgcgatggaaagattgactcaggaggttctcttgttacgagagaaagtcgcatcagtcgaatcgcagggccaagagatatcgggcaacaggcgacaacagctgctgctcatgctggaggggctggttgatgagcgcagccgccttaacgaagccctgcaagccgaaaggcagctgtactcgagtctcgtgaagttccacgcgcaccctgaatccagcgagcgcgaccggaccctgcaggttgaactagagggagcgcaggttctacgcagccgtttagaggaggttctcggacgctctcttgagcgcttgaaccgccttgaaacactggctgccatcggaggcgcagcagccggtgacgacaccgaggataccagtacggagtttaccgattcgatcgaggaagaggctgcgcaccacagtcatcaacagctgtag

SEQ ID NO: 234723 - DNA, 2967 bp, synthetic construct
  misc_feature 1..2967: note = Description of Artificial Sequence: Synthetic coding sequence
  source 1..2967: mol_type = other DNA
atgagcaatggatatcggactctatctcagcacctcaatgatctgaaaaaagagaacttttcattgaagctcaggatctactttcttgaagaaaggatgcagcagaaatatgaggcctctagggaagacatatacaagaggaacatcgaactgaaggtcgaggtggagtctttaaagagagagctgcaggacaaaaagcagcaccttgacaaaacctgggccgatgttgaaaatttgaatagccagaacgaagcagagctgagacgacagttcgaggagcgacaacaggaaacagagcacgtgtacgaactgctggaaaataaaatccagcttcttcaggaggagagcaggttagctaaaaacgaagcagccaggatggcggcacttgtggaggccgaaaaggagtgcaatttggagctgtccgaaaagctcaagggggtgacgaagaattgggaagatgtgcccggagatcaggtgaagcccgaccagtatactgaggccctagctcagcgggacaagagaattgaggagctcaaccagagcctggccgctcaggagagattggtggagcaactaagtcgggagaagcagcagctgttacacctcctggaggagcccacctccatggaggtacaacctatgacagaagagctgctgaaacagcagaagttgaattcccacgaaactacaatcacccagcagtctgtcagcgactctcacctggccgagctgcaagagaagattcaacaaactgaggctacaaataagattttgcaggaaaagctgaacgaaatgtcttatgagctaaagtgcgcgcaggaatctagtcagaaacaagacggcacaatccagaacctgaaggagacactgaaaagcagggagcgtgagacggaggagctctatcaggtgatcgaggggcagaacgataccatggctaaactgagggaaatgctgcaccaaagccagctggggcagttgcattcctcagagggaacctcacccgcacagcagcaagtggcattgctcgatctacagtcagccctcttttgttcccaacttgagattcagaagctgcagcgggtggtgcgccaaaaagaacggcagctggccgacgccaagcagtgtgtgcagtttgtggaggccgcagctcacgaatcagaacagcaaaaggaagctagttggaagcataaccaagaactacggaaggccctgcagcagctgcaggaggaactacaaaacaagagccagcaactccgtgcctgggaggccgaaaagtataatgagatcaggactcaagagcagaacattcagcacctaaatcactccctgtcacacaaggaacagctacttcaggaattccgagaacttcttcaatatagggacaattcagacaagacattagaagcaaatgagatgctgctggagaagttgcgccaaaggattcacgacaaggcagtagccctggagcgggctatcgatgaaaaattttcggcgctcgaggagaaagagaaagagctgcgccaattgcgccttgccgtacgtgagcgcgaccacgacctggaaaggctcagagacgtcctgtcgtctaacgaagcgacaatgcaatccatggagagtctcctgcgtgcaaagggcctggaagtggagcaactaagtacaacctgccaaaatttgcagtggctgaaggaggagatggaaacaaagttttctaggtggcagaaagaacaggagagcattattcagcaactgcagacaagcctgcatgataggaacaaagaagttgaggacctgtcggccacattactttgtaagcttggccctggccagagtgaaattgccgaggaactgtgccagcgattgcaaagaaaggaacgaatgctgcaggaccttttatccgaccggaataaacaggtgctggaacacgagatggagattcagggattgctccagagtgtctccacgcgagagcaggagtctcaggcggcagccgaaaagctagttcaggcactcatggagagaaacagtgagctgcaagccctccggcagtatctgggcggacgcgactcactaatgtcgcaggctcctatctccaaccagcaggcggaggtgacccctacaggctgtctcggcaaacagactgatcaagggtctatgcagattcctagtcgcgatgactctacctccctgacagccaaagaggatgtctccatccccaggtccaccctgggcgatctagacacagtggccggattggagaaggagcttagcaatgctaaggaggaactggagctgatggccaagaaggagagggagagccagatggaactgtcagctctgcaatctatgatggccgtccaggaagaggaacttcaggtacaggccgctgatatggagagcctcacccggaacatccagatcaaagaagaccttatcaaggatcttcaaatgcaactggtcgatcctgaggatattccagctatggaacgactcactcaagaagtcctattgctgcgcgagaaagtggcgtcagtagagagccagggacaggagatcagtggtaaccgcaggcagcaactgttgctgatgctggagggccttgtggatgagcgctccaggctcaatgaagcattgcaagctgagcgacagttatactcttcactcgtaaaattccacgcccatccagagtcatcggagcgcgacaggactctacaggtggaactcgaaggagcccaggtgttaaggtcgagattagaggaagtgctcggacgaagtctggagcggctgaatcggcttgaaaccctggctgccattggcggtgcagccgctggtgacgatactgaagacacttcaaccgagtttactgacagcatcgaggaagaggctgcacaccatagccatcagcaggtgtctcagtgccagggactgggcctacccggatggactgctcacagtccaagcgaagtttag

SEQ ID NO: 234724 - DNA, 3396 bp, synthetic construct
  misc_feature 1..3396: note = Description of Artificial Sequence: Synthetic coding sequence
  source 1..3396: mol_type = other DNA
atgaaggaaatttgccgcatctgtgctagagaactgtgcggaaaccagcgaagatggatcttccataccgcaagtaaactgaacttgcaggtactgctttcccacgtgctcggcaaagacgtccctagagatggcaaggccgagttcgcttgcagcaaatgtgcgttcatgctggatcggatctataggtttgataccgttatagcaaggattgaagcgctgtccatagaaagactgcagaaattgttgctggagaaagaccgcctgaagttctgcattgctagtatgtaccgcaaaaataacgacgattctggggcagagataaaggcaggcaatgggacagtcgatatgagcgtgctcccagatgcgagatatagcgctctgctgcaggaagattttgcatactctggtttcgagtgttgggtcgaaaatgaggatcagattcaggaaccccattcctgccacggaagcgaaggcccaggcaaccggccacgcagatgtcgaggttgcgctgctcttagagtggcagacagcgactacgaggccatttgcaaggttcccaggaaagtggcccgtagcatatcctgtggtccttcctccaggtggtccacatctatttgcaccgaggaaccggctctgtcggaagtagggccaccagacctggcttccacaaaggtccccccagatggcgagtctatggaagaggaaactccagggtccagcgtagaaagcctcgacgcctccgtccaggcaagcccaccacagcagaaagacgaggaaacagaaaggtctgctaaggaactcggcaagtgtgactgctgttccgatgaccaggcacctcagcacggttgcaatcataagctggagcttgccctgagcatgattaagggattggattacaagcccatacagtctcctcgcggttctaggttgcccatccccgtgaagagctcactcccaggtgcaaaaccaggtcccagcatgaccgacggagtgagctctggctttctgaaccgatcattgaagccgctgtacaaaacgcccgtgagctatccgcttgagttgagcgacctgcaggaattatgggacgatctctgcgaagactatctcccgctgagagtccaacccatgacagaggaactgcttaagcaacaaaagctcaactcacacgaaaccacaatcacccagcaatccgtgagtgattcacatctcgcagagctccaagagaagatacagcagacagaggcgaccaacaagatcctccaggaaaagttgaatgagatgtcatatgaactgaagtgtgcgcaggaatcttctcagaagcaggatggcacgattcagaatctcaaagagaccctaaagtcacgggaaagagaaaccgaggaactatatcaggtgatcgaaggccaaaatgacacaatggccaagcttagagagatgctacaccagtcccagctgggtcagttacatagcagcgaggggacttctcccgcacagcagcaagtcgccttgctagatctacagagcgccctattctgctcacaattggagatccaaaagttgcaacgggttgtgcgacagaaggagcgacaattggcagacgcaaagcagtgcgtccagtttgtcgaagctgccgctcacgaatccgagcagcagaaggaagccagttggaaacataaccaagagttgcgtaaagcactgcaacaacttcaggaggaactccagaataaatcccagcagctcagagcttgggaggcagaaaaatataatgaaatccgcacacaagagcaaaacattcaacacttaaatcactctctctcacacaaggaacagctgctccaggaattccgcgaattactccagtacagagacaactcagacaagacactcgaggcgaacgagatgctcttagaaaagcttagacagcggattcacgataaggcagtggctctggagagagcaatcgatgagaaattctcggcactggaagagaaagagaaagagttgaggcagctgcggttggctgtcagggaaagggatcatgatctcgagagactgcgcgacgtgttaagtagtaacgaagctacaatgcagtccatggaatctcttctgcgggcaaagggtctcgaagtggagcagttatcgaccacctgccagaacttacagtggctgaaagaggagatggaaacgaagtttagcagatggcagaaggaacaggaatccatcatacagcagctgcagacctctctgcacgacaggaacaaagaggttgaagatttgtctgcaactctcctttgcaagctcggacctggacagtcggagatagcggaagagctttgccaaagactacagcgtaaagaacgcatgcttcaggaccttctgtctgaccgtaacaaacaggtgcttgagcacgagatggaaattcagggtctgctgcaatccgtctctactcgggagcaagaatcacaggctgcagccgagaagcttgtgcaggccctgatggagagaaatagcgaactgcaggctctgcgacaatacttgggaggcagagattccctgatgtcccaagccccaattagcaatcagcaggctgaggtcactcccaccgggtgtttggggaagcaaacagatcaaggcagcatgcagattccttctcgcgacgattccaccagcttgaccgccaaagaggacgtatcaatcccaagatccactctgggggatctggacaccgtggccggtctggaaaaagaactgtccaatgctaaggaggaattagagctcatggccaagaaggagagagagtcccagatggagttgtctgctctacagtcgatgatggctgtgcaggaagaagaacttcaagtccaggctgcagatatggaaagtctgacaagaaatattcagatcaaggaggacctcataaaagacctgcagatgcagctggtcgatcccgaggatatccctgccatggagcggcttacccaggaagtactgctcttgcgggaaaaggtcgcttctgttgagtcgcaggggcaggagatttctggcaacaggcggcagcagctcttgctcatgcttgaaggcctcgtcgacgagagaagccgcctgaacgaagcgctacaggccgaaagacaactttacagtagtctggtcaagtttcacgcacacccagaatccagcgaaagagacaggactctgcaggtggagcttgagggggcacaagttctgagatctaggcttgaagaggtactcggaagatcccttgagcgtctcaatcgcctagaaacactcgctgccataggcggagctgccgcaggagacgacacggaggacacctcaacagaatttactgatagcatagaggaggaggcagcacaccattctcatcagcagtag

SEQ ID NO: 234725 - DNA, 7040 bp, synthetic construct
  misc_feature 1..7040: note = Description of Artificial Sequence: Synthetic coding sequence
  source 1..7040: mol_type = other DNA
atgagcaatggctaccgaactctgtcacagcatctgaatgaccttaagaaagagaatttcagcctgaagctcagaatctactttctggaagagagaatgcagcagaagtatgaggccagccgcgaagacatatacaagcgtaatattgaactaaaggtcgaggtggaatcgttgaaaagggagctgcaggacaagaagcagcatcttgataagacatgggccgatgtggaaaatctaaacagccagaacgaagccgaacttagacggcagttcgaagagagacaacaggaaaccgaacacgtctacgagctgctggagaataaaattcagcttttgcaggaggagtctcggctcgctaagaacgaggccgcacgtatggccgctctggtcgaggccgagaaagaatgtaacctggagctttcagagaaacttaagggggtaactaaaaattgggaggacgtaccaggcgatcaggtgaaaccggaccagtacacggaggccttggcacagagagataaacgtatcgaggaacttaaccagtccctggctgcacaggagcgcctggtggaacaactgagccgagaaaagcagcagctgcttcacctccttgaagagcctacttccatggaggttcagccaatgaccgaagaactcctgaaacagcagaaactgaatagccatgagactacaatcactcagcagagcgtctctgatagccatttggcagaactccaggaaaaaattcagcaaacagaggccactaacaagatcctgcaggaaaaactaaacgaaatgagctacgagctcaagtgcgcccaggaaagttcccagaaacaggatggaacaatacagaacctgaaagaaacattgaaatctcgggaacgtgagacagaggagctctaccaggtgatagaaggtcagaacgacacaatggccaagctgcgcgagatgctgcaccagagccagctcggccagttacactcttcagagggcacttcaccagcccagcagcaggtggccctgctggacctgcaaagcgctcttttctgctctcagcttgaaatccagaagctgcagcgagtggtgcgccagaaagagaggcagttagctgacgccaagcagtgcgttcagtttgtagaggccgctgcacacgaatctgagcaacagaaagaggccagttggaaacataatcaagaacttaggaaagctctgcaacagctgcaggaggagttgcagaacaagtcacagcaactgcgggcatgggaagcagaaaaatacaacgaaattaggactcaagaacaaaatatccagcatctgaaccatagcctgagccataaggaacagctccttcaggaattccgtgagctgcttcagtatagggataattctgataaaaccttggaagctaacgagatgctcttggagaagttacggcagaggatccacgacaaggccgttgctctcgagagagctattgatgagaagttttccgcgctggaggagaaggagaaggagctgagacagctgcgcctggctgtccgggaaagggaccacgacctggaacgccttcgagatgtcctgtctagcaatgaagccacaatgcagtcaatggagagcctgcttcgcgcaaagggcctcgaagtcgagcagctgagcaccacatgtcagaatttgcagtggctcaaagaggaaatggagaccaagtttagccggtggcagaaggaacaggagtctattatccaacagctccagacatcactgcacgatcggaacaaggaagtcgaagatctgtccgccactctcctatgcaaactgggaccaggacagagtgagatagccgaggagctgtgtcagaggttacagagaaaagaaaggatgctgcaggaccttctgtccgaccgtaacaagcaggtgctcgagcacgaaatggagattcagggactcctccagagcgtgtcgacccgcgagcaggagtctcaggcggctgccgaaaagctcgtccaggctttaatggagagaaactccgagctgcaagccttgcggcagtacctcggtggcagggactcactcatgtctcaagctcccattagcaaccaacaggcggaggttacgcccactgggtgcttgggtaaacagacggatcagggctctatgcagatcccgagccgggatgactccacttcgctgaccgcaaaagaggacgtctcaattccccgttcaacccttggcgatctcgacactgtcgccggactcgaaaaggaactgtcaaatgcaaaggaggagctggagctgatggccaaaaaggagagggagtctcagatggaattatcagccctccagagcatgatggccgtacaggaagaggagctgcaggtccaggccgcagatatggagagcctgactaggaatattcagattaaagaggatctgattaaggacctgcaaatgcagcttgtcgaccccgaggatataccggctatggagcgcctcacccaggaggtgctgctgctgcgcgaaaaagtggctagtgttgagtcccaaggacaggagatttctggcaatcggagacagcagttgctgttaatgcttgagggcctagtggatgagaggtcacggctaaacgaggccttacaggcagaacggcagctctattcctctctcgtaaaattccatgcacatcctgagtctagcgaaagggatcggacactgcaggttgagctggaaggagcccaggtcctgcgctccagactggaagaggtcctggggcgtagtctggaacggctgaaccggttggagacactagctgcaatcggcggagctgccgctggggacgacaccgaggatacctcaactgaattcacggactccatcgaagaagaggccgcacatcatagtcaccagcagctagtgaaggtagccctggagaaaagcctggctacagttgagacgcagaatccatccttcagtccaccaagccccatgggaggcgacagtaatcgatgtctacaggaggaaatgttacatttgagggcagagttccatcagcaccttgaagagaaaaggaaggcagaggaagagctgaaagaactgaaagcgcaaatagaggaggctggattcagttcagtatcccacattagaaacaccatgctttcattgtgtctggaaaatgcggagctgaaggaacaaatgggggaagctatgtcagacggatgggaaattgaagaagataaggagaagggtgaggttatggtggagactgtcgtgacaaaagagggactgtccgagagctccctacaggccgaatttaggaaactgcaggggaaactcaagaatgctcataatatcatcaatctgctgaaagagcagttagtgctgagcagtaaggaaggtaattccaagcttacacctgagttactggtgcacttgacttcaaccatcgaacggattaataccgagttggtggggagtcccggaaaacaccagcaccaggaagagggcaacgtgactgtgaggccgtttccacggcctcagagcttagacctgggggctactttcaccgtggatgcgcaccagctcgataaccagagccaaccgagagatcccggtccacaaagtgcatttagcttacccggatcgacccaacacctcaggtcccagttgagccagtgtaagcagaggtaccaggatctacaggaaaagctcttgctctcggaggcgactgtgtttgcacaagccaacgagctggagaaatatcgcgttatgctgacaggagaaagcctcgtcaaacaggatagtaaacagattcaggtcgacctgcaagacctcggctatgagacatgcggcagaagtgagaacgaagccgagcgggaagaaaccactagcccagagtgtgaggaacataattcactcaaggagatggttctcatggagggcttgtgtagcgaacagggacgacggggatcaacattggcttcctcgagtgaacggaagccgttggagaatcaattgggtaaacaggaagaattcagagtgtatggcaaatccgagaacatcctggttctgcgcaaagacataaaagatctgaaggcgcagctgcagaatgcaaacaaagtcatacagaacctaaagagccgtgttagaagtctgagcgtcacatctgactattcatccagtctggagcggccatggaaattaagggcagtgggaactttagaaggttcttctccacactctgtgcccgacgaagacgagggatggttatcagacggcacaggggcattctatagccctggcctgcaagctaagaaagatctggaatcactcatccagcgggtgtcccagctcgaggctcagttaccgaagaacggactagaggaaaaactggctgaagaactgcgcagtgccagttggcctgggaagtacgatagcctgattcaggaccaggcgcgtgagttaagctatttgcgccagaagatccgggaaggaagaggaatttgctacctcattactagacacgctaaggatacagttaagagcttcgaggatctgctgagaagcaatgacattgactactatctgggccagagctttcgagaacaacttgcccaaggttcccagttgactgaacgcctgactagcaagctaagcactaaggatcataagtccgaaaaggatcaagccggactggagcctctggccctccggctttctagagagctgcaggagaaagaaaaggtcatcgaggtactgcaagctaaactagatgcacggagcctgactcctagcagctcccatgcactgagtgactcacaccggtctcctagctccacctcgtttttatccgatgaacttgaggcttgtagcgatatggacatcgttagtgaatatacccactatgaggagaaaaaagccagcccgtcccacagcgacagtattcaccatagcagccactctgctgtccttagtagcaagccgagctccacctctgctagccagggggctaaagcagagtctaactctaatcccatcagccttcccacaccccagaacaccccaaaggaggctaaccaggcccactccggctttcactttcacagcatccccaagctggcctcactcccccaagcccctctgccatccgctccttcttcattcttacccttttcaccaacaggcccactcctcctcggctgttgcgagacgccagttgtaagcctcgctgaggcgcagcaggagctgcagatgttgcaaaaacagctgggagaatccgcgtccacggtcccaccggcatctaccgccaccctgctgtctaacgatctggaagcggatagctcttactatctaaatagcgcacagccacactcccccccaagaggtacaattgaactcggcaggattcttgaaccaggctatctcgggagttccggcaagtgggatgtcatgaggccccaaaaggggtccgtcagcggggatctatcatcagggtcaagcgtctaccagctcaattccaaaccaactggagcggacctattggaggaacatctcggagaaattcgaaacctgcgtcagcgactggaagagtctatctgcattaatgataggctgagagaacagctcgaacaccggctgacgagcacagcacgtgggagaggatctacctcgaatttttactcccaaggcttggaatctatcccccagctgtgtaatgaaaatcgagtgttaagagaagataatcgacgcctgcaagcccagctctctcacgtctcccgcgaacactcccaggagactgagagtctgagggaggctcttctgagttcccgatcgcacttgcaggagctggagaaggagctggaacaccaaaaggtcgaacgccaacagttgctggaagatctccgagagaagcaacaggaggtcctgcacttccgagaagagaggctgtcattacaagaaaacgacagcagactgcaacataagctagttctccttcagcagcagtgcgaagagaagcagcagctcttcgagtccctccaatctgaattgcagatctatgaggctttgtacggtaactccaaaaaggggctcaaggcctactctctagatgcctgccatcagataccactgtcttccgatctgagccatctggttgcagaagtgcgggctctcagggggcagctggagcaatctattcaagggaataactgcctccgtcttcagctacagcaacaactcgagagcggagcagggaaggcctcactgtccccaagttccatcaaccagaatttcccagcctcaacggaccctgggaataaacagctgctcctgcaggatagtgcggtatcaccccctgttcgggatgtggggatgaactctcccgctctggtgttccccagcagcgcgagttctactcccggttccgagacacctattatcaatagggcaaacggattaggtctggacacctcacctgtgatgaagacacctcctaagctggagggagatgctacagatggctcgtttgctaacaaacatggtcggcacgtgattgggcacattgatgactacagtgcactccggcagcaaattgccgagggcaagctgttagtgaagaaaatcgtgtcacttgtgcggagtgcatgttcttttccaggactcgaggcccaggggacagaggtcctcggcagcaagggaattcacgagctccgatcatctactagtgccctgcaccacgcccttgaagaaagtgcctcactgctgactatgttttggcgagccgctctcccctcaacccacatccccgtgttacctggcaaagtgggcgagtcaacagaacgcgagctcctcgaactgaggaccaaggtgtccaagcaggaacgactgctgcagagcaccacagaacacctgaagaacgccaatcaacaaaaggaaagcatggagcagttcattgtcagtcaattgactcgcacacacgacgttttgaagaaggcaaggacaaatttggaagtgaagagcctcagagctcttccatgtactcctgcattgta

SEQ ID NO: 234726 - DNA, 7088 bp, synthetic construct
  misc_feature 1..7088: note = Description of Artificial Sequence: Synthetic coding sequence
  source 1..7088: mol_type = other DNA
atgagtaatggctatagaactctgagccagcatctcaacgaccttaagaaggagaacttttcccttaaactcaggatctactttctggaagagagaatgcagcaaaaatacgaagcaagccgggaagacatctataaaaggaatatagaactgaaggttgaggtggagagtctgaaacgagagctgcaggacaaaaagcaacacctcgataagacctgggctgacgtggagaatctcaactctcagaacgaggctgaactaaggcgccaattcgaggagcggcaacaagagactgaacatgtgtatgagttgttggagaacaagattcagctgttgcaggaggagtcaagattggctaagaacgaagctgccaggatggctgcccttgtagaggctgaaaaagagtgcaacctggagctctcagagaaactgaaaggagtcactaagaactgggaagacgtcccgggagaccaagtgaaaccagatcagtacaccgaggcattggcccagcgagacaaaaggattgaggaattgaatcaatcgctcgctgcccaggaaaggcttgttgaacagctgtcacgcgaaaagcaacagctcctccacctgcttgaggagcccaccagcatggaagttcagcccatgacggaagagctcttgaaacagcagaaactgaactctcatgaaacaacaatcacacagcagagcgtatcagattcccacctggcagaattgcaagaaaagattcagcaaacagaagccactaacaagattctacaagaaaaactgaacgagatgtcttacgaacttaaatgcgctcaggagagttctcagaaacaggatggaaccatccagaacctgaaagagaccctaaaatccagagaaagagagacggaggagctttatcaggtcatcgaggggcagaatgacaccatggccaagttacgcgaaatgctgcaccagagtcaactgggacagctgcactccagtgagggcacaagtccagcacaacaacaagttgctctgttggacttgcagtcagccctgttttgcagccaacttgagattcagaaactacaaagggtcgtcaggcagaaagagcgccagctggccgacgccaaacagtgtgtccagtttgtggaagctgcagcacatgaaagtgaacaacagaaggaggcctcatggaagcataatcaggagcttcgcaaggcactgcagcagctgcaggaggaactgcagaacaaaagccagcagctgcgggcttgggaagcagaaaagtacaatgaaataaggactcaggagcaaaacatccagcatctgaatcatagcttgtcccacaaagaacagttgctccaggagttccgtgaactgctgcagtacagggataattcagacaagacacttgaagccaacgagatgcttctggagaaattacgccagcggatccatgataaagctgtggcgcttgagagggccatcgacgaaaagttttcagcacttgaagaaaaggagaaggaattgaggcaacttcgtcttgctgtacgggagagagatcatgaccttgaaagacttcgcgatgttttatcttccaacgaggccaccatgcaatcaatggagagcctgctgcgtgccaaaggtttggaggtggagcagctgtcaactacatgccagaacctccagtggctcaaagaggaaatggagaccaagttctcccgctggcaaaaagagcaggaaagcattatccagcagctacagaccagcctgcatgacagaaataaggaagtggaagatttaagcgctactctgctctgtaagctggggcctggccagagtgaaattgccgaagagctctgccagagactgcaacgcaaggagagaatgctccaggacctcctctcagatcgcaacaaacaggtcctagagcatgaaatggagattcagggactcttacagagcgtgtccacccgcgagcaagaaagtcaagccgcagctgaaaagttagtacaggcgctcatggagagaaatagtgaacttcaggcattgcggcagtacttgggagggcgtgatagtttgatgtcccaggcacctatcagcaaccagcaggcggaagtgacgccaactggctgtctgggaaaacagacagaccaggggtctatgcagattcccagtagggacgacagcacaagcctgacagcgaaggaagacgtatccatccctcgatccactctgggcgaccttgacaccgtcgcgggtctggaaaaagagctctccaatgcaaaggaagaattggaacttatggccaagaaagaacgcgagagtcagatggagctttcagctctgcagagcatgatggcagtgcaggaggaagaacttcaggtgcaggcagccgacatggaaagtctgactcgcaacattcagatcaaagaagacctcatcaaagacttacagatgcagctcgtggaccccgaagatatccccgctatggagagactaacacaggaggtactgttacttcgcgaaaaggtggcctctgtggagagtcagggccaggaaatcagtggcaacagacgtcaacaattgcttctgatgctcgaaggcctggtcgatgaacgaagccggctgaacgaagcattgcaggctgaacggcagctctattcatcactggtgaagttccacgcacaccctgagtctagtgaaagagaccgaacactgcaggtcgagcttgaaggtgcgcaggtgttgcggtctaggctggaggaagtgttgggcagatccctggagcgactgaatcggttggaaactctggcagctatcggcggtgcagccgctggtgatgacaccgaggacaccagcaccgagttcacagacagcattgaggaggaagccgctcaccattcacatcaacagttggtgaaggttgctcttgaaaaatctttagctaccgtcgagactcagaaccccagcttttcccccccatctcctatgggaggagatagcaacaggtgcctccaggaggagatgttacacctcagggcggagttccatcagcatctggaagaaaaaagaaaggcagaggaagagctgaaagaactcaaagcccagattgaggaggcaggatttagctccgtaagccatattagaaacactatgctctctctgtgcctcgaaaacgcggagctcaaggagcagatgggtgaagccatgagcgacggatgggaaatcgaggaggacaaagaaaaaggcgaggtcatggttgaaacagtggtgaccaaagaaggattatctgagtcctcattacaggctgagtttcgcaagctgcagggaaagctgaaaaacgcccacaatatcatcaacctcttgaaggaacagctcgtcttatcctctaaggaagggaacagcaagcttacgcccgagttgctggtacacctgaccagcacgatcgagcgtatcaatacagagctggtaggatctcccggtaagcatcaacatcaagaggaggggaatgtaacagtccgtccattccctcgaccccagtctctggacctgggcgcaacattcaccgtcgatgctcatcagctagacaatcagagtcagccccgagacccagggccacagagtgccttctcccttcctggaagtacccagcatctccgaagccagttgagccagtgtaagcagaggtatcaagatctgcaggaaaaactgttgctctctgaagcgacagtcttcgcccaggccaatgagctggaaaagtaccgggttatgctgactggggaatccctagtaaagcaggattctaagcagatccaagtggatctgcaggacttgggatacgagacctgtggtaggtctgagaatgaggccgaaagagaggaaaccacttcgcctgagtgcgaggaacacaatagcctcaaagaaatggtgctgatggagggcctgtgtagtgagcagggtaggagagggtcaaccctcgcatctagcagcgagagaaagcccctcgagaatcaactcggtaagcaggaggagttcagggtttacgggaagagtgaaaatatcttagtgctcaggaaagacatcaaagacctgaaagcgcagctgcagaacgcgaacaaggtgatccagaatctgaaaagtcgtgtgagatctctctccgtgacaagcgactactcatctagcttggaacggccatggaaattgcgagcggtgggtactctagaggggtctagtccccactctgtcccagatgaagacgaaggctggctgagcgacggcaccggagccttctattctcctgggcttcaggcgaagaaggacctcgagagtcttatccagcgagtgagtcagttagaggcccaactacccaaaaacggcctggaagaaaagctggctgaagaattacgctctgccagctggcctggcaagtacgattcccttattcaagatcaagcaagggagttgagctatctcaggcagaagattcgggagggaagggggatttgctacctgatcacacggcatgccaaagacacagtgaaatcctttgaggatctgctgaggagcaacgacatcgactactatcttgggcaatcattcagagagcagttagcccagggctcccagctcacagaaaggttgacgtcaaagctgtccactaaagatcataaatcagaaaaggatcaggccggactggaacctctggccctacgcctgagcagggagctgcaggagaaggagaaagtcatcgaagttttgcaggccaaactcgacgcgaggtccctcactccatcttctagtcacgccctttctgatagccataggagtccgtcctccacaagtttccttagcgatgagttggaggcctgttctgacatggatattgtctctgaatacacgcactacgaagagaaaaaggcttctccttctcattcagattctattcaccacagctcccactccgcagtgctatcttctaagccatcatcaacctcagctagccaaggggcaaaagctgagagcaacagcaaccccatatccctcccgaccccacaaaatactcctaaagaagcgaatcaggctcacagcggttttcacttccactctatccccaaattagcttcactgccacaggctcctcttccatccgcgccttcgtcatttctgcctttttcacctaccgggcctttgcttctagggtgctgtgagactcccgtggtgagtctggctgaagcacagcaagagctccaaatgttgcagaaacaattaggcgagtccgcttccactgtccctcctgctagcaccgccacgcttttgtcgaacgatctggaggcagattctagctattacctcaactcggcacagccacatagtccacctcgcggtactattgaactcggcagaattctcgagcccggatacctcgggtccagcggcaagtgggatgtaatgcgtccacaaaaaggctctgtaagtggggacctcagctctggatccagcgtctatcagcttaactcgaaaccgaccggcgctgatctcctcgaagagcacctgggcgagattagaaacttgcggcagcggctcgaagagagcatttgtattaacgatagacttagagagcaactagagcacaggctaacgagcactgcacggggaagggggtccaccagtaacttctacagccagggccttgagagcataccacagttgtgtaacgagaaccgggtcttgagggaggataatcggagactgcaggcgcaactttctcatgtgtctcgcgaacattctcaggaaacagagtcactgcgagaggctctcctctcgagtcgctcccacctgcaggagctggagaaggagctggagcatcagaaggtagaaagacagcaacttctggaggacctccgggaaaagcagcaggaggttctgcattttcgggaggagcgcctctcactgcaagaaaacgatagtcggttacagcataagctggtcctgttacagcaacagtgcgaggagaaacagcagctgttcgagagccttcagtcggagctgcaaatttatgaagctctttacggaaactctaagaaagggctcaaagcctacagtctggacgcctgtcaccagattcccctcagcagtgatctgagccatctggtcgctgaggtaagggctctcaggggacagctggagcaatcaatccagggtaataactgcctgagactgcaactgcagcagcaacttgaatcaggtgcaggaaaagcttcgttgagcccctcctccattaaccaaaatttccctgcctcaactgatccaggcaacaagcagctgctccttcaagacagtgctgttagccctccggtgcgggacgtggggatgaatagcccagccctggttttcccttccagcgcctcctctaccccaggcagcgagacccctatcattaacagagcaaacggtctaggcctggacaccagtcctgtcatgaagacacctcccaaactggaaggagacgccacagatggcagttttgccaacaaacacggcaggcatgtgatagggcacattgatgattacagcgccctgaggcaacagatcgcagagggaaagctccttgtaaaaaaaatcgtttcgctggttcgatccgcgtgctcctttccgggactcgaggctcagggcactgaggtgctgggctctaagggaattcatgagttgagatcctcaacttctgctctgcaccacgccctcgaagagagcgcctcgctgctgaccatgttttggcgggctgccttaccatcaacacatatccccgtgctgccaggcaaagttggcgagagtacagagcgcgaactccttgagttacgcactaaggtatcaaagcaggaaaggctgctgcagtcaaccacggagcacctgaagaatgcaaatcagcaaaaggagtccatggagcaatttatcgtttctcagctcacaagaacccatgacgtactgaaaaaagcacgcactaacctagaagagccctgtaaaaagcggagtcaccagaagtcacttaaacagcaggaaaggtgggcctgcccccctttcgtccagctcccaatctgtta

SEQ ID NO: 234727 - DNA, 1557 bp, synthetic construct
  misc_feature 1..1557: note = Description of Artificial Sequence: Synthetic coding sequence
  source 1..1557: mol_type = other DNA
atgcctgaagcaaactacctgctgtccgtcagttggggatatatcaaatttaaacggatgcttaaccgcgagttgacccacctgtcagaaatgagcagatcaggcaatcaagtcagcgagtttatctcaaataccttcctggataaacagcacgaggttgagatcccatcccccactcagaaggagaaagagaagaaaaagcggccaatgtcccagatatctggagtcaagaagctcatgcacagctcaagtctgaccaatagttccatcccacggttcggcgtgaaaactgagcaggaggacgtccttgcgaaggagctcgaagatgtgaataagtgggggcttcatgtctttcgtatcgctgagctgagtgggaaccgcccactgacagtgattatgcacacaattttccaagagcgggatttgctgaaaacattcaagattcctgttgatactctgattacttacctgatgactctggaggaccactaccacgccgatgtggcttatcacaataatatccacgccgctgatgtcgtgcaaagtacccacgtgctgctgtctaccccagctttagaagcagtcttcacggacctggaaatcttagctgccatattcgcgagcgcgattcatgacgtcgatcaccctggggtttcaaatcagtttttgatcaatacaaattctgagcttgctctcatgtataacgatagcagcgtgctggagaaccaccatctggccgtgggatttaagttgctgcaggaagaaaactgtgacatctttcagaatttaaccaagaagcagaggcagagccttagaaaaatggtcattgatatcgtgctggcaaccgacatgtctaagcacatgaatctgctagcagacttgaaaactatggtagaaaccaagaaggtgacctcatctggggtccttctgttagacaattattccgaccgaattcaggtcctgcagaacatggtccactgtgcagacctgtcaaatcccacgaagccactgcagctgtatagacagtggacagaccggattatggaagagttttttcgacaaggagacagagagcgcgagagaggtatggagatctcacctatgtgcgacaaacataacgccagtgtagagaaaagccaggtcggatttatcgactacattgttcaccctctgtgggaaacatgggccgatctagttcacccagatgcacaggatattctggatacactggaggacaaccgggaatggtatcagtcaacaatcccccagtccccaagccctgccccagatgatccagaggaggggagacaagggcagaccgagaaattccagttcgaactcactctggaggaagatggggagtccgacactgagaaagattccggtagtcaggtggaggaggatacctcatgcagcgatagcaagaccctttgcacccaggatagtgagtcgactgagatccctctcgacgagcaggtggaagaggaggctgtgggtgaagaagaggaatcccagcccgaagcttgcgtgatcgacgatcggtcacccgacacctag

SEQ ID NO: 234728 - DNA, 2430 bp, synthetic construct
  misc_feature 1..2430: note = Description of Artificial Sequence: Synthetic coding sequence
  source 1..2430: mol_type = other DNA
atggaggcagagggctcctctgcgccagcacgtgccggatcaggagaggggtctgactccgctggcggagcaacgctcaaagctcctaaacatctctggagacatgagcagcatcaccagtacccacttcgtcagccacaatttagactcttacatccccaccatcacctgcctccgccaccacccccttcacctcagccccagccacaatgtccacttcagcctccgccacctccacccctgcctccgccaccgccaccacccggagccgcacgtgggaggtatgcatcttctggcgctaccggacgtgtccggcaccgcggatattccgatacagagcgttacctttactgccgggctatggatcgaacaagctatgccgtggaaacaggccacaggccaggccttaagaaaagccggatgtcctggccctcctctttccagggcctaaggagattcgacgtggacaatgggacgtctgctggcaggtctcctctggacccgatgactagcccaggctccggcctaatcctgcaggccaattttgtgcactcacagcgtcgcgagtcgttcctttatcgatctgactctgactatgacttgagccctaaatccatgagccggaactcgagtattgcatcagacatacatggtgacgatttgatagtgactccatttgcccaagtgctggccagcctgaggaccgtccgcaataactttgctgccctgaccaacctgcaggatcgtgcccctagtaagaggtcaccgatgtgtaaccagcccagcatcaacaaagcaactatcaccgaagaagcctatcagaaacttgcttccgaaacactggaggaactggactggtgcttggatcagctcgaaaccctgcagactaggcatagcgtgtcagagatggcctcaaacaaattcaagcgaatgttaaaccgggagctgactcacttaagcgagatgtctcgttcaggcaaccaggtctcagagttcatctcgaacaccttccttgataaacagcatgaggtcgagatcccctctcccacccagaaggaaaaggaaaaaaagaagagacccatgagtcagatcagtggcgttaagaagctaatgcactcaagtagtcttaccaattcctccatcccgaggttcggcgtgaaaacagagcaggaagacgtcctcgcaaaggaacttgaggacgtgaacaaatggggcttgcacgtgtttagaatagctgagctttccggcaataggccgctcacagtgattatgcacacaatttttcaggaaagagatctgctaaaaacatttaaaattcccgtcgacaccttgatcacttatctcatgacccttgaagaccattatcacgccgacgtggcttatcataacaatattcacgccgctgatgtggtgcagagcactcatgtgcttttatccacacctgccctcgaagccgtcttcacagatctcgaaatcttagctgccatcttcgcatcggccatccatgacgtggatcaccccggagtgtctaaccagtttttaattaatactaattcagagctggccctcatgtataatgattcgagtgtgcttgagaaccaccatttggctgtggggtttaagctccttcaggaagagaactgcgatatatttcagaacctcaccaagaagcagcgccagagtctgcgaaaaatggtcattgacatcgtccttgctacagatatgtctaaacatatgaacttactggccgacctaaaaacaatggtagaaaccaaaaaggtgacaagttcaggggtgcttttgctggataactatagcgaccgcattcaggtcctgcagaatatggtgcattgcgccgatctgtctaaccctactaaacctctacagctgtaccggcagtggacagacagaataatggaggagttcttcaggcagggtgatagagaacgagaaagaggaatggaaatcagcccgatgtgtgacaaacacaacgcgtctgtagagaagtcacaagtgggcttcattgattacattgtgcatcccctttgggagacgtgggcagacctcgtgcacccagatgctcaagatattctggatacgcttgaagacaatcgggaatggtatcagagcacgatcccccagagcccatcccctgcacccgatgatccggaagaagggaggcaggggcagaccgaaaagttccagttcgaactgacgttagaggaggatggagagtccgataccgagaaagacagcgggtctcaagtggaggaggacacctcttgtagcgatagcaaaactctttgcacccaagacagcgagagcaccgagattcctctggacgaacaggtggaagaggaggcagtgggcgaggaggaagagtcccagcctgaggcctgcgtgatcgatgatagatcacccgatacctag

SEQ ID NO: 234729 - DNA, 2037 bp, synthetic construct
  misc_feature 1..2037: note = Description of Artificial Sequence: Synthetic coding sequence
  source 1..2037: mol_type = other DNA
atgttcatttactcctttaataaattttttttcaagacaacccattgttgggccatcattagtttcgatgtagataacggaactagcgctggtaggtctccattagaccctatgaccagtccaggcagcggactaattctccaggcgaactttgtgcatagtcaacggcgagaatcgtttctgtatagatccgattcggattacgaccttagccctaaatccatgagccggaatagtagtattgcaagtgacattcacggggatgatctgattgtcactcctttcgctcaggtgctggcatcgttgaggacagtgagaaacaattttgccgcactcacgaatctccaagatagagctcccagtaaaaggtcgccgatgtgtaaccagccgtctatcaataaagcaacgatcaccgaggaagcgtaccagaagctcgcaagcgaaaccctagaagaactcgactggtgcctggaccagcttgagactcttcagacccgtcactcagtgtcagagatggctagcaataagtttaagcgaatgctgaacagggagctcacccatctctctgagatgtctcgcagtggaaaccaggtgagcgagttcataagtaacaccttcctcgacaagcagcatgaggtggaaatcccttcaccaacccagaaggagaaagaaaagaagaaacgaccaatgagccaaatctcaggggttaaaaagctgatgcatagttcctcactgacaaattctagcatccccaggtttggcgtaaaaaccgaacaagaggatgtcctcgccaaagagctggaagacgttaataaatgggggctacacgtcttcagaattgctgaactttcggggaacaggcctctgaccgtgataatgcacacaattttccaggagagagacctgcttaagacattcaaaatccccgtggatacgctgattacttatctgatgaccctggaggaccactatcatgccgacgttgcctatcacaacaacatacacgccgcagacgtcgtgcagagtacacatgtgctcctgtccacccctgcacttgaagccgtgttcactgacctcgaaattttggccgctatcttcgccagtgctattcatgatgtagaccaccccggagtgagtaatcaattcctaatcaataccaactctgagctggcgctgatgtataatgactccagcgtcctggagaaccatcacctggcagtgggtttcaagctgctccaagaagagaactgtgacattttccagaatctcactaaaaagcagaggcagtcactgcgcaagatggtgattgatatagtccttgccaccgatatgagtaagcacatgaacctcctcgccgatctgaagaccatggtggagactaaaaaagtgacaagtagtggcgtccttttacttgacaattacagcgaccgaattcaggtcctgcagaatatggtccattgcgctgatctttccaatcccactaaacctcttcagctttatcggcagtggacagaccggattatggaagaattcttcaggcagggcgatcgggagagagagagaggcatggagatcagtcccatgtgcgacaagcataatgcatcggtcgaaaagtcccaagtcgggttcatcgattatatcgtacaccccctgtgggaaacatgggccgacctggtacatcccgatgcccaggatatactcgacaccttggaagacaatagggaatggtatcagagtactataccccaaagcccttcgccagcccctgatgacccggaggaggggagacaaggacaaacagagaagtttcagttcgaacttactctggaagaggatggtgaatcggacaccgagaaagactcgggtagccaagtggaggaagatactagttgtagcgacagcaagaccctgtgcactcaggactcagagtcaactgaaattccactagacgagcaggtggaagaagaggcagtgggtgaagaagaagaatcacagcccgaggcttgtgtcatcgacgaccgctccccagatacttag

SEQ ID NO: 234730 - DNA, 1524 bp, synthetic construct
  misc_feature 1..1524: note = Description of Artificial Sequence: Synthetic coding sequence
  source 1..1524: mol_type = other DNA
atggcttccaacaagtttaaaaggatgctcaatcgcgagctgacacacctgagtgaaatgtctagaagtggcaatcaggtgtcggagtttatcagcaatacctttctggataaacagcacgaggtggagattcccagcccgacccagaaggagaaagaaaaaaaaaaaagacccatgtcacagatatctggcgtgaagaagctcatgcattcatcaagtctgacaaacagttccatccccaggttcggggttaagacagaacaggaagatgtgcttgcgaaggagctcgaggacgtgaacaagtgggggctgcacgtgttccgaatcgccgaactgtctggcaaccgacccctcaccgtgataatgcacaccatttttcaggagagggatttactaaagacatttaaaatcccagtggacaccctgattacatatcttatgaccctagaagatcactaccatgcggatgtagcctatcacaataatattcacgccgctgacgttgtacagagcacccacgtgctgctgagcacaccggctctggaggcagtgtttactgacttagaaatcctggctgctattttcgcgtccgctatccatgacgtcgatcaccccggagtttctaatcagttcctgattaacactaacagcgagctggccctaatgtataatgattccagcgtcctggaaaatcatcatctcgcagttgggtttaagctgctccaggaggagaactgtgacatttttcagaacctgaccaagaagcagcgacaatctctgcggaagatggtgattgacatagttctggccactgacatgagcaaacatatgaacctgcttgcggacctgaagacaatggtggagaccaagaaggtcacatccagcggagtgctgctgctggacaattattctgaccgtatccaggtcttgcagaacatggttcactgcgcagatctctctaatcccaccaaaccgctgcagctgtaccgtcagtggacagaccgtatcatggaagagttcttcaggcaaggcgaccgggagcgagaacggggaatggagatctcacccatgtgtgataagcataacgccagcgttgaaaagagccaagtcggattcattgactacattgtgcatcccctctgggagacctgggctgacctcgtgcacccagatgcacaagacatcctcgatacactggaggacaacagggaatggtaccaaagcacaataccccaatcaccctctcccgcaccagacgaccccgaagaggggagacagggccagacagagaagtttcagtttgagcttacattagaggaagacggagaaagtgacaccgagaaggacagtggatcccaagtggaagaggatacctcctgtagcgattccaagacattgtgtactcaggactcagaaagtaccgaaattcctctggatgagcaagtagaggaagaagccgttggtgaagaggaagagtcgcaaccagaggcatgcgtcatcgatgatcgcagccctgatacatag

SEQ ID NO: 234731 - DNA, 2022 bp, synthetic construct
  misc_feature 1..2022: note = Description of Artificial Sequence: Synthetic coding sequence
  source 1..2022: mol_type = other DNA
atgatgcatgttaataacttcccttttaggaggcacagttggatttgtttcgatgttgacaacggaactagcgccggtagatcgccgctggatcccatgactagcccaggcagtggcctaattcttcaagccaattttgtgcactctcagcggagagagtccttcctttaccgttcagatagcgattatgatctctctccgaaatcaatgtctagaaactcttccatcgctagcgatattcacggggacgacctgatcgttacacccttcgcccaagttttagcttcactacgcacagtccgaaacaactttgccgctctcacaaatctacaagacagggctccttccaaacgaagcccaatgtgtaatcagccttctataaataaggccacaataactgaggaggcataccagaaactggcgtccgagaccttggaagagttagattggtgcctggatcagctggagacactccagactcggcacagtgtgtcggagatggcctcaaacaagtttaaacgtatgctgaatagagaactaactcacctctcagaaatgtcacgttcaggaaatcaggtcagtgagtttataagcaacacttttttggacaaacagcatgaggtcgaaataccctctcctacccagaaggagaaagagaaaaagaagaggccaatgagtcagatcagcggcgtgaaaaagctgatgcatagctcctccctgaccaactcctctataccacgctttggagtcaagacagagcaggaagacgtactagctaaggagctcgaggacgtaaataaatgggggctgcacgtgttcagaatcgcagagctgtctgggaatcggcctcttaccgttataatgcataccatattccaggagcgggatctactcaaaacctttaagattcctgtggataccctaatcacttacctgatgacgctagaagaccattaccatgccgatgtggcctaccacaacaacattcatgccgctgatgttgtgcagtcaacgcatgtcctgctctccacacctgctctggaggccgttttcaccgacctggagatcctcgcagccatatttgcctcagcgattcacgacgttgaccaccctggagtttccaatcagttccttatcaatacaaactctgagctggccctgatgtacaacgatagttctgtcttggaaaaccatcatttagctgttgggtttaaactgcttcaggaagaaaactgtgatatctttcaaaacttaactaaaaagcaaaggcagtctctccggaaaatggtcatagatatcgtgcttgccactgacatgtcaaagcatatgaatttgctggcggacttgaagaccatggtcgaaactaagaaggtgacttcctctggcgtgctgctattggataactactccgaccgcattcaggtcttgcaaaacatggttcattgtgctgacctatcaaaccccactaagcctctgcagctgtatcgccagtggaccgatcggatcatggaagaatttttccgccagggagaccgtgaacgcgaaaggggaatggagatttccccaatgtgtgataagcataacgctagtgtggagaaatcacaggtggggttcatcgactacatagtccacccactgtgggagacctgggctgacctggtgcatccagacgcccaggacatcctggacaccctggaggataatcgggaatggtatcaatctaccattccccagagcccttcaccagctcctgatgatcccgaggaagggaggcaaggccaaacagagaagtttcagtttgaactcactctcgaagaggacggcgagtctgataccgaaaaagactccgggagtcaagtggaggaagacacctcatgttccgacagcaagacattgtgcacccaggatagcgaatccaccgaaatcccgctcgacgagcaagttgaggaggaggcagtgggcgaggaagaggagtcgcagcctgaggcttgcgtgattgatgatcgatcccccgatacatag

SEQ ID NO: 234732 - DNA, 2064 bp, synthetic construct
  misc_feature 1..2064: note = Description of Artificial Sequence: Synthetic coding sequence
  source 1..2064: mol_type = other DNA
atggccttcgtttgggaccctttgggagcaaccgtgcctgggccaagcacaagagccaagagccgcctgcgtttctcgaaatcttacagcttcgacgtggataatggtaccagtgcagggaggagtcctctggaccccatgacctcgcccggttccggattgatactccaggcaaacttcgttcattcccagcgccgagagagctttctctataggagcgattcagattacgacctgtcacccaagagcatgtccagaaactcatcaatcgcatcggacatccatggagacgaccttattgtcacccctttcgcacaggttttggcatctctaaggacagtcaggaataattttgctgcgctgaccaacttgcaagatagagcaccttccaagaggtcacccatgtgcaatcagccctccattaataaagccactatcactgaggaggcttatcagaagcttgcttcggagaccctggaagaactggactggtgtctggaccagctggagactctgcagactcgtcactctgtctcagaaatggcctccaacaaattcaagcggatgttgaatagagaactcacccatctctcagagatgtccagatcaggcaatcaggtgtccgaattcatctccaatacattcctcgataaacaacacgaagtcgaaatcccaagtcccacacaaaaagaaaaagagaagaaaaaacgacctatgtctcaaatttccggagtcaagaaactgatgcacagctcctccttaaccaattcatccatacctagatttggggtcaaaactgagcaagaggatgtgctcgccaaagagttagaggacgtgaacaagtggggtctgcacgttttccggattgcggagctctcaggcaaccggccactcacagtgatcatgcatactattttccaggagcgagatcttctgaaaactttcaaaatccctgtggacactttaattacttacttgatgacactcgaggatcactaccatgccgacgtcgcatatcacaataacatccacgcagcagacgtggttcagtctacacacgttctgctctcgacccccgctctggaggctgtgtttactgaccttgaaattctcgcagccatcttcgcctcggctatccacgacgtggaccacccgggtgtgtctaaccagtttctgattaataccaactccgaactggctctgatgtacaacgactcaagcgtacttgagaatcatcacctcgcagttggctttaagctgctgcaagaggagaactgcgacattttccaaaatctcaccaagaagcaaagacagtctctacgaaagatggtgatcgacatagtgttagccacagacatgtccaagcacatgaatctgctggcggaccttaagactatggtagagactaagaaagtcacgagttcaggggtgttgctcctggacaactacagcgacaggattcaagttctgcagaatatggtgcactgcgctgatcttagtaatcctacgaagcctctgcaactgtatcgacagtggacggaccggattatggaagagtttttccggcagggggatcgcgagagggagcgcggaatggaaatcagccccatgtgtgataaacacaacgcctccgttgagaagagccaggtgggattcatcgactacatcgtgcacccactgtgggagacctgggcagacttggtgcaccctgatgctcaggacattctggatacgcttgaagataatcgggagtggtatcaatctactattccacagtctccctccccggctcccgacgatccagaggagggaaggcaaggccagacagaaaaattccaatttgaactgaccttagaggaagacggcgaaagcgacactgaaaaagattccgggagccaggttgaagaggataccagctgcagcgacagcaaaacattgtgcacccaggatagcgagtcgacggaaattccactggatgagcaggttgaggaggaggctgtcggcgaggaggaagagtcacagccagaagcatgcgtcattgacgatcggagcccagatacgtag

SEQ ID NO: 234733 - DNA, 2247 bp, synthetic construct
  misc_feature 1..2247: note = Description of Artificial Sequence: Synthetic coding sequence
  source 1..2247: mol_type = other DNA
atgaagcgaaacacctgtgacttgctgtccagatccaagtcagcaagtgaggagacgctgcattcgtccaatgaggaggaggatcccttccgaggcatggagccttatttggtcagaaggctctcctgcaggaatatccaacttccccctctcgcctttaggcagctcgaacaggcagacctgaagagtgagtctgagaacatccagaggcccaccagtctgcctttgaagattttgccccttatcgcaatcacgtccgcggaatcatctggctttgatgtcgacaatggaacgtccgctggcagatctccactggacccaatgaccagcccgggtagtggcttaatcctccaagcgaattttgtgcattcccagagacgggagagtttcctatatcgctcggactcagattatgatctgtcacccaagtcaatgtccaggaactcttcaattgcttccgacatccatggagatgacctgattgtgaccccctttgcacaagtgctcgcctctttgcgaacagtgaggaataattttgccgcactaaccaatctgcaggaccgggctccctctaagcggtctcctatgtgtaaccagccgagcattaacaaagcaaccatcacagaagaggcgtaccaaaaattagcatccgagaccctggaggaactggactggtgtctggatcagttggagaccctgcagacaagacactccgtttccgagatggcgtctaataagttcaaaaggatgctcaatcgcgaactaacacacttgtcagagatgtccaggtccgggaaccaagtcagtgagttcatcagtaatactttcctggacaaacagcacgaggtggaaattccatcccctacccagaaggaaaaggaaaagaaaaagcgccctatgagccaaataagcggcgtcaaaaagctgatgcatagctcctccctaacaaactcgtccatcccaagattcggggtcaagacagaacaggaggacgtcctcgcaaaggagctcgaggacgtgaacaaatggggcctgcacgtgtttcgcattgccgagttgtcaggcaaccgaccgttaaccgtgattatgcatactatatttcaggaacgtgatcttctcaagacatttaaaatacctgtggatactctcataacataccttatgaccctcgaggaccattaccatgctgacgtggcctaccacaacaacatacacgccgctgatgtagtacagtcaactcatgtgttgctgtccacaccagcactggaagctgtgtttacggatttggagattcttgcggctatcttcgccagcgccattcatgacgtggatcatcctggagtctccaatcaatttttaatcaataccaatagcgaattggcgctgatgtacaacgactcctccgtactcgaaaaccaccacctcgccgtcggattcaaacttttgcaagaggaaaattgcgatattttccagaacctgacgaagaagcagagacaatcgctaaggaagatggttattgacattgtattggcgacagacatgtccaagcatatgaatcttctggccgacttgaagaccatggttgaaacaaaaaaagtgacctcatcaggcgtgctgttgctggataactacagcgatagaattcaggtgctacagaacatggtccattgtgctgatctctcgaatcctaccaagcctctccagctgtataggcagtggaccgataggatcatggaagaatttttccgccaaggggacagggagcgcgaacggggtatggaaatcagccccatgtgtgataagcataacgccagtgtggagaaatcccaagtggggttcatcgattacatcgtgcaccctctatgggaaacttgggccgatctggtgcacccggacgctcaagacattcttgatactctggaagacaatcgtgaatggtaccagtccacgattccgcagagcccctctccagctcctgatgaccctgaggaagggcgacagggccagaccgagaagtttcagttcgagctgaccctggaggaggacggagaatccgatacagaaaaggatagtggctcccaagttgaggaggatacttcatgcagtgattccaagaccctgtgcacacaggacagcgagtccacagagattccacttgatgaacaggtagaagaggaagccgtcggagaggaggaggagtcacaaccagaagcctgtgtgattgacgatcggtccccagatacttag

SEQ ID NO: 234734 - DNA, 660 bp, synthetic construct
  misc_feature 1..660: note = Description of Artificial Sequence: Synthetic coding sequence
  source 1..660: mol_type = other DNA
atggctcaacagaccagccccgacaccctcactgtccctgaggttgataaccctcactgtcccaacccatggctgaacgaggacctggtcaagagcctgcgggaaaacctgctgcaacacgagaagagcaaaacggcaaggaagtctgtgagccccaagttgagtccggtaatctccccccgtaatagtcccaggctattgcgcaggatgcttctatcttccaatatccccaaacagcgcaggtttacggtggcccacacatgttttgacgtcgacaacgggactagcgcaggcagatcccccctggatcctatgacatccccaggatctgggctgattctccaggcaaacttcgtacacagccagcgtcgcgaatcttttctgtatcgcagcgattctgattatgacctgtcccctaagagcatgagcaggaattcttcaattgcttccgacattcacggcgacgatctaatagtcacgccattcgcccaagtcctggcttccctgcgcactgtgcgcaacaatttcgccgcactaacaaatctgcaagaccgggctccttccaaacggagccctatgtgcaatcagccgtccatcaacaaggcaacaatcacgggttcctggatggagctaaatccgtatacattgctggacatgtag

SEQ ID NO: 234735 - DNA, 2040 bp, synthetic construct
  misc_feature 1..2040: note = Description of Artificial Sequence: Synthetic coding sequence
  source 1..2040: mol_type = other DNA
atgagtatcattatgaagccacggagccggtcgacatcatcccttcggacagctgaggcggtgtgcttcgatgtagacaacggaacaagcgcaggtcgtagccctctcgacccaatgactagtcctggaagcggcctcatattgcaggctaatttcgtgcatagccagaggcgcgagtcatttctttatcgatctgattccgactacgatctgtcgccaaagtctatgagcaggaattcatctatcgcttccgacatccatggggacgacttaattgtgaccccgtttgcacaggtgcttgcttctcttcgcacagttcgaaataacttcgccgcactcacaaatctacaggaccgtgccccaagcaagcggtccccaatgtgtaatcagccttcaatcaacaaagccacaattacagaggaggcttatcagaagctagccagcgaaactctcgaggaacttgattggtgtctggaccagcttgaaactcttcagactcgacactcagtttccgagatggctagcaacaagtttaagagaatgctgaatagagagttgacccatttaagtgaaatgagcagatcaggaaatcaggtgtcggagttcatttctaatacttttcttgataagcagcacgaggtggagattccgagtcccacacaaaaagagaaggaaaaaaaaaagagacccatgtcccagattagtggcgtgaaaaaactgatgcattcatcctctctgaccaattcctccattccacggtttggagtcaagactgagcaggaggacgtactggccaaggagcttgaagatgtaaataagtgggggcttcatgtgttccggattgcagaactgtctgggaatagaccattgacagttatcatgcacacaatcttccaggagcgggacctgctcaagacttttaaaattcctgttgataccctcattacctacctgatgacattggaggatcactaccatgctgacgtagcataccataacaatatccacgccgctgacgtggtacaaagtacccatgtgttactctctactcctgccctggaggctgtgtttactgatctggagatcctagccgcaattttcgcctccgctattcatgacgtagatcatcccggagtaagcaaccagtttctcatcaataccaacagtgagcttgccttgatgtataacgattcctcagtattggaaaatcatcacctagctgtgggctttaagctgctgcaggaagaaaattgcgacatctttcagaacttgacaaaaaaacagcgccagtccttacgcaaaatggtcatcgatatcgtgctggccactgatatgtccaaacatatgaacctgctggccgaccttaagacaatggtggagactaaaaaagtgacctcaagcggcgtcctgttgcttgacaattatagtgatcgtatccaagtcctacaaaatatggtacattgtgctgatttatcgaatcctaccaagccattgcagctctatagacagtggaccgacaggattatggaggagttctttcggcagggtgatcgcgaaagggaacgcggaatggagatttcaccaatgtgcgacaaacataacgccagtgtggagaagtcccaagtggggttcattgattacatcgttcaccccctctgggaaacatgggctgaccttgtgcatccggatgcgcaggacatacttgataccctggaagataatcgagagtggtaccagtccaccataccccagagcccttccccagcccctgacgatccagaggaagggagacagggccagactgagaaatttcagttcgaactgaccctggaggaggatggtgaatcagataccgaaaaggactctgggtcccaagttgaagaggacacatcttgctccgatagcaagacactgtgtacacaggattccgagtccaccgagattcctttggacgaacaggtcgaagaagaagccgttggggaggaggaggagtcacaacccgaagcatgcgtgatcgatgaccgcagccctgatacctag

SEQ ID NO: 234736 - DNA, 1269 bp, synthetic construct
  misc_feature 1..1269: note = Description of Artificial Sequence: Synthetic coding sequence
  source 1..1269: mol_type = other DNA
atggccagcaacaaatttaagcgcatgctgaaccgcgaattgacccacctttctgagatgagccgtagtgggaaccaggtatctgagttcatctccaatacctttcttgacaaacagcatgaggtggagataccatcccccacccaaaaggaaaaggagaaaaagaagcgtcccatgtcccagatttccggtgtgaaaaaacttatgcactcctctagcctgaccaacagctcgattcctcgatttggcgtgaagacagaacaggaagacgtattagccaaagagcttgaggatgtgaataaatggggtcttcacgtctttcgcatcgctgaactgtcaggaaatcgaccacttaccgtaattatgcataccatctttcaggagcgggacctcctcaagacattcaaaattcctgttgatacactgattacatacctgatgacactggaggaccattatcatgccgacgtggcgtatcataataatatacacgctgccgatgtggtgcagagcactcacgtacttctgagtacgccagccctcgaagctgtgttcaccgatctggaaatcctggctgctatattcgcctccgccatccacgatgtggatcatcccggagtctctaaccagttcctgatcaacaccaattccgagctggccttgatgtataacgattctagcgtgctggaaaatcatcatctggccgtggggttcaagctgttgcaggaagagaactgcgatatatttcagaacctgactaagaagcagcgccagagcctgcgcaagatggtaattgatatcgtactagcaaccgacatgtccaagcatatgaatcttctggctgacctcaaaaccatggtggagactaagaaggttacctcttctggtgtcctactcttagataattattcggacaggatacaggttctccagaacatggtgcattgcgccgacctgtctaatcctacaaaaccgctccagctgtatcgccagtggacagatcggataatggaggagtttttcagacagggagaccgcgagcgagagcgtggtatggaaatcagccctatgtgtgataaacacaacgccagcgtcgaaaagtcccaggttggtttcatagattacattgtccacccactgtgggagacctgggctgatctcgtccaccccgatgcacaagacatccttgacacactggaggataatagagagtggtatcagtccactattccccagtccccatcacctgccccagacgaccccgagtag

SEQ ID NO: 234737 - DNA, 246 bp, synthetic construct
  misc_feature 1..246: note = Description of Artificial Sequence: Synthetic coding sequence
  source 1..246: mol_type = other DNA
atgaaaagaaacacctgcgatctgcttagtagaagcaaaagcgcctcggaagaaacacttcactcatctaacgaagaggaggatcctttccggggtatggaaccgtacctagtgcggaggctgtcctgtaggaatatccaactccctcctctcgcttttcgacagctcgagcaggccgatcttaaatctgagtccgaaaatattcagcggccaactagcctcccacttaagatcctgcctctctag

SEQ ID NO: 234738 - DNA, 2238 bp, synthetic construct
  misc_feature 1..2238: note = Description of Artificial Sequence: Synthetic coding sequence
  source 1..2238: mol_type = other DNA
atggctcagcaaacctcccccgacacacttaccgtccccgaggttgacaacccacactgcccaaacccctggctaaacgaggacctggtaaaaagtctcagggaaaatctgctgcagcacgaaaaatctaagactgcgagaaaatcagtaagcccaaaactctcccctgtgatcagccccaggaacagccccagactgctgagacgtatgctgttgtcttccaacatccccaaacaacgtcgcttcaccgttgcccatacgtgcttcgacgtagataacgggacgtccgctgggaggagcccacttgatcctatgacttcacccggtagcggcctaattcttcaggctaacttcgtccattcacagcgcagagagtcttttctgtaccgatctgattccgactacgacctgagtcccaagtcaatgtcaaggaacagctctatcgcctccgatatccatggcgacgacttgattgtgacaccattcgcccaggtattggcgtcgctgcgtacggtgagaaacaacttcgcagcattaacaaatcttcaggaccgggcacccagtaaacgcagtcccatgtgtaaccaaccatccataaacaaggctacaatcaccgaagaggcatatcagaaactggcctcagagacccttgaagagttagactggtgcctcgaccaattggagactctgcagacccggcattctgtgagcgaaatggcatccaacaagttcaagcgcatgttgaaccgggaacttacccatttgtcagaaatgagtaggtcaggtaatcaggtgtccgaatttattagcaacacgtttctagacaagcagcatgaggtggaaattcccagcccaactcaaaaggagaaggagaagaagaagcgcccaatgagccagatctccggagtgaaaaaattgatgcattctagctctctaaccaattcctccatcccccgattcggagtgaagactgagcaggaggatgtgttagcgaaggagttagaggacgtgaataagtggggcttgcacgtgttccggatcgcagaactgagcgggaatcggcctctaactgtgataatgcacactatttttcaggagagagatctcttaaagacattcaagataccagtggacactctaatcacatacctcatgaccctggaggaccattaccacgcggacgttgcttaccacaacaacatccacgccgcagacgtggtacagagtactcatgtgctgctaagcacccctgccctggaggctgtgttcaccgacttggaaatcctggccgctatctttgcctccgccatccatgatgttgaccacccaggggtgtccaatcagttcttaataaatacaaattcagaattagccttaatgtataacgactctagcgtactagaaaatcaccacctggccgtgggtttcaagcttctgcaggaggagaattgcgacatatttcagaacttgacaaaaaagcagcgccagagcctgcgcaaaatggtgattgacatcgtcttggccacggatatgtcgaaacacatgaacctgctcgcagacctgaaaaccatggttgagaccaagaaggtgacatctagcggtgtacttttgctggataactattctgacaggatacaggtgttacagaacatggttcattgtgcagacctgagtaatcccaccaagcccctgcagctttacagacaatggaccgaccggataatggaagagttcttcagacagggggaccgcgagcgcgaacgaggaatggagattagcccaatgtgtgacaagcataatgctagcgtcgaaaaatcacaggtcgggtttattgactacattgtgcacccattgtgggagacttgggcagatctggtgcatcccgacgcccaggatatcttggataccttggaagacaatagggagtggtaccagagtactatcccacagagcccatcaccggcacctgatgacccggaggaaggcaggcagggccaaaccgagaagttccagtttgagctgaccctcgaagaggacggggagagtgataccgaaaaagacagtggttcccaggtggaggaggataccagctgctccgatagcaaaaccttatgcacccaggactccgagtcaaccgagattcctctagacgagcaggtggaagaggaagcagtcggggaggaggaggagtcacagccggaagcatgtgtaatcgacgacagatcacctgacacatag

SEQ ID NO: 234739 - DNA, 228 bp, synthetic construct
  misc_feature 1..228: note = Description of Artificial Sequence: Synthetic coding sequence
  source 1..228: mol_type = other DNA
atgaaaagaaacacatgcgacttgctgtcacgctctaagtcagcgtctgaggaaactttacattcatctaatgaggaggaggatccatttagagggatggagccatatctggtgcgcagactcagttgcaggaacattcagctgcctccactcgcttttcgccagctggaacaagccgatctgaagtcagagagcgagaacatccagcgacccacatcactgccgtag

SEQ ID NO: 234740 - DNA, 2247 bp, synthetic construct
  misc_feature 1..2247: note = Description of Artificial Sequence: Synthetic coding sequence
  source 1..2247: mol_type = other DNA
atgaagcgcaatacatgtgatctgctgtcccgatcaaagagtgccagtgaggagaccctgcactcaagtaatgaggaagaggatccatttcgtggtatggagccatatctggtgaggagacttagttgtcgcaacattcagctgccaccgttggcctttcggcagctagaacaggcagacttaaaatccgagagtgagaatatccagcgcccaactagtttacccctgaagatactgcccctgatcgccattacctcagctgagagctctggattcgacgtggacaatggaacatctgccggtcggagcccactggaccccatgaccagcccaggtagcggcctgattctgcaggccaatttcgtgcacagtcagcggagggaatcgttcctttatcgctccgactcagattacgacctatcccccaagtccatgagtagaaacagttccatcgccagcgatatccacggggacgacctgatagttaccccctttgctcaagtcctggcgtccctccgtactgtccggaacaacttcgcggctctgacaaatctgcaagatagagcaccatctaaaaggtctcctatgtgcaatcaaccatctattaataaggccacaattaccgaggaagcctatcagaaactggcgtccgagaccctggaagaactggactggtgtctcgaccagctggagaccttacaaacaagacacagcgtgagcgagatggccagcaataagttcaaacgcatgctcaaccgagagttgactcacctgagcgaaatgagcagaagcggcaatcaggtgtcagagttcatcagcaacacatttttagacaagcaacacgaggtggaaatccccagtcccactcagaaagagaaggaaaagaagaagcggccaatgtcccaaatctctggtgtgaaaaaactaatgcatagcagcagcttgactaatagctccatacccaggttcggggtgaagactgagcaggaggacgttcttgcaaaagaactggaagatgtgaacaagtggggccttcatgtcttcagaatcgctgagctttctggaaacagacccctcactgttataatgcatacaattttccaggaaagggatctcctgaaaacctttaagatcccagttgataccctgatcacctatctcatgaccttggaggaccattaccacgcagatgtggcctatcataacaatattcacgccgctgacgtggtccaatctacacacgtacttctctccacacccgcactggaggctgtctttacagacctcgagatcctagcggctatctttgcatccgctatccacgatgttgaccatccaggcgtgagtaatcagtttctcatcaacactaactctgaactggcactaatgtacaacgattcgtccgttttggagaaccatcatctggcagtgggctttaaactccttcaggaggagaactgcgatatttttcagaatctgactaagaagcaacgccaatctcttaggaagatggtgatcgacattgtgctcgcaacagatatgagtaagcacatgaacctcctggcggacctgaaaactatggtggaaactaaaaaggttacatcttctggcgtactgctcctcgacaattattccgatcgaatccaagtgctccaaaacatggtgcactgtgctgatctgtccaaccctacaaagccactccagctgtaccgccagtggactgataggatcatggaggagtttttccgacaaggcgaccgtgagcgcgagcggggaatggagataagtcccatgtgcgacaagcataacgcatccgtggagaaatcccaggtcggcttcattgactatatagtccacccgctctgggagacatgggccgacctggtccatcctgacgcccaagacatcttggataccctcgaagacaatcgtgagtggtaccaatcaacgattccacagtccccaagtccagccccagacgaccctgaagaaggaaggcaaggacagaccgaaaaattccagttcgagttgaccctggaagaagacggcgagtcagacaccgaaaaggactcaggctcccaagttgaggaagacacttcctgcagcgacagcaaaactctatgtactcaggactcagaatcgactgaaatcccgctggatgaacaggtggaggaggaagccgtgggggaggaggaggagagtcagcctgaggcctgcgtgattgacgataggtctcctgatacctag

SEQ ID NO: 234741 - DNA, 2502 bp, synthetic construct
  misc_feature 1..2502: note = Description of Artificial Sequence: Synthetic coding sequence
  source 1..2502: mol_type = other DNA
atgctgccctttggggacaaaacaagggaaatggtgaacgcctggttcgccgaacgcgttcacacaattccggtctgcaaggagggtataagaggccacaccgagagctgctcctgccctcttcagcaatcccccagagccgataactcagcccctggaacccctacccgcaagatttcagcatccgagttcgatagacccttgagacctattgtggttaaagactccgagggcaccgtaagcttcctctccgactcagagaaaaaggaacaaatgcctctgaccccacccagatttgaccacgatgagggggatcaatgttcaagactgctggaacttgtaaaggatatcagttcacacctcgacgtaactgcactttgccataaaatattcctacacatccatggcttgatttccgccgatcgctattctttatttctggtatgtgaggatagttcaaatgataaattcctgatttcacgactgtttgacgttgctgaaggctccacactggaggaggtgtctaacaattgtattagactcgagtggaataaggggatagtgggccatgtggctgctctgggcgagcccctaaacatcaaagacgcctatgaagatcccaggtttaacgccgaggtggatcaaataaccggttacaagacgcagagcatcctttgcatgcccattaaaaaccatcgggaggaagttgtgggagtagcccaggccatcaataaaaagtccggaaatggcggtacttttactgagaaggacgaaaaagacttcgccgcatacctcgcgttttgtggcattgtgctccataatgcccaactgtatgagacttctttgctggagaacaaaaggaaccaggtgctcctggacctagcatcgctgatcttcgaggagcaacagtcccttgaggtgattctcaaaaagattgcagccaccattatttcttttatgcaagtacagaagtgcacaatctttatcgtcgacgaagattgcagtgattccttcagcagcgtattccatatggagtgcgaggagctcgaaaaaagctctgataccctcacgcgggaacacgatgctaataagataaattatatgtatgcccaatacgtgaaaaacaccatggaaccccttaatatccccgacgtaagtaaagacaaaaggttcccatggacaaccgaaaacacgggaaacgtgaatcagcagtgcattcgttctctgttatgcactccgatcaagaatggaaagaagaataaggtgatcggcgtgtgtcagctggtgaacaaaatggaggaaaatacaggaaaggtgaaaccttttaatcgaaacgacgaacagttcctagaggcattcgtgatattttgtggtttgggaatacagaacacccagatgtacgaagccgtggagcgggctatggccaagcagatggtgacgctggaagtgttaagttaccacgcgagcgctgcagaagaggagacaagagaactgcaaagtctggccgctgctgttgttcctagcgcccagacgctaaaaattacagacttctctttcagcgacttcgagctgagcgatctggagacggccctttgcacgattagaatgttcaccgatctaaatctggttcagaacttccagatgaaacatgaagtcctctgccggtggattttatcagtgaagaaaaactaccgcaagaatgtagcgtatcacaattggcgtcatgctttcaacacagctcaatgtatgtttgctgctcttaaagcaggcaagatccagaacaagctgaccgacttggaaatcctcgctcttctcattgccgctctctcccacgatctcgatcaccgaggtgtcaacaacagttacattcagaggtccgagcatcccctcgcccagctgtactgtcactccatcatggagcaccaccactttgaccagtgcctgatgatcctgaactcccctggcaaccagatcctgagcggactgtccatcgaggaatacaagacaacccttaaaattatcaaacaagcaatcttagcgacagacttagcattgtacatcaagcgacgaggcgagtttttcgagttaattcgaaagaatcagttcaacttggaggatccgcaccagaaggagctgttcctggccatgttgatgaccgcgtgtgatctctcggctatcactaaaccctggccaatccaacagcgaattgccgaactggtcgccacagagttcttcgaccagggggacagggagcggaaagagctgaatattgaacctaccgatcttatgaacagagagaagaaaaacaagatcccctcgatgcaagtaggctttatagatgctatctgtctgcagttgtatgaggcactgactcacgtgtcagaggattgcttccctcttcttgacggctgcagaaagaatcgacaaaagtggcaggctctcgccgagcagcaagaaaagatgttgataaacggagaaagtggccaggcaaaacgcaattag

SEQ ID NO: 234742 - DNA, 2628 bp, synthetic construct
  misc_feature 1..2628: note = Description of Artificial Sequence: Synthetic coding sequence
  source 1..2628: mol_type = other DNA
atggagagggctggaccgagctttggacagcaaaggcaacagcaacagccccagcaacagaaacagcagcagagagaccaggactcagtggaagcctggctcgatgaccactgggattttacgtttagttattttgtgcgcaaagccactagggaaatggtgaatgcctggttcgcagagagggtgcacaccatcccagtgtgcaaggaggggataagggggcatacagagagctgcagctgcccattacaacagtcccctcgcgctgataattcagccccaggtactccaacccggaagatttcggcctccgaattcgatcggcctctgcgccctatcgtggttaaagactcagagggcacagtgtcttttttaagcgactcagaaaaaaaggagcaaatgcccctgactcccccacgctttgaccacgatgaaggagaccagtgctcccgactgctcgaactggtgaaagacatatccagccacctggatgttactgccctctgccataagattttcttgcacatccacgggctgattagtgccgacagatatagtctgttcctggtgtgcgaggactctagcaacgacaaatttctgataagcagattattcgatgtggctgagggatcaactctggaggaggtcagcaataactgcattcgcctcgagtggaataaggggatcgtgggccatgtcgccgctctgggggagccattgaacattaaggatgcctatgaagatccaagattcaatgctgaggtagaccagataacaggttacaagacacagagtattctgtgcatgcctatcaaaaaccatcgggaggaagttgttggtgtagcgcaggcgatcaataaaaagagcggaaatggaggtacattcaccgagaaggatgagaaggatttcgccgcttatctggccttctgcggtatcgtcctccataacgcacaattatacgaaacgtccctcttggaaaacaagcgcaatcaggtcctgctcgaccttgcatctctgatcttcgaggagcagcagtctcttgaagtaatcctcaaaaagattgctgccaccatcattagcttcatgcaggtgcaaaagtgcacaatcttcatcgttgatgaggattgctcagacagcttttccagcgtctttcacatggaatgcgaggaactggagaaaagctccgacaccctaacacgggagcacgacgcaaataagatcaactacatgtatgcacagtacgtgaagaacactatggagcctctgaacattcctgacgtgagcaaagataaaagattcccatggactacagaaaacactggcaacgtgaaccagcaatgcattaggagcctcctttgcacccccatcaagaacggaaagaagaacaaggtgataggagtatgtcagttagtgaataagatggaagaaaacacaggcaaggtgaaaccatttaatcgaaatgatgagcagtttttggaggccttcgtgatattctgcgggctcggcattcaaaatacccagatgtacgaagccgtggaacgcgcaatggccaaacagatggtgacgctggaggtgctttcataccacgcctccgccgctgaggaagaaactagagagctgcagagtctggctgctgccgtagtaccttccgcacagaccctgaaaatcaccgacttctcattttccgatttcgagctgtcggatcttgagactgccctttgcactattcgcatgtttacggatctgaatctggttcaaaatttccagatgaagcacgaagtcctgtgccgctggattctctccgttaaaaaaaattacagaaagaatgtggcataccacaattggagacacgccttcaacactgctcagtgcatgttcgctgccttgaaggccggtaaaattcaaaacaagctgaccgacttagaaatcctagcgttgcttatcgccgcactttcacatgacctggatcaccgaggggtcaacaactcctatatccagcgaagtgagcatcctctcgcccagctgtactgtcactccattatggaacatcatcacttcgaccagtgtctcatgattctcaacagtcctggaaatcaaatccttagcggtttgtccattgaggaatacaagaccacgcttaaaatcattaaacaggctattctggcgaccgacctggccctctacatcaaaaggagaggtgagttctttgagcttattagaaagaaccagtttaacctggaggatccccaccagaaagaactgttcctggctatgctcatgacagcatgtgatctctccgcaatcacaaagccttggcccatccaacagaggattgccgaactcgtggccactgaattcttcgatcagggggatcgtgaacgaaaagaactgaatatcgagcccaccgacctgatgaacagggaaaaaaaaaacaagatcccatccatgcaagtgggcttcatagacgctatctgtctgcagctttatgaggccttgacccacgtgtctgaggactgttttcccctcctcgacggatgtagaaagaaccgccagaagtggcaggctctggctgaacagcaggaaaagatgttaattaacggggaaagcggccaggcgaagcgaaactag

SEQ ID NO: 234743 - DNA, 2472 bp, synthetic construct
  misc_feature 1..2472: note = Description of Artificial Sequence: Synthetic coding sequence
  source 1..2472: mol_type = other DNA
atggtgaacgcctggttcgccgagcgagtacatacgatccctgtatgcaaagagggcatacggggacatacggaatcctgctcctgccctctccagcagtcacccagagcagacaattccgctcctggaacacccactcgcaagatatcagcaagtgagttcgacaggccgcttagacctatcgttgttaaagattcagagggcacagtctcatttcttagtgactcagagaagaaggaacaaatgcctcttacccctcctcgcttcgaccatgacgagggggatcagtgcagtaggctcttggagctggtgaaagacatatcctcacacctcgatgtgactgctttgtgccacaagatctttttacacattcatggcctaatcagcgccgataggtattctctattcttggtatgcgaggacagcagtaatgacaagttcttaatcagccgactgtttgacgtggcggagggctcgaccctggaggaagtatcaaataactgcatccggctggaatggaacaagggaatcgtgggccacgtcgcagcattaggtgagcctttaaatatcaaggatgcttacgaagacccccgtttcaacgccgaagtggatcagataaccggatacaagactcaaagcatcctatgcatgcccatcaaaaaccatcgtgaggaggtcgtcggagtagctcaggccatcaacaagaaaagcgggaacgggggaacttttacagagaaagacgagaaagatttcgccgcataccttgccttttgtggcatcgtgttgcataatgcccagttgtatgaaaccagtctgcttgagaacaagaggaaccaggtgctgcttgacttagcgtctcttatcttcgaggagcagcagtcactggaagtgatcctcaagaaaatcgcagctactatcatttcgtttatgcaggtccagaaatgtaccatctttatcgtcgacgaagactgctccgattcgttttctagcgtgttccacatggaatgtgaggaactcgagaagagcagtgacacattgacaagagaacacgatgcaaacaaaatcaattatatgtacgctcagtatgtaaaaaataccatggagccactgaacatcccagatgtcagtaaggataagagattcccatggacaacagaaaacactggtaacgttaaccaacaatgcataaggtcattgctttgtaccccaataaaaaatggcaaaaaaaacaaagtgatcggcgtctgtcagctcgtaaataaaatggaagagaacacaggcaaggtgaaacccttcaaccgcaacgatgagcagtttctggaggcttttgttatcttctgcggactgggaattcagaatacccagatgtacgaggccgtggagcgtgcgatggccaagcagatggtcaccctggaagttctgtcataccacgcaagcgccgcagaagaagaaactcgagagttacagtcattagctgccgctgtcgttccgtcggcacagaccctcaaaatcacagacttttccttttctgacttcgaattgtccgacctggagaccgccctgtgcactataagaatgttcacagacttgaacttggttcagaattttcagatgaagcacgaggtgctgtgtcgatggatcttgtcagtgaaaaaaaactatagaaagaatgtggcctaccacaactggcgtcatgccttcaacactgcccagtgtatgttcgctgcactcaaagcagggaagattcagaataaactcactgacttagagatattagccctgttgatagctgcgctctcacacgacctggaccaccggggagtgaataactcctatatccagcgcagtgagcatcctttagcacagctatattgtcactctattatggagcatcatcactttgaccaatgtctgatgatacttaattctcctggaaaccaaattctctccggcctgagcattgaggaatacaagacgacactcaagataatcaagcaggccatacttgccaccgacttagctctgtacatcaagcgaaggggtgagttctttgaactgatccgaaagaaccaatttaatctggaagaccctcatcaaaaggaactttttcttgcgatgctcatgactgcttgcgacttatccgccattacaaaaccctggccgattcagcagagaattgctgagttggtggcaaccgagttttttgaccaaggcgatcgtgaaaggaaggaactgaacatcgaacccactgatctcatgaaccgagaaaagaaaaataagattccttctatgcaggtcggcttcatcgacgccatatgcttacagttgtatgaggccctgacccacgtgagcgaggattgcttccctctactggacggctgtcgtaagaatagacagaagtggcaagcgcttgccgaacagcaagagaaaatgctgattaatggagaaagtggacaagccaagagaaattag

SEQ ID NO: 234744 - DNA, 2583 bp, synthetic construct
  misc_feature 1..2583: note = Description of Artificial Sequence: Synthetic coding sequence
  source 1..2583: mol_type = other DNA
atgggggaagtcacagccgaggaagttgaaaaattcctggatagtaatataggtttcgccaagcagtactacaatctgcattatcgggcaaaactgatttccgacctgttgggcgctaaagaagctgccgttgatttttctaattaccacagcccatcatctatggaagaatctgagatcattttcgacctcttgagagacttccaggaaaaccttcagactgagaaatgcatattcaacgtgatgaagaaactgtgctttctgctacaggctgaccgtatgtctcttttcatgtacagaaccagaaacgggattgcagagttggcaaccagactcttcaacgtgcacaaagacgcagtactggaggattgtttagtgatgccagatcaagaaatcgtgtttcctctcgatatgggcatcgttggccatgtggcgcacagcaaaaagatagcaaacgtgccaaataccgaggaggatgagcatttttgtgatttcgtagacatcctcacagaatacaaaacaaaaaatattcttgcgagtccgattatgaacggtaaagatgtggtggctattattatggcggtcaacaaggtcgacggaagccacttcacaaagagagatgaggaaatacttctgaaatacctgaacttcgctaacctgataatgaaggtataccatttaagctatcttcacaactgtgagaccaggagaggccaaattctgttatggtctggttcaaaggtctttgaggaattgaccgatatagagcgtcagttccataaggcattgtacacagtccgagccttcctgaactgcgatcgctacagtgtaggactgctggatatgaccaagcagaaagaattttttgatgtttggccggtactcatgggcgaggttccaccttactcgggcccacgcactcccgacggccgagaaatcaatttctataaggtgatagattacattctgcacggaaaggaggacattaaggttatcccaaatcctcctccagatcattgggcgctggtgagcgggctgccggcatatgtggcacagaacggattgatctgcaatatcatgaacgctcctgcagaggatttcttcgctttccagaaggagcccctcgacgaaagcggatggatgatcaagaatgtgcttagcatgcccattgtcaataaaaaagaagagattgtcggcgttgcaactttctacaacagaaaggatgggaagccttttgatgagatggacgagaccctgatggagagtctaacgcagttcttaggctggtcagtcctgaatcctgatacatacgagagtatgaataaattggagaacagaaaggacatttttcaagatattgtgaagtaccacgtcaaatgcgacaacgaagagattcagaaaatcttgaagacaagagaggtgtacggcaaggagccctgggaatgcgaggaggaggaattggccgagatactgcaggcggaattgccagacgccgacaagtatgagattaataagtttcacttcagcgacctgcctctgactgagttggagctagtcaaatgtggcatccagatgtactatgagctgaaagtagttgacaaattccacatcccccaagaagccttggtgcgtttcatgtacagtctgtccaaggggtatcggaagattacgtatcataattggagacacggcttcaacgttggtcagacaatgtttagcctgttggtcaccggcaagctaaaaaggtattttactgacttggaagccctcgctatggtgaccgcagccttttgccatgacatcgaccacaggggaaccaacaacctctaccagatgaagagccagaatcccctcgcaaagctccatggatctagcatcctcgaaaggcaccaccttgagtttgggaaaaccctgcttagagacgagagcctgaacatctttcagaatctgaatcggcgtcagcacgaacacgctatacatatgatggatatcgcaatcatcgctactgatctggccctctattttaagaaacggacaatgttccagaaaattgtggaccagagcaagacttatgagtctgaacaagagtggacacagtacatgatgttggagcagactcggaaggagattgtgatggcgatgatgatgacagcctgtgacttgtctgcaatcacgaagccctgggaagtccagtcacaagtcgccctactcgtggctgcagaattttgggagcagggcgacttggagaggactgtgctgcaacagaacccaataccgatgatggatcggaacaaagccgatgagctgcctaagctccaggtcggcttcatcgacttcgtctgtaccttcgtttataaagaatttagtcgatttcacgaagagatcacacccatgctggatggcattacgaataatcgaaaagaatggaaggcactggccgacgaatatgacgctaagatgaaggttcaggaagagaaaaaacagaaacagcaatctgctaaatcagcggctgccggtaaccagccgggaggaaatccctctccagggggagcaacaaccagtaaaagttgctgcatccaatag

SEQ ID NO: 234745 - DNA, 1728 bp, synthetic construct
  misc_feature 1..1728: note = Description of Artificial Sequence: Synthetic coding sequence
  source 1..1728: mol_type = other DNA
atgacaaaggagaaggaatttttcgacgtctggagtgtcttaatgggcgagtcccagccctactccggtcccaggacaccagacggaagagagatcgtgttctataaagtgatcgactacgtgctgcacggtaaggaagagattaaggtgatcccaactcccagtgcggatcactgggcactggcgagtggcctgccaagctacgtggcggaatccgggttcatatgcaatatcatgaacgcaagcgcagatgaaatgttcaagtttcaagaaggggctctggatgattccgggtggctcatcaaaaatgtgctcagtatgccaatcgtgaataagaaggaagagattgtgggcgtggctacattctacaatagaaaggacggcaaaccttttgacgagcaggacgaggtgctgatggaatccttgacgcaattcctaggctggagtgtaatgaatactgacacttatgacaaaatgaacaagctggaaaatcgaaaggacatcgcacaagacatggtgctgtatcacgtgaagtgcgatagggatgagatccagctgatcctgccgacgcgagccaggctcggaaaagaacccgctgattgcgatgaggacgagctcggagagattctcaaagaggaactcccaggacccacaaccttcgatatttatgaatttcatttttccgatttggagtgtacggagttggatcttgtgaagtgcgggattcagatgtactatgaattaggggtcgtacgcaagttccaaatccctcaggaagtgctagttagatttctcttctcgatcagtaagggatatagaaggatcacgtaccataactggcgacacggattcaacgttgcccagaccatgttcacgctccttatgaccggaaagctgaaaagctattacacagacctagaggcattcgccatggttactgccggtttatgtcatgacatcgaccaccggggaacaaacaatctctatcaaatgaagtcccagaacccactggccaagcttcatggtagctccattctggagcgtcaccaccttgagttcggtaaatttctgctcagcgaggagactctcaacatttaccagaacctgaaccgtcggcagcacgagcacgtcatccacctaatggacattgcaatcatagccacagacctggcgctctactttaagaagcgagccatgttccagaagatagtcgacgagtcgaaaaactatcaagataaaaaatcatgggttgagtatttatcccttgaaaccacgcggaaggagatagtgatggccatgatgatgaccgcatgcgatctgagcgctattacaaaaccctgggaggtgcagagcaaggtggctcttctggtagcagccgagttttgggaacagggagatctcgaaaggaccgtcctggaccagcaaccaatcccaatgatggacagaaataaagccgcagaactccctaaattgcaggtgggctttattgatttcgtgtgcactttcgtgtacaaggaattttctcgtttccatgaagaaattctgccaatgtttgaccggctccagaacaataggaaagaatggaaagccctggcggacgagtatgaagcgaaggtgaaggctctggaagaaaaggaggaggaagaacgtgttgccgcaaagaaggtcgggacagagatttgcaacgggggacccgcacctaagtcttctacctgttgtatactttag

SEQ ID NO: 234746 - DNA, 2562 bp, synthetic construct
  misc_feature 1..2562: note = Description of Artificial Sequence: Synthetic coding sequence
  source 1..2562: mol_type = other DNA
atgagtctctcagaagaacaggcccgatcatttctcgaccagaatcccgattttgctagacagtactttggcaaaaaattgtcaccagagaacgtggccgcagcatgcgaagacggctgcccaccagactgtgatagtttgcgcgacttgtgccaagttgaggaatccaccgcactgcttgaactggtccaggacatgcaggaatccataaacatggagagggtcgtgtttaaagtgctgcggcgactttgtacattattgcaagctgacagatgcagcctgttcatgtatcgccagcgtaacggggtggccgagctggcaacccgtctgttttccgtccagcctgatagtgttcttgaggattgcttagtgccccctgacagcgaaattgtgttccccctggatatcggggtagtggggcatgtcgcacagaccaagaagatggtgaatgtggaagacgtggcagagtgcccacatttctccagttttgcagacgagctcacggactataaaaccaaaaatatgctggctaccccgataatgaacggaaaagatgttgttgctgtcatcatggctgttaataaactgaacgggcctttctttacatccgaagacgaggatgtcttcctcaaataccttaatttcgccactctttatttaaaaatataccacctgtcgtatctgcataattgtgaaactcggcgaggccaggttctgctttggtcagcaaacaaagtgttcgaagagctgaccgacatagagagacaattccataaggcgttttataccgttcgggcttatctcaactgcgaaagatacagcgtagggctactggacatgaccaaggagaaggaattttttgatgtttggtccgtgctgatgggcgaatctcaaccatactccggaccacggacccccgacggtagagaaatcgtattttacaaggtcatcgactatgtgctacatggtaaggaagagattaaggtcatccctacaccatccgccgaccactgggccctggcatcaggactgccctcctacgtggcagagagtggcttcatttgtaatatcatgaacgcgtccgcagacgagatgttcaaattccaagaaggagccctggacgattcggggtggctgataaagaacgtgctgtcgatgccaatagtgaataagaaggaggagatagtcggagttgcgaccttctacaatcgaaaggatggaaaacctttcgacgaacaagatgaggttttaatggagagtctcacccagttcctaggctggtccgttatgaacacagatacatacgataaaatgaacaaacttgaaaatcgtaaagatatcgcacaggatatggtgctctaccacgttaaatgcgatcgggacgaaattcagctgatccttcctacccgggctagactggggaaggagccggctgactgtgacgaagacgagctgggagagatcttgaaggaagaactgccaggcccaaccactttcgatatctatgagttccatttctctgacctggaatgcaccgaacttgaccttgtgaaatgtggtatacaaatgtactacgagctgggcgtggtgcgtaaattccaaattccacaggaagtgttggttcgctttctattttccatttccaaagggtaccgaagaataacctaccacaactggcgacacgggttcaacgtggcccagacgatgttcacccttttgatgaccggaaagctgaaatcatactataccgacctggaggcgtttgccatggtcactgccggactgtgccatgacattgatcacaggggtacgaataatctctaccaaatgaaaagccagaacccattggccaagttacacgggtccagtatcctggaaaggcaccatcttgagttcggtaaatttctcctgtctgaggaaacattaaacatctaccagaaccttaatcgtcgtcagcacgagcacgtgatccatctaatggatattgccattattgccactgatctagcgttatacttcaagaaacgggctatgttccaaaagatcgttgacgaatcgaaaaattatcaggacaagaaaagctgggttgagtatttgtccttagagacaactaggaaggaaattgtgatggccatgatgatgaccgcctgcgatctatctgcaatcacaaagccatgggaagtgcagtccaaggttgccctcctggttgccgcagagttttgggagcagggcgacttggagagaacagtccttgatcagcagccaatcccaatgatggaccggaacaaagcagctgagttacccaaactgcaggtaggattcatcgatttcgtgtgcacctttgtatacaaagaattctcacgcttccatgaggaaattctgccgatgttcgatcgtcttcagaacaacaggaaggagtggaaagccttggcggacgaatacgaggctaaagtgaaagcattggaagaaaaggaggaagaagaacgggttgccgctaaaaaaggaaccgaaatttgcaatggcggacctgctcccaagtcttctacttgttgcatcctgtag

SEQ ID NO: 234747 - DNA, 2565 bp, synthetic construct
  misc_feature 1..2565: note = Description of Artificial Sequence: Synthetic coding sequence
  source 1..2565: mol_type = other DNA
atgagcctcagtgaggagcaagccaggtccttcctggaccagaaccctgacttcgcaaggcagtatttcggcaagaaactgtctccagaaaacgtggcagcggcatgtgaggatggctgtccccctgactgcgattcccttcgtgacctttgccaggtggaggagtctaccgctctcctggaactggtgcaggatatgcaggaatctataaatatggagcgggtcgtctttaaggttctgaggcgcttgtgcacactccttcaggcagaccgttgtagtctgttcatgtatcgacagaggaatggagtggccgagttggccacgcggcttttttccgtgcagcctgacagcgtgctggaggattgtctggtgccacctgactcggagatagtgttccctctggacatcggggtcgtaggtcacgtcgcccaaactaagaagatggtgaacgtagaggatgttgcagagtgtccacacttctcatcctttgcagatgagctgaccgactataagacaaaaaacatgctcgcgacacccattatgaacgggaaagatgttgtcgcagtgataatggccgtgaataagctcaacggcccttttttcaccagcgaggacgaggatgtgttcttgaagtaccttaactttgccactctttatttgaaaatttaccaccttagttatctgcacaattgcgaaactcgtcgcggacaggtgcttctttggtcagcaaacaaagtattcgaagagctaaccgatattgagcgccagtttcataaggcattctacacggtcagagcgtaccttaactgcgagcgctactctgttgggctgctcgacatgactaaagagaaagagttctttgatgtgtggtctgtgttgatgggagaatctcagccatactctggccctaggacgccggatgggagagaaatcgtattttacaaggttatagattatgtgctgcacggcaaagaggagatcaaggtgattcccaccccctctgccgatcactgggccctggccagcggcctaccttcgtacgtggccgagagtggctttatctgtaacattatgaacgctagtgccgatgaaatgtttaagttccaggagggtgccctggacgattcaggctggctgatcaaaaatgtcttgtctatgccaatcgtgaataaaaaagaagaaatcgtgggggtggcaacattttacaacagaaaagacgggaagccgttcgatgagcaggatgaagtgttaatggagtcacttactcagttccttgggtggtccgtcatgaatacagacacatatgataagatgaacaagcttgaaaatcgaaaggacatcgctcaagacatggttctttatcatgtcaagtgcgaccgcgatgagattcagttgattctcccgacccgggcacgattagggaaggagccggctgactgcgacgaagatgagttaggagaaatcttgaaagaagaactccctggcccaacaacctttgacatatatgagttccacttcagtgacctcgaatgcacagagctggaccttgttaagtgcggaatccagatgtattatgagctcggagtggtgagaaaatttcaaatcccgcaggaggtgctggtccgatttttattcagcattagtaagggctatcggcgtattacttaccacaattggagacatggctttaatgttgcacagaccatgttcaccctcttgatgaccggtaagctgaagtcctattatacagacctggaggctttcgcaatggttaccgccggtctgtgtcatgatatcgatcacagaggtaccaacaacctgtaccagatgaagagccaaaatcccctggctaaattgcacgggtccagtatcttggagaggcaccacctcgaatttggaaagttcctgctcagcgaggaaaccctgaatatataccaaaatttaaaccggaggcaacatgagcacgtaatacatctgatggatatcgccataattgccaccgacttggcgctctactttaaaaaacgggcaatgttccagaaaattgtcgatgaaagtaaaaactaccaggacaaaaagtcctgggtggagtacctgtcacttgagaccacaagaaaggagattgtcatggctatgatgatgaccgcttgtgacctgtcagccataaccaagccctgggaagtgcagagcaaagttgcccttctggtagcagccgagttttgggagcagggtgacctcgaaaggaccgtgttggatcagcagccaatccctatgatggatcgcaacaaggccgctgagctgcctaagttacaggttggattcatcgatttcgtgtgcacttttgtatataaagaattcagtcggttccatgaagagattctcccaatgttcgatagacttcagaataatagaaaggagtggaaagctctagcagacgaatacgaggcaaaggtgaaggcgctggaagagaaggaggaggaggaaagagtagccgcaaagaaggtcgggactgagatctgtaatggcggtccagctcccaagagttctacttgttgtatactgtag

SEQ ID NO: 234748 - DNA, 2577 bp, synthetic construct
  misc_feature 1..2577: note = Description of Artificial Sequence: Synthetic coding sequence
  source 1..2577: mol_type = other DNA
atgggggaaatcaatcaagtggccgtagagaaatatcttgaagagaacccacaatttgctaaggagtacttcgacagaaagctgcgcgtagaggtgttgggtgagatcttcaaaaatagtcaggtgcctgtgcagtctagcatgtcctttagcgagctcacccaagtcgaggagagtgcactttgtcttgaactcctgtggaccgtccaggaagaaggaggtacgccggaacagggcgtgcatagagcgctacaacggctcgctcatctcttgcaggcagaccgctgtagcatgtttctctgccgctcaaggaacggtattcccgaagtagcctctaggctgctggacgtaactccaacatcaaagttcgaggataatctcgtaggtcctgacaaggaagtggtgttccctctggacatcgggatagtggggtgggcggcacacacgaagaaaacccacaatgtgcctgatgtcaagaagaactctcacttctccgattttatggacaagcagacgggctatgtgacgaagaaccttctcgcgactcccatcgtggtggggaaggaagtgctggcagtcatcatggccgtgaataaggttaatgcaagcgagttttctaagcaggatgaagaggtcttttccaaatatctgaattttgtctccatcatccttaggctgcatcacacaagctacatgtacaacattgagtcacggaggtcccagatccttatgtggagtgcaaataaggtgttcgaggagctcaccgacgtagagcgccaattccacaaggccctgtacacggtcagatcctacctcaattgtgagaggtacagtattggactgttggatatgactaaggagaaagagttctacgatgaatggcccattaagctgggcgaagttgagccatacaaaggccctaagacacccgatggacgggaagtaaacttttacaagatcatcgattatatcctgcacggtaaagaagaaattaaggtgatccctacccctcctgcagaccattggacccttatcagcggacttcctacatacgtggcagagaacgggtttatatgcaatatgatgaacgctcctgccgatgagtacttcactttccagaagggccctgtagacgagacaggatgggtaataaagaacgtattaagccttccaatcgtcaataagaaagaggacatcgtgggagtggccaccttctataatcgaaaggatgggaaaccatttgatgaacacgatgaatatataactgagacactgacccagtttcttggctggtctctgctgaacaccgacacttacgacaaaatgaataagttagaaaacaggaaagacatcgcccaggaaatgcttatgaatcagactaaggctactcctgaagaaattaagagcatattgaaatttcaagagaagttaaacgtagacgtgatcgatgattgtgaggagaagcaactggttgccatcttaaaggaggatctccccgacccccgatctgccgagctatatgagttccggtttagcgacttccccctgactgaacatggattgattaaatgtggtatccggttattcttcgaaataaatgtggtagagaagttcaaagtcccagtagaggtgctcaccaggtggatgtacacagtgcggaagggatacagggctgtaacgtaccataactggagacacggctttaacgttgggcaaactatgtttaccttgctgatgactggcaggctcaaaaaatattacacggatctggaggcgtttgcgatgctcgctgctgcattttgtcacgacattgaccatcgaggaacaaacaacctatatcagatgaagagcacatcaccgctggccaggcttcatggtagctcaatcctggagcgccaccatctcgaatattcaaagacgttactgcaggacgaaagcctgaatatctttcagaacctgaacaagagacagttcgagactgtgattcacctcttcgaggtggcaatcatcgccacagatttagctctgtacttcaaaaagcgcaccatgttccagaagatagttgacgcctgcgagcagatgcagactgaggaagaggccattaagtatgttactgtcgatccgaccaagaaggaaattataatggctatgatgatgaccgcatgtgacctctctgctattactaagccttgggaggtacagtcccaggttgcgctcatggttgcaaatgaattttgggagcagggcgatttggagcgcacagtcctccagcaacaacccattcctatgatggaccgcaataagcgggatgaactacctaaattgcaggtgggctttattgactttgtgtgtacgttcgtgtacaaggaattttcgcggttccataaagagataacaccaatgctgagtggactccagaataatcgggttgaatggaagtcattggcagatgaatatgatgcgaagatgaaggtaatcgaagaggaggccaaaaagcaggagggcggagcagagaaggcggctgaagactctggaggcggtgatgataagaagagcaaaacctgccttatgctgtag

SEQ ID NO: 234749 - DNA, 453 bp, synthetic construct
  misc_feature 1..453: note = Description of Artificial Sequence: Synthetic coding sequence
  source 1..453: mol_type = other DNA
atgagcgcaaaggacgagagggccagggaaatcctgagaggcttcaagctgaactggatgaacttacgcgacgccgagacaggcaagattctgtggcagggaactgaagacctgtccgtgcctggggttgagcatgaggctcgcgtgccaaagaagatcctgaagtgcaaagcggtgtccagagagctgaatttttcctctactgaacaaatggaaaagttccgactggagcagaaggtctacttcaaaggtcagtgcctggaagaatggttcttcgaatttgggtttgtcatccctaactccactaacacatggcaaagtcttattgaggccgctcctgagtcccagatgatgcccgcttctgtacttaccgggaacgttatcatcgagaccaaattcttcgacgatgatctcttagtgtccacatcaagggtgagacttttttatgtgtag

SEQ ID NO: 234750 - DNA, 414 bp, synthetic construct
  misc_feature 1..414: note = Description of Artificial Sequence: Synthetic coding sequence
  source 1..414: mol_type = other DNA
atgaagcaacgggacaaaggtcgaggctggcaccccgctgagggtggacctgctctgaccgctcaacctcccgaaactaggcctgccctggaccggtcccgacgcgagagccgatcccagggctgccggggagtcagcgttagcttaacaatgaatctcgagcctccaaaagctgagtttcgctctgcaacccgagtcgcaggcggacccgtcacaccgagaaagggtcccccaaagttcaagcagcgacaaacacggcaattcaagagcaagcccccaaaaaaaggagtgcagggctttggggatgatataccaggaatggagggtctgggaacggatatcacagtcatttgtccttgggaagcgtttaatcacttagagttacacgagctggcacaatacggaatcatatag

SEQ ID NO: 234751 - DNA, 264 bp, synthetic construct
  misc_feature 1..264: note = Description of Artificial Sequence: Synthetic coding sequence
  source 1..264: mol_type = other DNA
atgaatctggaacctcctaaggctgagtttagatccgcaacgcgagtggctggcggacccgtcacccctcgcaagggtcccccaaagttcaaacagaggcagactcgccagttcaagagtaagccccctaagaaaggagtgcagggattcggggatgatatccccggtatggagggactgggaactgacatcacagtgatttgcccctgggaggcatttaatcacctggagctccacgagctagcccagtatggcattatttag

SEQ ID NO: 234752 - DNA, 252 bp, synthetic construct
  misc_feature 1..252: note = Description of Artificial Sequence: Synthetic coding sequence
  source 1..252: mol_type = other DNA
atgagtgacaatactactctaccagctcctgcatctaatcaagggcctaccacccccagaaaggggcctcccaagtttaaacagagacagacaaggcagttcaaatccaagcctccaaagaagggcgtcaaggggtttggggatgatatccccggtatggaaggcttgggcaccgacattacagtgatatgtccttgggaggcctttagtcacctggagctccacgaactagctcaatttgggatcatttag

SEQ ID NO: 234753 - DNA, 1371 bp, synthetic construct
  misc_feature 1..1371: note = Description of Artificial Sequence: Synthetic coding sequence
  source 1..1371: mol_type = other DNA
atgggcatcaccttaatctggtgcctggcacttgtccttattaagtggatcacaagcaaacgaagaggagcaatatcctacgactcttccgaccagacagccctttacattaggatgctgggcgacgtgcgggtccggtcccgggcagggttcgagtctgaacgcaggggaagtcatccctacatcgattttcggattttccatagtcaatctgaaattgaggtgagcgtttctgcaagaaatattaggagactgctttctttccagcgatacctgcgatcatcacggttcttccggggtacggctgtctctaactcgctgaacattctggacgatgactacaacggtcaggcaaaatgtatgttggagaaagtgggcaactggaattttgacatcttcttattcgaccgcctgactaacggcaactcgcttgttagtctgacatttcatctgttctctttacacggactgatagaatattttcatctcgatatgatgaaattaaggaggttcttggtgatgattcaggaggactatcatagccagaacccctaccacaatgccgtgcacgccgctgacgtgacacaggccatgcattgttatcttaaggagcccaagctggctaattccgtaacgccatgggacatcttgctctccctgatcgccgcagccactcacgatctcgaccatcccggtgtgaatcagcctttcctgatcaaaacaaatcactacctggccaccctatacaaaaatactagcgtcctggagaatcatcactggcgctcagccgtaggactgctgcgcgaatccggactgttctcccatctgcccttagaatctcgtcagcagatggaaacacagatcggcgcactgatcctggccactgatatcagtcggcagaacgaatacctttccctattcagatcacacctggacaggggcgacctttgtctcgaggacacacgccaccgacatttggtgttacagatggccttaaaatgcgccgatatctgcaacccctgtcgcacttgggagctcagtaaacaatggtcagagaaggtgactgaggaattttttcatcaaggtgacattgagaaaaaataccacctgggggtcagcccattatgcgaccgacatactgagtccatcgctaatatacagattgggttcatgacatacctcgtcgaacccctgttcactgagtgggctcgattctcgaacacaagactatcccagaccatgctcggacatgtggggttgaacaaagcttcttggaagggtctccaaagggagcagtctagcagcgaagataccgacgctgctttcgagctaaattcacagctactgcctcaggagaacagactcagctag

SEQ ID NO: 234754 - DNA, 1275 bp, synthetic construct
  misc_feature 1..1275: note = Description of Artificial Sequence: Synthetic coding sequence
  source 1..1275: mol_type = other DNA
atggaggtgtgctatcagttgcctgtgctgccccttgatcgccctgtaccacaacacgttctatcccgcagaggtgccatctccttctcgagcagtagtgctctgttcggttgcccaaatccacgtcagctcagccagcgccgaggggctatctcctatgacagctcggatcagaccgctctgtatataagaatgctcggcgatgtcagagtccggagcagagctggattcgagtccgaacgcaggggatcacatccttatatagatttcaggatttttcatagccagtctgagatcgaagtatccgtaagtgccaggaacatccgacgcctgttgtcgtttcagaggtatttgagatcctctagattctttcgcggaacggctgtgtcaaattcactcaatatcctcgacgacgactataatggtcaggccaaatgtatgctggaaaaggtggggaattggaatttcgatatctttctcttcgacagactgaccaacgggaatagccttgtctccttgacattccatctcttttctttacatggcctcatagaatatttccatctggatatgatgaagcttcggaggttcttggtcatgatccaggaggattaccactcacaaaatccctatcataacgccgtccacgcggcagacgtcacccaggctatgcactgctacctgaaggagcctaaactcgcaaacagcgtcaccccctgggacatattgctgagcctgattgcagccgcaactcacgacctggatcatcctggtgtgaaccaaccatttctgatcaaaaccaaccactacctcgccaccttatacaaaaacaccagcgtgcttgagaatcatcactggcgcagcgccgtcggcttgctaagggagagtgggcttttctcccacctacccttggagtcacggcagcagatggagacccagattggcgcactcatcctggccacggatattagccggcagaatgaatacctgtccctgttccggtcacatctggaccggggtgacttgtgcttggaagacacgcggcaccggcatctggtcctgcagatggccctgaaatgtgcagatatctgtaacccttgcaggacttgggagctttccaagcaatggtcagagaaagttaccgaagagttctttcatcaaggcgatattgaaaagaagtatcacctgggggtgtcaccactgtgcgaccgccacaccgaatcgattgccaacatccagatcggaaactatacctatttggatatcgctggctag

SEQ ID NO: 234755 - DNA, 1449 bp, synthetic construct
  misc_feature 1..1449: note = Description of Artificial Sequence: Synthetic coding sequence
  source 1..1449: mol_type = other DNA
atggaggtctgctatcaacttccagtcctgccattggatagacccgttccccagcacgttttgtcccgccgaggggctataagcttcagcagtagttctgcactgttcggctgccccaacccccgacaattgtctcagagacggggtgctatctcttacgacagctcagaccaaaccgcgctgtacataaggatgttgggtgacgtacgtgtgcggtcaagggcgggattcgagtctgagcggaggggctcacacccttacatcgactttcgcattttccattcgcagtccgaaatcgaagtgtccgtgtccgcaagaaatattcggagattacttagctttcagcggtatctgcggtcaagccgctttttccgcggtacagcggtctctaacagcctaaatatattagatgacgattataacggtcaggccaagtgcatgttggaaaaggtgggtaactggaacttcgatattttcctgttcgaccgactcaccaacggcaattccctggtgtctttaacattccacttgttctccctccatggactcattgaatactttcacctggatatgatgaagctgcgacggtttttggtgatgatacaggaggattatcactcccaaaatccctatcataatgcagttcacgctgcagacgtaacgcaagccatgcattgctatcttaaagaacccaagctggccaatagcgtgaccccctgggacatcctgctgagtctgatcgcagcggcaacccatgacctagaccaccccggagtaaatcagccatttctgattaagactaatcactacctagccactctctataaaaatacatccgtgctggaaaatcaccactggcgtagtgccgtgggtctattgagagagtctggattgttctctcatctaccacttgagtcacggcagcagatggagacccagattggcgctttaatactggctaccgatatctccagacagaacgagtatctgtctttatttcgaagccatctcgaccgcggtgatctgtgtctggaggatacccgccaccgacacctggttctacagatggcccttaagtgcgcagatatatgtaacccttgccgtacctgggagctttccaagcagtggagtgagaaagtgactgaagagttcttccatcagggagacatagaaaaaaagtaccatttaggggttagcccactatgtgacaggcacaccgagagcatcgccaatattcagatcggcttcatgacttatctggtcgagccactgttcaccgaatgggcgagattctccaacacgcggctgagccaaactatgctagggcatgtgggccttaacaaggcatcatggaagggattgcagcgggaacagtctagttccgaagacaccgatgctgcctttgagttgaacagccaactcttaccccaggaaaatcgtctgtcgtag

SEQ ID NO: 234756 - DNA, 2490 bp, synthetic construct
  misc_feature 1..2490: note = Description of Artificial Sequence: Synthetic coding sequence
  source 1..2490: mol_type = other DNA
atgggttgtgcaccaagcattcacattagcgagagactggtggctgaagacgctccttcacccgctgctcccccactgagttctggcggaccacgcttgcctcaaggccagaaaactgccgcactaccacggactcgcggtgcgggtctcctcgaatccgagctccgagacggctccggtaagaaagttgccgtagccgacgttcaattcgggccaatgagatttcatcaggaccagctgcaggtgctcttggtgtttacaaaagaggataaccaatgtaacggcttttgccgggcatgcgagaaagctgggttcaaatgcactgtgacaaaggaagcacaggccgtgctggcctgtttcctagataaacaccatgacatcatcatcatcgaccacagaaacccacgacagctggatgccgaggccttgtgtaggtctatcagatcaagtaagttgagtgaaaataccgtgattgtgggggtggtacggagggtcgaccgggaggaacttagcgtgatgcctttcatttccgctggatttactcggagatatgtcgaaaacccaaatatcatggcctgctataatgaactgcttcagctggaatttggggaagttcgttctcagctgaagctacgcgcatgcaatagtgtgtttactgctttagaaaacagtgaggacgccattgaaatcacctcagaggatcgctttatacagtatgccaatccagcgttcgaaacgactatgggataccagtctggggaattgatcggcaaggagcttggggaagtaccaatcaatgagaagaaagcagacctcctcgataccatcaattcatgcatccgcatcggcaaggaatggcaggggatatactatgctaaaaaaaaaaatggagataatattcagcagaacgtcaagatcatccctgtaattggccagggcggtaagatacgccattacgtaagcatcatcagagtgtgtaacgggaacaataaggccgagaagatcagcgagtgcgttcagagcgacacccatacagataaccagaccggcaagcacaaggatcgtcggaaggggtcattagatgtgaaggccgtggcctctcgagctacagaggttagttcccaacgcaggcatagctcaatggcccgaattcatagcatgactattgaggctcccatcaccaaagtgataaacatcataaacgctgctcaggaatcatcacccatgcctgtaaccgaagccctggaccgcgtgttggaaattctgcggaccacagagctctatagccctcagttcggtgccaaggacgatgacccacatgctaatgacctggtgggaggtttgatgagcgacgggctgagacgactgtccggaaatgagtatgttctgtccacgaaaaacacccagatggtgagttcgaatataattacccccatcagtttagacgatgtgccccctagaatagccagagccatggaaaacgaagaatactgggactttgatatcttcgagctcgaagccgctactcacaatcggcctttgatttatctggggctcaagatgttcgccaggttcggaatctgtgagttcctgcactgtagcgagtccacgctgaggtcatggctccaaattatcgaagccaactaccatagctctaacccttaccacaattctacacattcagccgacgtcttgcatgcgacagcctattttctgtcgaaagagcgtataaaggaaactcttgaccctattgatgaagtggccgcattgatagccgctacaatccacgacgtggaccacccgggacgaacaaatagcttcctgtgcaatgccggaagcgaactggccatcttatacaatgatacagcagtgcttgaaagtcaccatgctgcacttgcattccagttgactaccggcgatgacaaatgcaatatcttcaaaaacatggagagaaatgactatcgcactctgcgccaggggattatcgatatggtcctggcgaccgaaatgactaagcacttcgagcacgtgaataagttcgtgaacagtatcaataaaccactggccacactggaagagaatggggagacagacaagaaccaggaggtgatcaacacaatgctccggacacccgaaaatcgcacgctgatcaaacggatgctgattaagtgcgccgatgtgagtaatccctgtagaccccttcagtattgtatcgagtgggccgctaggatttcagaagaatatttcagccagacagatgaggaaaagcagcagggtcttccagtggtgatgcccgtgttcgacaggaacacatgcagtatccctaagtcccaaatttcatttatagattacttcatcactgacatgttcgacgcttgggacgcatttgtggacctccccgacctgatgcagcaccttgataacaactttaaatactggaaggggctcgatgagatgaagttaaggaacctgagacccccacctgagtag

SEQ ID NO: 234757 - DNA, 2352 bp, synthetic construct
  misc_feature 1..2352: note = Description of Artificial Sequence: Synthetic coding sequence
  source 1..2352: mol_type = other DNA
atgggctgcgccccatctatacatattagcgagagattagtggcagaggacgcaccatctcctgcagctccgccactgagctctggcggaccaaggctcccacagggacagaaaacagccgctctgccacggaccaggggcgctggcttgctggaaagtgagttgcgcgacggctcggggaagaaagtagccgtcgccgacgtccagtttggacctatgagattccatcaggatcaattgcaggttctattagtgttcacgaaggaggataaccagtgtaacgggttttgccgggcatgcgagaaagctggatttaagtgcacagtgactaaggaagcacaggcggtgctcgcttgcttcttggacaaacaccatgacatcatcataattgaccacaggaaccctagacagctggatgccgaagcactctgccgctctatccggagtagcaaattgtcagagaacacggtgattgtgggcgtcgtccgaagggtggaccgcgaggaattgtcagtgatgccctttataagcgctggctttacaagaaggtacgtcgaaaaccccaacataatggcgtgttacaacgagctattgcaactggagttcggggaggtgagatctcagctgaagttgagggcttgtaatagcgtcttcaccgctctagaaaattccgaggacgctatagagattacatccgaggatcggttcatacaggagtggcagggaatctactacgccaagaaaaagaatggggataacattcagcaaaacgttaaaattattccagtgatcggccagggcggaaagatccggcactatgtgagtattatccgcgtctgtaacggaaacaataaagccgagaaaatctcagaatgcgttcagtcggacacgcatactgacaatcagactgggaagcataaagatagaaggaagggaagcctcgacgtaaaagcagtcgcctcaagggcgaccgaggtgagctcccaaaggaggcattccagtatggcacggattcattccatgaccatcgaagccccaatcacaaaagtgatcaacattatcaatgctgcccaggaatcatcaccaatgcctgtaaccgaggctctggacagagtcctcgaaatccttcgtaccactgaactgtattcaccgcagttcggcgctaaggacgacgaccctcatgccaatgaccttgttggagggctgatgagcgacgggctgaggagattgtcgggtaatgagtacgtgttgagcacaaaaaacacacagatggtttccagcaacatcatcacacctatttcgctcgacgacgtcccccctagaatagcaagagctatggagaacgaagaatattgggacttcgatattttcgaacttgaagccgcaacccacaaccggccactgatctaccttggacttaaaatgttcgctcgatttggcatctgtgaatttttgcactgctccgagtccactctgaggtcatggctgcagattatcgaagccaactaccactctagcaacccctatcacaactcaactcacagcgcggacgtgctgcatgctacggcctatttcctctcaaaagaacggattaaagagactctagatcccattgatgaggttgctgcactaattgcggctaccatccatgacgtggaccaccctggaagaacaaactcatttctgtgtaacgcagggagtgaactggccattctgtacaacgatacagccgtactggagagtcaccacgccgcactggcatttcaattgaccactggagacgacaaatgtaatatctttaaaaatatggagcggaacgactatcgcacgctcagacagggcattatcgacatggtcctcgcaacagaaatgaccaagcacttcgagcatgtaaacaaattcgtaaattcaatcaataagccactagccacactagaggagaatggagagaccgataaaaaccaagaggtaatcaacactatgctgcggaccccggaaaatcgtactttgattaagcgcatgctgatcaagtgtgccgatgtgtctaacccctgcagacccctgcagtactgtattgagtgggccgcaagaatttcagaagagtacttttcccaaacagacgaggagaagcagcaggggctccccgtggtgatgcctgttttcgaccgaaatacctgctcaatcccaaaaagtcagatctcatttatcgactactttatcacagacatgttcgacgcttgggatgcctttgttgacctccccgatctcatgcagcaccttgacaacaactttaagtattggaagggcctcgacgagatgaagctgcggaatctgcggcctccccctgagtag

SEQ ID NO: 234758 - DNA, 2490 bp, synthetic construct
  misc_feature 1..2490: note = Description of Artificial Sequence: Synthetic coding sequence
  source 1..2490: mol_type = other DNA
atgggctgcgccccttctattcacatatctgagaggcttgttgcggaggacgcgcctagtcccgctgccccacccctgtcctctggcggacctcgtcttccccagggtcagaagaccgcagccttgccccgaacacgcggagcgggtttgctagagtctgagctccgggacggctctggaaagaaggtcgctgtggcagatgtccagttcggccctatgagattccatcaagaccagctgcaggtcttgctcgtttttacgaaagaggacaatcagtgtaacggtttttgtcgggcatgcgaaaaagctggttttaaatgcacggtcacgaaagaagcacaggccgtcctggcttgtttcctggacaaacatcacgatataattattatcgatcataggaacccgcgacagctagacgccgaagcactgtgccggagcattcgctccagtaagctcagtgaaaatactgtaattgtgggggtggttagacgggtcgaccgggaggagctgtcagttatgcccttcatctcggctgggttcactagacggtatgtcgaaaaccccaatataatggcatgttataatgagctcctgcagcttgaatttggggaggtgcgaagccaactgaagctgagggcatgtaacagcgtgtttaccgcactcgagaattccgaggatgcgattgaaataacatccgaagaccggttcatccagtacgccaaccccgcatttgagaccactatggggtaccagtcaggggagctgatcggcaaggaactaggggaggttccaataaatgaaaagaaggctgacctgctggataccattaatagttgcattaggatcgggaaggaatggcaaggtatctattatgctaaaaagaaaaatggcgacaatatccaacagaatgtgaaaattatccctgtgattggtcaaggaggcaaaatccgacactatgttagcattatcagagtgtgtaatggtaataataaggccgaaaagatttccgagtgcgtccagagcgatacgcataccgacaaccagactggaaaacacaaggacagaaggaagggtagtctggatgttaaggctgtggctagcagagctaccgaggtgtcatcccaacgcagacactcatcaatggccaggatccatagtatgactattgaggctccaataaccaaagtgattaatatcattaacgcagcgcaggaatcatcacccatgcccgtgacggaagccttggaccgcgttctcgaaatcctcagaaccactgaactctactcacctcagtttggcgctaaagatgacgacccacatgctaacgatctggtagggggactcatgtccgatgggctgcgccgactgtcgggtaatgagtatgtgctgagcactaaaaacacacaaatggtgagctcgaatattatcacaccaatatctttggatgacgtgccacccagaatagccagagccatggaaaatgaggagtactgggacttcgacatattcgagctggaggcagctacccacaaccgcccactcatttatctcgggctgaaaatgtttgcgaggtttggcatctgcgaattcctgcactgtagcgagtctaccttgcggtcctggttgcagatcatcgaggcgaactaccacagtagcaatccctaccacaacagtacccacagcgctgacgtgctgcacgccacggcttactttctgagcaaagagcgaatcaaagaaacactagatcccatcgatgaggtggccgctttgattgccgcaactatccacgatgtcgaccacccgggtaggaccaattcctttctgtgcaatgcagggtctgagctcgctattttgtataatgataccgcagtcctcgagtcccaccacgccgcattggctttccagctaacaacaggagacgataagtgtaacatttttaaaaacatggaaagaaatgactaccggacactgcgacagggcatcatcgacatggtactcgcaaccgagatgacaaagcactttgagcacgtcaataaatttgtaaatagtattaacaaaccactagcaactctggaggaaaacggggaaacagataaaaatcaggaggtgatcaatacaatgctccgcacccctgaaaacagaaccttaatcaaacggatgttaattaagtgtgccgatgtatccaatccttgccgcccactgcagtactgtattgagtgggccgcacgtatctctgaggaatactttagccagacagatgaagaaaaacagcagggattaccagttgtgatgccggtgttcgatcggaacacctgttcaatccccaagtcacaaataagttttattgattattttatcacagacatgtttgacgcctgggatgccttcgttgacctcccagatctgatgcaacacttagacaacaactttaagtattggaagggtctggacgagatgaagctgagaaatctccgaccacccccagagtag

SEQ ID NO: 234759 - DNA, 2274 bp, synthetic construct
  misc_feature 1..2274: note = Description of Artificial Sequence: Synthetic coding sequence
  source 1..2274: mol_type = other DNA
atgcgctttcatcaagaccagttacaggttctgctggtatttacaaaggaagataaccagtgcaacgggttctgccgagcgtgtgaaaaggccggttttaagtgcaccgtgaccaaagaggcccaggctgtgttggcgtgtttcctcgacaagcatcatgatatcatcatcatcgatcacaggaaccctaggcagctcgacgcggaggccctgtgtcgcagtatcaggagctctaagctatctgagaataccgtgatagtcggtgtcgtgaggcgcgtcgaccgcgaagagcttagcgtgatgccttttattagtgcagggtttaccagacgctatgttgaaaatcccaatatcatggcttgctataatgagctgttacagctcgagtttggtgaagtgaggagccagctgaaattgagggcctgcaatagcgtcttcacagccctcgaaaatagtgaggatgcaatcgagattacgtccgaggaccggttcattcagtatgccaaccccgcattcgaaaccaccatgggatatcagtcaggcgaattgatcggtaaggaattgggcgaagtgcccatcaatgagaagaaagcagacctgctcgacacaatcaatagctgtatccgaatagggaaagagtggcaaggaatctattatgccaagaagaagaatggggacaacatccagcagaatgtcaagatcatacccgtcattggccagggcggaaaaatcagacattacgtgtccataattagagtgtgtaacgggaacaataaggcagaaaagataagcgagtgtgtgcagtctgacacgcataccgataatcaaaccgggaaacacaaggaccgacggaagggaagtctcgacgtgaaagccgtggcatccagagccacggaggttagcagccagcgaagacacagctcaatggccaggatacacagcatgactatcgaagcaccaattaccaaggttatcaatattatcaatgcagcccaagagtcttcccctatgccagtgaccgaagcgctcgacagggtcctggagatccttcggaccacagagctttattccccacagtttggcgcaaaagacgacgacccccatgccaacgatctcgtcgggggactaatgagtgatggcctgcgcaggctctccgggaacgagtatgtgctgtcaaccaaaaacactcagatggtcagtagcaacatcatcaccccaatctcccttgacgacgttccacctagaattgctcgtgctatggagaacgaagagtattgggacttcgacatttttgaactggaggctgccacccataacagacctctgatctatcttgggcttaaaatgtttgcaagattcgggatttgcgagttcctgcattgcagcgagagcacgctgcgcagctggctgcagattattgaggcaaactaccactcttctaacccctatcataattcaacacattcggctgacgtgctacacgccacagcttactttctctccaaggagcgcattaaagaaactctggacccgattgacgaggtagctgcacttatcgccgcaacaattcatgacgtagaccacccaggtcgaaccaattcattcctatgtaacgctggcagcgaactggctatcctttacaatgacacagcggtcctggagtcccatcacgcggctctggctttccagcttaccacaggagatgacaaatgcaacatttttaaaaacatggagcgcaatgattaccggacgttgagacagggtattatagatatggtgctggcgacagaaatgaccaagcacttcgaacatgttaataaatttgtgaatagtatcaataagccgctcgctactctcgaagagaacggggagactgataaaaatcaggaagtgatcaacacaatgctgcgcactccggaaaatagaaccctcatcaagcggatgctgattaaatgcgctgacgtcagtaatccatgcagacctctgcaatattgcattgaatgggcggcacgaatctccgaggagtacttctcccagacagacgaggagaaacaacaaggactgcccgtggtgatgcccgtattcgataggaacacgtgttcaatcccaaagagccagatttcgttcattgactattttataactgacatgtttgatgcttgggatgctttcgtggatcttcctgacttgatgcagcatttagacaataacttcaagtactggaagggtttggatgagatgaagctgcggaacctgagaccaccgccagagtag

SEQ ID NO: 234760 - DNA, 2658 bp, synthetic construct
  misc_feature 1..2658: note = Description of Artificial Sequence: Synthetic coding sequence
  source 1..2658: mol_type = other DNA
atgggctgcgctcctagcatccatgtcagccaatcgggggttatttattgtcgggattctgatgaatcgagcagtcctcgccagacaaccagcgtctcccagggacctgcagcaccactgcctggcttgtttgtgcaaaccgacgccgctgatgctatccctccaagcagggcatccggcccacccagcgtcgctagggtccgacgcgctcgaaccgaactgggatctggttctagcgccggtagcgccgcaccagctgcaacgacctccaggggtcggcgtcgtcattgctgctcttccgccgaagcggagacacagacatgttacacatccgtaaagcaggtgagttccgccgaggtccgtatcggaccaatgaggctaacacaggatccaattcaggtcctgctcattttcgcaaaagaagattcacagagcgatggcttctggtgggcctgtgatcgggcaggataccgctgtaacatagctagaactccggaatcggctctggagtgcttcctggacaagcatcatgagatcatagtgatcgatcacaggcagactcagaacttcgatgccgaggctgtctgccgcagcattcgcgcaactaacccttccgaacacactgtgatcctggctgtcgtttcacgggtgagtgacgatcacgaagaggcttcagtgttacctctcctgcacgcgggatttaaccggcgttttatggagaacagcagcatcatcgcatgttataacgaattaatccagatcgagcatggagaagtgcgttcccaatttaagctgcgggcttgtaattccgtgtttacggctttggaccactgccatgaggccatcgaaatcaccagcgacgaccatgtgatccagtatgtcaaccctgccttcgagcggatgatgggataccacaagggagaattgctcggcaaggagcttgccgacctccctaaaagtgataagaaccgggcagacctgcttgacaccatcaacacgtgcattaaaaaaggcaaggagtggcagggcgtgtactatgccagacgcaaatctggcgacagcattcagcagcacgttaagatcactccagtgataggacaaggaggcaaaatcagacacttcgtgagtttaaagaagctgtgctgcaccaccgacaataataagcagattcacaaaatacaccgggacagcggggacaactcacagactgagccccatagtttcaggtacaaaaaccgcagaaaggaatctattgacgtgaagtcaattagcagccgagggtctgatgccccatctctgcaaaacagaagatacccctccatggcgagaattcattcgatgacgatcgaagcccctatcacaaaagtgattaacattataaatgccgcacaggagaattcaccagtgactgtggcggaagcattggatcgggtcttggagattctgcgaacaacagaactctatagccctcaattggggaccaaggatgaggacccccacacctctgatctagttggcggattgatgaccgacgggttgcgcaggttgtccggcaacgagtatgtgtttactaaaaacgtgcaccagtctcattcccatttagccatgcccattacaattaatgacgttcctccatgtatcagccaattgctcgataatgaagagagctgggactttaatatcttcgagctggaggctataacacacaagagacctttagtgtacctggggctgaaggtattctcccggttcggtgtatgcgagttccttaactgtagcgaaacaacccttcgagcgtggttccaagtcatcgaggcaaactaccacagcagcaatgcctatcataactccacgcacgccgctgatgtgctacatgcaaccgcatttttccttggcaaggaacgtgtaaagggctcgctcgaccagctggacgaggttgccgctctgattgctgccacagtgcacgatgtagatcaccccggaagaaccaactcttttctttgtaatgctggcagcgagctggctgtcctctacaatgatacagctgttctcgagagccatcacacagccctggcattccagctgacggtgaaggacaccaaatgtaacattttcaaaaatatcgacagaaaccattatcgcaccttaaggcaagcaattatcgacatggttctcgccaccgagatgaccaagcacttcgagcacgtaaataaattcgttaacagcatcaacaaaccgatggctgccgagattgaaggcagcgactgtgagtgcaatccagcgggaaagaacttccctgagaatcagatactgatcaagagaatgatgattaagtgcgcagatgtggctaacccctgtcggccacttgacctgtgcatcgagtgggcaggcaggatcagcgaggagtactttgcccagactgatgaagagaagagacaggggctgcccgttgtcatgcccgtgtttgatcgcaatacatgtagtatacccaagagccagatttctttcatagattactttattaccgacatgttcgacgcctgggatgccttcgcccacctgcccgcactgatgcaacacctggctgacaactacaagcactggaaaaccctcgacgatctcaaatgtaagtcgctccggctgccctctgattcttag

SEQ ID NO: 234761 - DNA, 2493 bp, synthetic construct
  misc_feature 1..2493: note = Description of Artificial Sequence: Synthetic coding sequence
  source 1..2493: mol_type = other DNA
atgggttgcgccccttcgatccacgtcagtcagagcggagtgatatactgccgggactccgacgagagctctagccccaggcaaacgacctctgtgagccagggacctgccgcaccactgccgggactgtttgtgcaaactgatgcggctgacgccattccacccagtcgagcctctggccctccgtctgttgcccgagtgcgacgcgctagaactgagctgggctcggggtcctcagctggtagcgcggcacctgctgctaccactagcaggggcaggcggagacattgttgtagctccgcagaagccgagactcagacttgctatacgagcgtcaagcaagtttcgagcgccgaggtgagaattggaccaatgagactgacgcaggatcctatccaggtgctccttatcttcgcaaaggaagacagccaatccgatggtttctggtgggcctgcgacagggctggctaccgctgcaacatcgccaggacccccgaatctgctttggaatgttttctggataagcaccatgaaattatcgtgattgaccataggcaaacccaaaatttcgacgctgaggcagtgtgccggagcatccgcgctacaaacccctctgagcatactgtcattctggccgtggtttcccgtgtgagtgatgaccatgaagaggcttcagtgctcccgctcctgcacgccggatttaataggagatttatggagaacagctctatcattgcatgctacaacgaactcatccaaatagagcacggtgaagtacgttcccagttcaagcttagggcctgcaatagtgtatttaccgccctggatcattgccacgaagctatcgaaataacatccgatgaccacgtcatccagtatgtaaatcctgcttttgagcgcatgatgggataccacaagggagagctcctagggaaagagctggccgatctccccaagagcgacaaaaacagagccgatctgttggacactatcaacacttgcatcaagaagggcaaggagtggcagggagtctattacgcacgcagaaagtctggggatagcatacaacagcatgtgaagatcactccggttatcggtcagggcggaaagatcagacatttcgtatctcttaaaaagctttgttgtaccacggacaacaataagcagatccataaaattcatcgagatagcggggacaatagccagactgagcctcactcattccggtataaaaatcgtcgtaaagagtccattgatgtaaagagtatatcctcgagaggaagcgatgcaccgagcctgcagaataggagatacccttctatggcgaggattcactctatgacaatcgaggcccctatcactaaggacggcttgcgccgattgagtgggaacgagtacgtatttactaaaaatgtgcaccagagccacagccacctggcaatgccgatcacaattaacgatgttccaccctgtatcagccagttgctggataacgaggagtcctgggatttcaatatcttcgagcttgaggccataacacataagcgacctcttgtctatcttggactgaaagtcttctctaggttcggagtatgcgaattcctgaattgctcggaaaccactttgagggcctggttccaggtgatcgaagcgaactaccatagctcaaacgcctaccataacagcacacatgctgccgatgtcctacacgctacagcctttttcctgggcaaagaacgggtgaagggatctctcgaccagttggatgaggtcgccgcactaatcgccgctaccgtgcatgatgttgaccacccaggcagaacaaacagctttctctgtaacgccggttccgaactggcagtgttgtacaatgacaccgccgtgctggaatcccaccacaccgccctcgcctttcagctgaccgttaaggatacaaaatgtaacatattcaagaatatcgataggaaccactacaggacgcttaggcaggcaatcatcgacatggtgctagccacagagatgaccaagcatttcgaacacgtgaacaaattcgtgaattctataaacaaacccatggcggctgagatcgagggctccgactgcgagtgcaatcctgctggcaagaatttcccagaaaatcagattctcattaagcgaatgatgatcaaatgcgcggatgtcgcaaacccatgccgtcctctggatctttgcattgagtgggcaggtcgaatctccgaagaatattttgcccagacggacgaggagaagaggcaggggctgcccgttgttatgccagtgtttgatcgtaatacctgttctataccaaaatctcagattagcttcatagattattttatcacagatatgtttgatgcttgggacgcctttgcacacctgccagccctcatgcagcatctggctgacaattacaagcattggaagactctggacgacttgaagtgcaagagtctgagactgccctccgattcttag

SEQ ID NO: 234762 - DNA, 2517 bp, synthetic construct
  misc_feature 1..2517: note = Description of Artificial Sequence: Synthetic coding sequence
  source 1..2517: mol_type = other DNA
atgggttgtgctccctccattcacgtgagccaaagtggtgtgatctactgccgggattccgatgaatcttcttcaccaagacagaccactagcgtttctcagggcccagcagcacccttacccggtttgttcgtgcaaactgatgccgcagacgccattcctccgtccagagcatcagggccacctagcgtcgctcgggtgcgaagggctcgtacggaactcggatcagggtcaagtgctgggtctgctgcacccgctgctaccacctccagggggaggcgcaggcattgctgctcttccgccgaggcagagactcagacgtgttacacatctgtgaagcaagtttcttctgccgaggtcaggatcggcccaatgcgactgactcaagatccaatccaggtacttctcatcttcgccaaagaggactcacagtcggacggattctggtgggcttgtgacagggccggatacaggtgcaatatagcgaggactcctgagagtgccctggagtgtttcctggataaacaccacgagataatcgtcatcgatcacaggcagactcagaattttgatgctgaggctgtatgcagaagtatcagggcaaccaatcccagcgagcatactgtcattctggctgtggtgtccagagttagcgacgaccacgaggaggccagtgtgctccccctgctgcatgctggcttcaaccgccgttttatggagaattcctctataattgcttgctacaacgaactgatacaaatcgagcacggcgaggtccggagtcagtttaagctccgggcatgcaactcagtttttactgccctggaccactgtcacgaagcaatcgaaatcactagcgacgaccatgtcatacaggagtggcaaggtgtctattacgcaagacgaaaatctggcgactccattcagcagcacgttaagatcacaccagttatcggccagggagggaagatccgtcactttgtttccctgaagaagctctgttgtaccactgacaacaataaacagatccacaagattcatagggatagcggagataacagtcaaaccgaaccacacagttttcgctacaaaaacagacgcaaagaaagcatcgatgttaaatctatctccagtcgcggaagcgacgccccatcactgcagaaccgaaggtaccctagcatggcccgtattcactcgatgacaatcgaggccccaatcaccaaggtcatcaacataataaacgccgctcaggaaaacagccccgttaccgtggcggaggctctagaccgcgttctcgaaatcttgagaacgactgaactttattccccccagctagggaccaaggatgaggatcctcacacatcagacctcgtcggcggactgatgactgacggattaagacgcctgagtggcaatgagtacgtctttaccaaaaacgttcaccagagccattcccacctggctatgcctataaccatcaacgatgtgcctccatgcatcagtcagctgctggataacgaggaaagttgggactttaatattttcgaactggaggctatcacgcacaaaagacctctcgtgtacctggggctcaaagttttctcacggtttggcgtgtgtgagtttctgaactgtagcgagactacacttcgggcttggttccaagtcatcgaagcaaattaccactctagcaacgcctatcacaatagtacgcacgcagcagacgtgctgcacgcaaccgccttcttccttggaaaagagcgggtgaaggggagccttgaccagctagatgaagtggcagcgctcatcgcagccacagtccacgatgtggaccaccccggacgtaccaactcctttttgtgcaatgccggttccgagctggccgtgctgtataacgatacagcggtgctcgaaagccatcatactgccctcgcatttcagcttacagtgaaggacaccaagtgcaatatcttcaagaatatagatcgcaaccactacagaaccctcagacaggctataattgatatggtgctcgccaccgagatgaccaaacactttgagcatgtaaataagtttgtgaactcaatcaataagcctatggccgctgagattgagggatccgactgcgagtgcaatcccgcaggcaaaaatttccccgagaaccagattttgattaagagaatgatgattaaatgcgctgatgttgctaatccatgccggcctctcgatttgtgcatcgagtgggccggtaggattagtgaagagtactttgctcagactgatgaggagaaacgccagggccttcccgttgttatgccggtttttgaccgcaacacatgttccatcccgaagtcgcagattagtttcatagattacttcattaccgacatgttcgacgcatgggatgcttttgcgcacctgcccgcacttatgcagcatttagcagataactataaacattggaaaaccctcgacgaccttaagtgtaagtctctccgcctgccttccgactcgtag

SEQ ID NO: 234763 - DNA, 2598 bp, synthetic construct
  misc_feature 1..2598: note = Description of Artificial Sequence: Synthetic coding sequence
  source 1..2598: mol_type = other DNA
atgggatgtgctccttctatccatgtttcgcaatctggtgtgatctattgccgggactctgatgaatcaagctctccacggcagacaactagcgtctcacaagggccagccgcacctctgcccggtctgttcgtgcagacagacgcagcggacgcaatccccccatcacgggcttcaggaccgccaagcgtcgcccgagtgcgccgagcacgtactgagcttggctctgggtcgtcagccggatccgctgcccctgctgctacaacctctcgcggacgtagaagacattgttgcagcagtgccgaggctgaaacacagacatgctatacatcagtcaaggtgctactcatcttcgcaaaagaggactcccaatccgacggcttttggtgggcatgcgatcgcgcagggtatcggtgcaacattgccaggaccccagagagcgccctcgagtgcttcctggataaacaccacgaaattatcgtcatcgatcacagacagacccaaaactttgatgctgaggctgtgtgtcggtctatccgagccaccaatccaagcgagcataccgtgatcctggccgtggtctcgcgggtgtccgatgatcacgaggaagcttctgtgctccccctgctgcatgcaggcttcaacaggagattcatggagaactctagcatcatcgcctgctacaatgagctgattcagatagaacacggggaagtgcgttctcagttcaagttgagagcctgcaatagtgtgttcacagctctggaccactgtcacgaggccatagaaattacgtccgatgaccacgtaatacagtatgttaacccagccttcgaaaggatgatgggttaccataagggcgaactgctgggcaaagagctggccgacctgcccaaatctgacaaaaatcgagcagacttgttggatactattaatacctgtattaaaaaggggaaggaatggcagggggtgtattacgctagacgaaagtctggggactctattcagcagcacgtgaagataactcccgtcatcgggcagggcggaaagattcggcacttcgtgagcctgaaaaagctttgttgtacgacagacaacaataagcagattcacaagattcatagggacagcggagataacagccagacagaaccacactccttccggtacaaaaacaggcgcaaggagtctatcgatgtcaaatctatctcttctcgaggttcagatgcaccttctctgcagaatcgccgttatcccagcatggcgaggattcactcgatgacaatcgaagctccaattactaaagttattaatatcatcaacgctgcccaggagaacagccccgttaccgtagcagaggccctggatcgagtgttggagattctgcggacaactgagctctactcgccacagcttggaaccaaggacgaagacccacacacaagcgatctcgtcggtggcctgatgactgatggattacggcgactgagcggcaacgagtatgtgttcacaaagaacgtacaccagtcccattcacatctggcgatgccaatcacaattaatgatgtgcccccttgtatttcccagctcctcgataacgaggagagctgggacttcaacatattcgaactggaggcgatcactcataaacgccctctcgtgtatttgggcttgaaggtcttcagccgattcggcgtgtgtgaattcctgaattgttcagagacaaccctgagagcctggtttcaggtgatagaggccaactatcattcgtcaaatgcctaccacaattctacgcacgccgctgacgttctgcacgcaacggcgttttttctgggcaaggagcgcgtaaagggcagcctcgatcaactggatgaagtcgccgctctaatagctgctacagtccacgacgtggaccaccctgggagaacaaactcattcctttgtaatgctggctccgagttggctgtgctgtataacgatacggcggttctggaatcacaccatactgcactcgctttccagttaacggtgaaggacacgaaatgcaacatttttaagaacatagatcgcaaccattaccgaacactgcggcaggcaattattgacatggtgttagccactgaaatgacaaagcattttgagcatgtgaacaaattcgtgaatagcataaataaaccgatggccgcagagatcgaaggatccgattgcgaatgtaatcccgcaggaaaaaactttccagaaaatcagattctgatcaagcggatgatgatcaaatgtgctgatgttgctaacccttgccgcccactggatctgtgtattgagtgggccggtcgaatcagcgaggaatactttgctcagactgacgaggagaagcggcagggcttgcccgttgtgatgcccgtattcgaccggaacacttgttcgatccctaagtctcagatttcatttatagattattttattaccgatatgtttgatgcttgggacgccttcgctcatttgcccgcactcatgcaacatttagccgataattataaacactggaagacgcttgacgatctgaagtgcaagtccctccgtctcccttcagattcatag

SEQ ID NO: 234764 - DNA, 2367 bp, synthetic construct
  misc_feature 1..2367: note = Description of Artificial Sequence: Synthetic coding sequence
  source 1..2367: mol_type = other DNA
atgggctgcgccccttcaatccatgtgagtcagagtggagtgatttattgcagggattcggacgagagttccagccctagacagacaactagtgtaagccagggacccgcagctcctttgccagggctatttgttcagacagatgctgcagatgccattccgccatcgcgcgcatccgggccacctagcgtggcccgagtgcgcagggcacgaaccgagttaggctcgggctcttccgcaggcagcgcggcacctgccgctactacgagccgtgggagaaggagacactgttgtagtagcgctgaagctgagacacagacctgttatacatctgtaaagcaggtgagcagtgccgaagtcagaataggacctatgcggctcacacaggatccaatccaagtgctcctgatctttgctaaggaggatagtcagagcgacggattttggtgggcatgtgacagagccggatataggtgtaacattgcccgtactcccgaaagcgcactggagtgtttccttgacaagcaccacgaaattatcgtcatagaccatcggcagacccagaactttgacgccgaggccgtgtgtaggtcaatacgggcaacaaacccatcagaacatactgtaatcctggccgttgtgagccgggtatctgatgaccacgaagaagcatccgtgctccctctccttcatgctggttttaatcgcagattcatggagaattcatcaatcatagcctgctataatgagctgatccagatcgagcatggcgaggtgagatcccagttcaaacttcgcgcatgcaactccgtcttcacggcactggaccactgccatgaagcaatcgagatcacgtccgatgaccacgtgatacagatacataagatccaccgcgactccggtgacaactcccagactgagccccattctttccgctacaaaaataggagaaaagagtcgatcgacgtcaagtcaatcagctcccgcggttcagacgccccaagcctgcaaaacagacgatacccttccatggccaggattcactcaatgacaattgaggccccaattacgaaagtaattaacattatcaacgctgcccaggagaactctcctgtgactgttgctgaagccctggatcgtgttctggagatcttgaggaccacagagctgtactcaccccagctggggaccaaggatgaagatccacacacttctgatctggttggcggacttatgaccgatggactcagacggctgagcggaaacgagtatgttttcactaagaatgttcaccaatctcatagtcacctggcgatgccaatcacaattaatgatgtgcccccttgcatttcccagttgctcgacaatgaagaatcatgggattttaacattttcgagctggaagcaattacacacaaaaggcccttagtttatctcggtctgaaagtgtttagtaggtttggtgtgtgcgaattcctcaattgcagcgagactactctccgcgcttggttccaggtgatcgaagccaattaccactccagcaacgcttatcacaacagcacccatgcggctgatgtactgcacgccaccgcctttttccttggcaaggaacgagtaaagggttcactggatcagcttgacgaggttgccgcactgattgctgctactgtgcacgatgtggaccacccagggagaacaaacagctttctatgtaacgctggctctgagctcgccgttctgtataacgatacagcagtactagaaagccaccatactgctctggccttccagctgactgtgaaagacactaaatgtaatatctttaagaatatagatcggaaccactaccgaacgctgcggcaggctatcattgatatggttctggcaaccgagatgacaaagcacttcgagcacgtgaacaaatttgttaactcaatcaataagccgatggccgcagagatcgaaggcagtgactgcgaatgcaatccagcagggaaaaactttcccgagaatcagatccttatcaagcgcatgatgatcaaatgtgcggatgtcgcaaatccatgtaggccattagacctttgcatcgagtgggctggccgaatctccgaagagtacttcgcacagacagacgaagagaaaagacagggactgcccgtggtcatgccagtctttgaccgaaatacatgttccataccgaagtcccaaatttccttcatagactatttcataaccgacatgtttgacgcttgggacgctttcgcccacttacctgcgctgatgcagcacctcgcagacaactacaagcactggaagacactagacgatctgaagtgtaaaagcttaaggttaccctcagatagctag

SEQ ID NO: 234765 - DNA, 1053 bp, synthetic construct
  misc_feature 1..1053: note = Description of Artificial Sequence: Synthetic coding sequence
  source 1..1053: mol_type = other DNA
atgcccatcacaattaacgatgtgcccccttgcatttcgcagctgctggacaatgaggagtcctgggattttaacatctttgagttggaggctataacccataagcgccctctcgtgtatctaggcctaaaggtcttttctcgttttggggtgtgcgagttccttaattgtagcgaaaccactctgcgcgcttggtttcaggtgatcgaggccaactatcactcgtcaaacgcttaccacaatagcactcacgcagctgatgttctacacgcaactgcttttttcttgggtaaagaaagagtgaaaggctctttagaccagttggatgaggttgctgccctcattgctgctaccgtgcacgacgtcgaccacccgggtcggaccaactccttcctatgtaacgcaggttctgaactggctgtgctctacaacgacacagccgttctggaatcacatcacactgccctggccttccagctgaccgtgaaggacaccaaatgtaatatttttaagaacatcgatagaaaccattaccgtacactgaggcaggccatcattgacatggtgctggcaaccgaaatgactaaacacttcgagcacgtcaataaatttgtgaactcaatcaacaagcctatggccgctgagatagagggcagtgactgcgaatgcaatcctgctggcaagaacttccccgaaaaccaaattctgataaagcggatgatgatcaagtgtgctgacgttgccaacccatgtcgacccttggatttgtgcatcgagtgggccggtcggatttctgaggagtattttgcccagactgacgaggaaaagcggcagggacttcctgttgtgatgccggtctttgatcgcaacacttgcagcattccaaagtctcagatttcgtttatcgattacttcataaccgacatgtttgatgcatgggatgcctttgcccacctacctgcccttatgcagcacctggcagataactataaacactggaaaacactggatgatctgaagtgcaagagccttaggctacctagcgatagttag

SEQ ID NO: 234766 - DNA, 1782 bp, synthetic construct
  misc_feature 1..1782: note = Description of Artificial Sequence: Synthetic coding sequence
  source 1..1782: mol_type = other DNA
atggggtccgggagttcttcttatagacccaaagccatataccttgacatcgacggacgcattcagaaggtcattttcagcaaatattgcaattccagtgatattatggatctattttgtatagctaccggcctgcctcgcaatacaacaatctcactgctaacgactgacgatgccatggtgtctatcgatcctacgatgcccgcaaatagtgagagaactccttacaaggttcgacctgtggccattaagcagctcagcgcaggagtagaggacaaaaggactactagtagaggacaaagcgccgagcggcctctgcgcgatagaagagtggtcggcctggaacaacccaggcgggaaggggctttcgagtcaggccaggtcgaaccgaggccacgtgaaccccagggctgttatcaggaggggcagcggatccctccggagcgcgaggagctgattcagagcgtattagctcaagtggctgagcagtttagcagagcatttaagatcaatgaactgaaggctgaggttgccaaccaccttgccgtgcttgagaaaagggtcgaacttgagggactgaaagtggtggagattgagaaatgcaagtcagatattaaaaaaatgcgagaagagttggccgctcgttctagtcgaacaaattgtccatgcaagtattcctttctggataatcacaagaaactgacgcccagaagggatgtcccgacttaccccaaatacctgctgtcccccgaaactatcgaagctctgcgaaaacctacttttgatgtttggctttgggagcctaacgagatgttgtcctgtctggagcatatgtaccacgatctcggcttggtaagagacttttcaattaaccccgtcacactccgcagatggctgttctgtgtgcacgacaattacagaaataatccattccataattttaggcactgcttttgcgtcgcccagatgatgtacagcatggtgtggttatgctctctccaggaaaagttcagccaaactgacatcctcatccttatgactgcggctatctgccatgacctggaccaccctggctataacaatacttaccaaataaacgcacgaaccgaacttgcagtaagatataatgatatctctccactggagaaccaccattgtgccgtggcttttcagattttggccgaacctgaatgcaacattttttcgaatattcccccagacggctttaaacagattagacagggaatgattacattgatcttggccacagacatggcgcgacacgcagagattatggattcctttaaagaaaagatggaaaatttcgattactcaaatgaagaacatatgaccttgctcaagatgatactgattaaatgttgcgatatttctaacgaagtgcggcctatggaagttgcggaaccctgggtagattgtttgctggaagaatacttcatgcagagtgatagggagaaatcggagggcctccctgtcgcaccgttcatggaccgcgacaaagtcaccaaagccacagcccaaatcggctttatcaaattcgtactgatcccaatgttcgagaccgtgaccaaactatttccaatggtcgaggaaatcatgctccagccgctatgggaaagccgcgacagatacgaggagctcaagcgcatcgatgatgcaatgaaggaactacaaaagaaaacagacagtctaacctcaggcgctaccgagaagtcaagagagaggtctagagatgtgaaaaactctgaaggggactgcgcctag

SEQ ID NO: 234767 - DNA, 1704 bp, synthetic construct
  misc_feature 1..1704: note = Description of Artificial Sequence: Synthetic coding sequence
  source 1..1704: mol_type = other DNA
atgggctccgggagctctagttatcggcctaaggctatctacctcgatatagatggaagaattcaaaaggtgatattcagcaagtattgcaacagtagcgatatcatggatctcttttgtatcgctacaggcctgcccaggaccccatataaggtacgtcccgtggccatcaagcagctgtccgcaggggtggaagataaacgtaccacgagtaggggccaatctgcggaaaggccactgcgcgataggcgcgttgtgggcctcgaacagcctcgtcgagaaggagcatttgaatcaggacaggtggaaccacgcccaagggagccacaaggttgttatcaggagggccagagaatccccccagaaagggaggaactgattcagtccgttctggcccaggtggccgagcaatttagcagggcctttaagatcaatgagcttaaggccgaggtagctaatcaccttgcagttctagagaagcgcgtcgaactcgagggcctgaaggtagtcgaaattgagaagtgcaagagtgatatcaagaagatgagggaagagctcgctgccagaagcagcagaacaaattgtccttgcaagtatagctttctcgataaccataaaaagctcacacccaggagggacgtacctacatacccaaagtacctcctgtcaccagaaaccatagaggccctgcgcaagcccacatttgacgtctggctttgggagcctaatgaaatgctctcatgcctggaacatatgtaccacgacctgggtctcgtgagagatttttccatcaatcccgtgacattgcgccgatggctcttctgcgtccacgataattatagaaataacccatttcacaactttagacactgcttttgcgtcgcccagatgatgtattctatggtgtggctgtgttcccttcaggagaaatttagtcaaacagatatattgatcctcatgaccgcagcaatctgccacgatctggaccacccgggttacaacaacacgtaccagatcaatgctaggactgaattggccgtgcgttacaacgatatctcaccattggagaatcaccattgtgccgtagcttttcaaatcctagccgaacctgagtgtaatattttttcaaacataccgccagatggatttaaacaaattaggcagggaatgatcactctgatcctagccaccgacatggccaggcacgcagaaataatggacagctttaaggaaaaaatggagaatttcgattactccaacgaggagcatatgaccctgctcaaaatgatcctcattaaatgttgtgatatttccaatgaagttaggcccatggaggtagcagaaccgtgggtggactgtctactcgaggaatatttcatgcagagcgatcgcgaaaagagcgagggactgcctgttgccccattcatggatcgggataaagtgacaaaggctactgctcagattggcttcattaaatttgtgctcatcccgatgttcgagacagtgaccaaactgtttcctatggtggaagagattatgctccagcccttgtgggagagtagagacagatatgaggagctcaagcgtattgacgacgcaatgaaggagctgcagaaaaaaactgacagcctgacttccggtgccaccgagaaatcccgggaaaggtcgagggatgtgaagaattctgagggtgactgcgcatag

SEQ ID NO: 234768 - DNA, 1476 bp, synthetic construct
  misc_feature 1..1476: note = Description of Artificial Sequence: Synthetic coding sequence
  source 1..1476: mol_type = other DNA
atggggagcggctccagtagttataggcctaaggccatctatctggacatagacggaaggatacagaaagagcacgatcacctgcccgcagatcacagacggaggcatggccttcaccgccctcaccatgcaagggagttcaggactcattccgttcagagtgagacgtgtgggcaccaggccactctgagagccttcaagatcaatgagctgaaggccgaggtcgcaaatcacttggcagtgctggagaagagggtggagctagaaggattgaaggtggtagagattgagaagtgcaaatcagacatcaagaagatgagggaggaactggccgctagaagttctcgaacgaactgtccctgcaagtatagctttctggacaaccataaaaagctgacaccgagaagggacgtcccaacatatcctaagtatttgcttagtcctgaaacgattgaggcgctaaggaaaccaaccttcgacgtctggctgtgggagcctaatgaaatgcttagctgcctggagcacatgtaccatgatcttggccttgtccgggatttttctattaatcctgtgactcttcgcagatggcttttttgcgtgcatgataattaccgaaataatccatttcataacttccgccactgtttctgcgtagcccaaatgatgtacagcatggtgtggctgtgtagtctgcaggagaaattttctcaaaccgatattctgatccttatgactgcagccatctgccacgacttagatcatccaggctacaacaacacctaccagattaacgcaaggacggagttggccgtgcgatacaacgatatatcccccctggagaaccaccattgtgccgtagcattccagatcctggccgagcccgagtgcaacattttcagcaatatccctccagatggttttaagcagattagacaggggatgatcacactcattctggccactgacatggcgagacacgccgagattatggacagctttaaggaaaaaatggaaaactttgattattccaacgaagaacatatgacgttgttgaaaatgatcttgataaaatgttgtgacatctccaatgaggtgcgccctatggaggtagccgaaccctgggtggactgccttctcgaagaatattttatgcagtccgaccgtgaaaagagcgagggactccctgtggcgcctttcatggatagagacaaggtgactaaggccacagcccagattgggttcatcaaatttgtgctgataccgatgttcgagaccgttacgaaacttttccccatggtggaagagattatgcttcagccactgtgggagtctagagacaggtacgaggagctcaagcgcattgacgatgcaatgaaagagctccagaagaagactgactcgctgacttccggagcaactgagaagagcagggagagatcgcgagacgtgaaaaattcagaaggcgattgcgcctag

SEQ ID NO: 234769 - DNA, 1602 bp, synthetic construct
  misc_feature 1..1602: note = Description of Artificial Sequence: Synthetic coding sequence
  source 1..1602: mol_type = other DNA
atggggagcggttcctcaagctacaggcccaaagccatatacctcgacatcgacggccgaatccagaaggtcattttctcgaaatattgtaatagctccgatattatggacctgttctgtatcgccaccggactccctcgcaacaccacgatatcgctactgacgaccgacgacgccatggtcagcatcgaccccactatgcccgctaattctgaaagaaccccctacaaagtgcgcccagtcgcaatcaagcagttatctgaaagggaggagctgatacaaagtgtcctggcccaagtagccgaacagttctcgcgggctttcaagataaatgagctgaaggcagaagtcgcaaatcacctcgctgtgctggagaagcgcgtagagttggagggcctaaaggtagtggagatagaaaagtgtaaaagcgacattaagaagatgcgtgaagagctggcagctcgtagctcaagaactaactgcccatgcaagtatagtttccttgacaaccacaaaaaactgacccctcgtcgggacgtgcccacgtatcccaagtacttactcagccccgaaacaattgaagccctgcggaagccaacttttgacgtatggctctgggagcccaacgagatgcttagttgtctggaacatatgtatcacgatttagggctggtgagggacttttccatcaatcctgtgaccttgaggcgatggttgttctgtgtgcacgacaattatcgaaataacccgttccataatttcagacactgcttctgcgtggctcagatgatgtattccatggtctggctatgttccctgcaggagaaattttcccaaacagacattcttattctgatgactgctgccatctgccacgatctcgatcatccaggatataacaacacatatcagatcaatgccagaacagaactggcagtacgatacaatgatattagcccgctggaaaatcatcactgtgcggtcgcatttcagattctagctgaaccggagtgcaatatctttagcaatattccacctgatggctttaaacagatcagacaaggaatgatcacccttatactagcaaccgatatggctcgtcacgctgagattatggacagcttcaaggagaagatggaaaatttcgactattccaatgaggagcatatgacactcttaaaaatgatcttgattaagtgctgtgatatctcaaacgaggtgcgacctatggaagtcgctgagccctgggttgattgcttgctggaggagtatttcatgcaatctgatcgagaaaaatccgaggggttacccgtggcaccatttatggacagagacaaggttaccaaggccaccgcacagatcgggttcattaagtttgtactgatccccatgtttgagacagtgacaaagctgtttccgatggtagaggagattatgcttcagcctctgtgggagtcgagagaccggtatgaggagctcaagcgcatagacgatgccatgaaggagctccagaagaagaccgatagcctgacatctggcgctaccgagaagagcagggagcgctctcgtgacgtaaagaacagcgaaggcgattgcgcatag

SEQ ID NO: 234770 - DNA, 1398 bp, synthetic construct
  misc_feature 1..1398: note = Description of Artificial Sequence: Synthetic coding sequence
  source 1..1398: mol_type = other DNA
atgggcagtggttcttcttcttaccgcccaaaggctatttatctcgatattgatggaagaatccaaaagcactccgtgcagagcgagacatgtggccaccaggccactctgcgggctttcaagattaatgagcttaaagcagaggtcgcaaatcacctagctgtcttggagaaaagagtcgagctcgaaggtcttaaggtagtggagattgaaaagtgcaaaagcgatatcaaaaagatgcgggaagaactggctgcgaggtcctctcggacaaattgtccatgtaagtactcattcctcgataaccataagaagctgacccccagacgagacgtacctacctacccaaaatacctgcttagccccgagactatagaggcgctgagaaaaccaacatttgacgtgtggctttgggagcccaacgaaatgctatcatgcctggaacacatgtatcatgacctgggccttgtaagggatttttccatcaaccctgtcacactccggcgatggctcttctgtgtgcacgataattacaggaataatccatttcacaattttagacattgcttctgtgtggcacaaatgatgtattcaatggtgtggttatgctctttacaggagaagttttcccagaccgacatcttgattctaatgacagccgctatatgtcacgacttagatcatccaggatacaataatacataccagattaatgctcggaccgagttagcagtgcgctacaacgacatctcaccactggaaaatcaccactgcgccgtggccttccaaatcctcgctgagcctgagtgtaacatcttctccaacattccccctgacggtttcaaacagattaggcagggcatgattactctcattctggccaccgatatggcacgccacgcagagatcatggattcgttcaaagagaagatggaaaatttcgactatagcaacgaggagcacatgacattgcttaagatgatcctcattaagtgctgtgacataagtaacgaggtgaggccaatggaggtagccgagccctgggtggactgcctgctggaggagtacttcatgcagagcgatagagaaaaaagtgagggtctgcccgttgcccctttcatggaccgggataaggtgaccaaggcgacagcccagatcggattcattaagtttgtgctgatccccatgttcgaaacagtaacaaaacttttcccaatggtggaggaaattatgcttcagcctttgtgggagtcccgcgatagatacgaagaactgaaaaggatcgacgacgcaatgaaagagctgcagaaaaagacggacagtctaacctccggcgctacggagaaaagtcgggaacgttctcgggacgtcaaaaacagcgaaggggattgcgcttag

SEQ ID NO: 234771 - DNA, 1623 bp, synthetic construct
  misc_feature 1..1623: note = Description of Artificial Sequence: Synthetic coding sequence
  source 1..1623: mol_type = other DNA
atgggcagtggtagtagcagttacagaccaaaagccatatatctggatatagatggacggattcagaaagtgatcttttcaaaatactgtaactcctccgacattatggacctgttctgtatcgctacaggcctgcctaggaatacaaccatttcactcctgaccacagatgacgcaatggtgtcaattgatcccacaatgcctgcaaactcagaacggaacgaattaatactctacacaagcctacggaacctgctatttctcccgagtaaagagagctgggccagccatcaacacagcgttcagtcggaaacatgtggtcatcaggccactctgagggcgttcaaaattaatgagctcaaggccgaggtcgccaatcatctagccgtgctggagaagcgtgtcgaattggaggggctgaaggtggtggaaatcgaaaaatgcaagagtgacatcaaaaagatgagggaggaactagcagccaggagcagccggacaaactgtccctgtaaatacagcttcttagacaatcacaaaaaactgacacccagacgggatgtgcctacctatccaaagtacctgctgtctccggagacaattgaggctctcaggaagccaacctttgacgtttggctctgggagcccaatgagatgctgtcttgcctcgaacatatgtaccacgacctagggctagttcgggattttagcattaatcctgttaccttgcgtaggtggctcttttgtgtgcacgataactacaggaataatccattccataacttccgacactgtttttgcgtggcacagatgatgtacagcatggtgtggttgtgctccctgcaggagaaatttagccagacagatatcttgattctgatgacggctgctatatgtcatgatctagaccatcctggttataataatacctatcagattaatgctcgcaccgaactggccgtgcgctacaatgacatctcgccgctggagaaccatcattgtgccgtggcattccaaatcctcgcagagcccgaatgcaacatcttttctaatattcctcctgatggatttaagcaaatccggcagggcatgatcacactgatcctggcaaccgacatggcccgacacgctgagattatggactcttttaaggagaagatggaaaactttgattattctaatgaggagcacatgactctgctcaaaatgatccttatcaaatgttgcgacatcagcaatgaggtcaggcctatggaggtggctgagccttgggtcgactgccttttggaggagtacttcatgcaatcggacagagagaagagcgaggggcttcccgttgcaccctttatggaccgggacaaagtgacaaaggccacagctcagattgggttcattaagtttgtcctgatacccatgttcgagaccgttaccaagcttttccccatggtagaggaaattatgctccagcccctgtgggagtcaagggaccgatatgaagaacttaaaaggatcgacgatgcgatgaaggaactgcaaaagaagacagattcactgactagcggggctactgaaaaatctagggaaaggtccagagacgttaaaaattctgagggggattgtgcgtag

SEQ ID NO: 234772 - DNA, 1401 bp, synthetic construct
  misc_feature 1..1401: note = Description of Artificial Sequence: Synthetic coding sequence
  source 1..1401: mol_type = other DNA
atggacgcctttcgatcaactccttacaaagtacgacctgtcgctatcaagcaactgagtgagcgcgaggaacttatccagtccgtgctggcccaggtggccgaacagttcagccgtgccttcaaaataaacgagttaaaggctgaagttgctaaccaccttgcggtgctggagaaaagggtggagttggagggattgaaggtcgttgagatcgagaagtgcaagtctgatatcaaaaagatgagggaagagctagcagcccgatcatctcgtacaaactgcccctgtaagtactctttcttagacaatcacaaaaaactgactccacggcgagacgttcccacttaccccaagtatttgttgagtcctgaaactattgaggccctccggaagcccacctttgacgtctggctctgggagcctaatgagatgctgtcctgcctggagcatatgtatcatgatctgggcctagtgcgggattttagcattaacccagtgactctgcgcaggtggcttttctgtgtgcacgacaactacaggaataacccatttcacaatttcagacactgcttttgcgtggcccagatgatgtactctatggtatggctgtgttcccttcaagaaaagttctctcagaccgatatcctcattctgatgacggccgctatctgccatgatttggaccatccagggtacaacaacacgtatcaaataaacgcccgaaccgagttggccgttagatacaatgatatcagcccattagagaatcatcactgcgcagtggctttccaaattctggcagaacccgaatgtaacatcttctccaatatccctccggatggattcaagcaaatccggcagggaatgattaccctgatcttagccactgacatggccaggcatgctgaaattatggatagttttaaagagaaaatggagaatttcgactattcgaacgaggaacatatgaccctgttgaagatgatacttatcaagtgttgcgatatatcaaatgaagtgaggcccatggaggtcgccgaaccatgggtcgattgcctactggaagagtactttatgcagtctgatcgggagaagtctgagggactgccggtagccccattcatggacagagacaaagtgacgaaagccacagctcagataggctttattaagttcgtgctgattccaatgttcgagacagtaaccaagctgttccctatggttgaagaaataatgctgcagcccctgtgggaatccagagacagatacgaggagctcaagcgtatcgacgatgcgatgaaggaattgcagaaaaaaaccgactccctgactagtggagccactgagaaatctcgcgaaagatccagagatgtgaaaaacagcgaaggcgactgtgcttag

SEQ ID NO: 234773 - DNA, 1659 bp, synthetic construct
  misc_feature 1..1659: note = Description of Artificial Sequence: Synthetic coding sequence
  source 1..1659: mol_type = other DNA
atggacgcgttccgtaggaacacaacaatatcattgctcaccactgacgatgcaatggtgagcattgatcctactatgcccgcaaattcggaaaggactccatataaggtccggcctgtggcaattaagcagctctccgcaggcgtggaagataaaaggaccaccagtcgtgggcaatccgcggagagacctctgcgcgaccgaagagtggtcgggttagaacagcccaggcgtgaaggtgcttttgaaagtggccaggtcgagcccaggcccagggaacctcaggggtgttaccaggagggacagcgcatccctccagagcgggaggaactgatccagtcagtcttggcgcaggttgcagagcagttctctagggccttcaagatcaatgaactgaaggctgaggtggcaaatcatctggcggtactcgaaaagcgggtcgagctagagggacttaaagtcgttgaaattgaaaaatgcaaatccgacataaaaaaaatgcgggaggagctggcggctcgtagtagccgcactaactgcccctgtaagtactctttcctggataatcataaaaagcttactccacgtcgggacgttcccacctatccaaagtatctgctgtctcccgaaactatagaagccctgcgcaaacctaccttcgatgtgtggttgtgggaaccgaacgagatgctttcttgtctggaacacatgtatcatgatcttgggcttgtgagggatttctctattaaccctgtcacccttcggaggtggctcttctgcgtgcacgacaattatcggaataatccctttcacaatttccgccattgcttttgtgtggcgcaaatgatgtactctatggtttggttgtgtagtctgcaagagaaattctcacaaaccgatatcttaatcctgatgaccgcagctatttgtcacgatctagaccaccccggatacaataacacttaccagatcaacgcccgaaccgaactggctgtgaggtacaatgatatttccccacttgagaaccatcactgtgctgtagcttttcaaatcctggccgagcccgaatgcaacattttctccaatattccgcctgacgggttcaagcagatcaggcaggggatgattactctaattcttgccactgacatggcgaggcatgctgaaataatggatagctttaaagaaaagatggaaaacttcgactactctaacgaggagcatatgacactcctcaaaatgatcctgatcaaatgctgcgatatcagtaacgaggtcaggccaatggaagtggccgagccttgggtggattgcttgctagaagaatattttatgcaatctgaccgtgaaaagtccgagggactgcccgtggccccatttatggaccgcgacaaggtgacgaaagcgacggcacagatcggcttcataaagttcgtgttgatacctatgttcgagaccgtaaccaagctgtttccaatggtggaggagataatgctgcagcctctttgggagtctagggaccggtacgaggagctgaaaagaattgacgacgctatgaaagaactccagaaaaaaactgatagcctcaccagtggggctaccgagaaatcccgagagcgcagtagggacgttaaaaatagcgaaggagactgtgcatag

SEQ ID NO: 234774 - DNA, 1302 bp, synthetic construct
  misc_feature 1..1302: note = Description of Artificial Sequence: Synthetic coding sequence
  source 1..1302: mol_type = other DNA
atggatgctttcagacgggcttttaagataaatgagttaaaagccgaggtcgccaatcacctggctgtgctcgaaaaaagggtggaattggagggactgaaagtggtggagatcgagaaatgcaagagcgatattaagaagatgagagaggagctcgcagccaggagttctcggacgaattgtccttgcaaatattcgtttctggacaaccataaaaaactcactcctaggcgtgacgtgccaacataccccaagtatctactcagtccggagactattgaagctctcagaaaacccacttttgacgtttggctgtgggagccgaacgaaatgctgtcatgtttggaacacatgtaccacgaccttggtctggtgagggattttagcatcaacccagtgaccctacgacgttggctgttctgcgtgcacgacaactataggaacaaccctttccacaacttccggcactgcttctgcgttgcgcagatgatgtactctatggtatggctgtgtagcttgcaagaaaaattttcacagactgacattttgattctgatgacagcggctatctgtcatgatctggaccatccgggatacaacaatacttaccagatcaacgctcgtacggagctggccgtccggtataacgatataagcccgctggagaaccaccactgtgctgttgctttccagatactggcggaacctgagtgcaacatcttctctaatataccccctgatggtttcaagcagatccgacaaggtatgatcacattgatccttgccaccgatatggcacgccatgccgagatcatggactctttcaaggaaaaaatggagaacttcgattactctaacgaagagcatatgactctgctgaagatgattttgatcaaatgctgcgacatttctaatgaagtgagacccatggaagttgctgagccatgggttgattgtctccttgaagagtacttcatgcagtcggaccgcgagaagagcgagggactgcccgtagccccttttatggatagggataaggtcaccaaagctaccgcccagattggattcatcaaattcgtgttaataccaatgttcgaaaccgtgaccaagttattccccatggtggaggaaattatgctgcagcccctgtgggaaagtcgcgatcgatacgaagagctcaagcgcatcgatgacgctatgaaggagttgcaaaagaagacagactccttaacatccggcgcaaccgagaaaagtcgggaacgctcccgggacgtcaagaactccgaaggtgactgcgcttag

SEQ ID NO: 234775 - DNA, 1380 bp, synthetic construct
  misc_feature 1..1380: note = Description of Artificial Sequence: Synthetic coding sequence
  source 1..1380: mol_type = other DNA
atggatgcctttagacgtaacactaccattagcttactcacaactgacgatgccatggtgtctattgacccgacaatgccagcaaactccgagagggcctttaagatcaacgagttgaaggcagaggtggctaatcaccttgccgtgctcgagaaaagggttgagctggagggcttgaaggtggtggagatcgagaaatgcaaatcagatatcaagaagatgcgggaggagctggcggcacgcagctctagaacgaattgtccttgcaagtattcattcttggacaaccacaaaaagctgacaccacgtcgcgacgtgcccacgtacccaaagtacctgctttcccccgaaactattgaggccctgcggaaaccgacatttgacgtctggttatgggaacctaacgagatgctctcttgcctggaacatatgtaccacgacctgggtctggtgcgggacttcagtatcaaccctgtcacactgcgaaggtggctcttctgcgtgcacgataactataggaataacccttttcacaattttaggcactgcttttgcgtggcccaaatgatgtacagtatggtctggttatgcagcctgcaggagaagttttcccagacagacattctcattctgatgacagccgctatctgccacgatttggaccaccctgggtacaataacacataccagatcaacgcccgaacagaactggctgtacgttacaacgacatttcaccgctggagaaccatcattgcgctgtcgcttttcaaattctggccgagccagagtgtaacatcttctcgaatatccccccagacggctttaaacagatcaggcagggaatgatcacccttatcctggccaccgatatggcgagacatgccgaaatcatggacagctttaaagaaaaaatggagaacttcgactattcaaacgaagagcacatgacccttttaaagatgatccttatcaagtgctgtgatatcagcaacgaggtgcgacctatggaggtcgctgaaccctgggtggattgcttactagaggagtatttcatgcagtccgacagggaaaaatctgagggcctccccgtcgccccatttatggatagagacaaagtaactaaggctactgcccagatcggtttcattaagttcgtgctgatcccgatgttcgaaacggtgacaaaactattcccaatggtggaagaaataatgttgcagccgctttgggaaagcagggatcgatacgaagagctcaaaagaatagatgacgcaatgaaggaattgcagaagaagaccgactcccttacttcaggggctacggaaaagagcagagagaggagtagagatgttaagaatagcgagggtgattgtgcatag

SEQ ID NO: 234776 - DNA, 1581 bp, synthetic construct
  misc_feature 1..1581: note = Description of Artificial Sequence: Synthetic coding sequence
  source 1..1581: mol_type = other DNA
atggatgcattccggtcaactccctacaaagtccggcctgtggcaattaaacaactcagtgcaggcgtcgaagacaaacgaactacgagcagaggacagtccgcggaacgaccacttcgggatcggcgtgtcgtgggcttagaacagccccgtcgcgagggagctttcgagagcggccaggtggagccacgcccacgggaaccacaggggtgctaccaggagggacaaagaatccctccagaacgggaggagcttattcaaagcgtgttagcgcaggtggccgaacagtttagccgggcatttaaaataaatgaactgaaggctgaagtggccaaccacctggcggttctggaaaagagagtggaactggagggcttaaaggtggtcgaaatcgaaaagtgtaagtccgatatcaagaagatgcgcgaagaacttgcagccaggagctcccgcacgaactgtccatgtaagtacagcttcttggacaatcacaaaaagctaacaccaaggagggacgtgcccacctaccccaagtacttgctgtctcccgaaaccatcgaggcacttaggaagcctaccttcgacgtttggttatgggagcctaacgaaatgcttagctgcctggaacacatgtatcatgacttaggactggtgcgcgatttctcaattaatcccgttaccttgagacgctggcttttctgcgtccatgataattacaggaataaccctttccacaactttcggcattgtttttgcgttgcccagatgatgtactcaatggtttggctctgtagcctacaagagaagtttagccagacagatatcctaatcctcatgaccgccgctatttgtcatgatctggaccatcccggttacaataacacatatcagattaacgcacgaactgagctggcagtgcgctataatgacatttctccacttgagaatcatcactgcgcagttgccttccagatcttggccgagcccgagtgtaacatcttctcaaatataccacccgacgggtttaaacaaatccggcagggaatgatcacactgatcttggccactgacatggctcggcatgccgagatcatggactctttcaaggagaagatggagaactttgattacagcaatgaagagcacatgacactcctgaaaatgatcctcatcaagtgttgcgatatctccaacgaggtcaggcctatggaagtggctgagccatgggtcgattgcttgctggaagaatactttatgcaatccgaccgggaaaagtcggagggccttccagttgccccttttatggaccgtgataaagtaactaaagcaactgctcagatcgggttcattaaattcgtgttgatccccatgttcgaaacggtgacaaagttgttccccatggtagaggaaattatgctacagcctttatgggaatctagagaccgctacgaggagctgaaacgcatagatgacgcaatgaaagaacttcagaaaaagactgactcattaacgtctggagctaccgagaagtcacgggagcggagcagggacgttaagaattccgaaggggactgtgcttag

SEQ ID NO: 234777 - DNA, 1479 bp, synthetic construct
  misc_feature 1..1479: note = Description of Artificial Sequence: Synthetic coding sequence
  source 1..1479: mol_type = other DNA
atggatgctttccggcgtaacactacaatctccctattgactactgacgatgctatggtcagcatcgatcccactatgccagccaacagtgagaggaccccctataaagtgcgaccagtagcgatcaagcagctgagcgagcgggaagagctgatccagagcgtgctcgcccaagttgctgagcagttttctcgagcgtttaaaattaacgagctgaaagcagaggtcgccaaccatttagccgtgctggaaaaaagagttgagctggagggcctgaaggtggtggagattgagaaatgcaagtccgatatcaagaagatgagggaggagctggcagcaaggtcaagtcggaccaactgcccgtgcaaatactcttttctggacaatcataagaagctaacgccccgacgcgatgtgccgacctacccaaaatacttgctgtcacccgagaccatagaggctctgagaaaaccaacctttgatgtttggctgtgggagccaaatgaaatgttgtcctgccttgagcatatgtaccacgacctggggcttgtccgcgacttcagcatcaatcccgtcaccttacgcagatggttattttgtgtgcacgacaactatagaaacaacccttttcacaacttccggcactgtttttgtgtggcacagatgatgtacagcatggtgtggctgtgtagcctgcaggaaaagttctcacagaccgacatcctgatcttaatgacggcagcaatctgccatgacttggatcaccctgggtataacaacacatatcagattaatgcacgtacagaactcgccgtccgatataatgacatcagtcctctggaaaaccaccattgtgctgtggcatttcaaatactcgcggaaccagagtgcaacatattctcaaacattccgccagatgggtttaaacaaattcgacagggaatgattacgttaatccttgcaaccgatatggcccgacacgcggaaatcatggacagtttcaaggagaagatggagaactttgattattccaacgaagaacacatgacgttattgaagatgatcctcatcaaatgttgcgatattagtaacgaagtgcgcccaatggaggtggccgaaccatgggtggactgccttcttgaagagtatttcatgcagtctgacagggaaaagagcgagggtctacccgtggctccgttcatggacagggataaggtgactaaagccacggcccagattgggttcatcaagttcgtgcttataccgatgttcgaaactgttactaagctttttccaatggtcgaggaaattatgttgcagccactatgggagtctcgagatcgctacgaggagcttaagcggatcgatgatgccatgaaggagttacagaagaaaaccgattcgctgacctccggcgctaccgagaaatcacgggagaggtctcgcgacgttaagaattccgaaggagactgtgcgtag

SEQ ID NO: 234778 - DNA, 1524 bp, synthetic construct
  misc_feature 1..1524: note = Description of Artificial Sequence: Synthetic coding sequence
  source 1..1524: mol_type = other DNA
atgggctccggtagttccagctatagacccaaggccatttacctcgatatcgacggcagaatacagaaggtgattttttcgaagtactgtaactcatcagatatcatggacctcttttgcatagcaacagggctgcccagaacaccatataaagtacgcccagttgccataaagcagctcagcgaaagggaagagctaattcaatcagtgctagcacaggtcgcggagcagttctccagagcctttaagattaacgagttgaaagcggaggtggcaaatcaccttgccgttcttgagaagagggtggaattggaaggactgaaggttgtggagattgagaagtgtaaatcagacattaagaagatgcgagaagagctggcagccagatcatcccgtactaactgcccatgcaagtactcattcctcgacaaccataagaaactcacccccagacgagacgtcccaacataccctaagtacctgctatcaccggagaccattgaggccttgagaaaaccaacgttcgacgtttggctctgggaacctaacgaaatgctgtcatgcctggaacatatgtaccacgatttgggtctagtcagggatttctctatcaaccctgtcacgttgaggcgttggctcttctgcgtgcatgacaattacagaaataaccccttccacaattttcggcattgtttttgtgtagctcagatgatgtattccatggtgtggctttgttcccttcaggagaaatttagccaaactgacatactcattttaatgaccgccgcaatatgccacgatctggatcatcctgggtacaacaacacttaccagataaacgccaggactgagctggccgttaggtataacgatatttccccactggagaatcaccattgcgccgtcgcattccagattcttgctgagcccgagtgtaatatttttagtaatattccccctgacggttttaagcagatcaggcagggaatgattacacttatcctcgccacggatatggcacgtcatgccgagataatggactcattcaaggagaagatggagaacttcgactattcaaatgaagaacacatgaccctgctaaagatgattctaatcaaatgctgcgatatcagtaacgaggtccgccctatggaggtggccgaaccatgggtggactgtctgctggaagagtactttatgcagagtgaccgggaaaagtccgaaggtctgcccgttgccccattcatggacagggacaaggtcacaaaggctactgcccaaattgggttcattaagttcgttttgattcctatgtttgaaaccgtgaccaaactgttccccatggtggaggaaatcatgctccagcctttgtgggagtctagggacagatacgaggagctgaaacgcattgacgatgctatgaaggaactgcagaagaaaactgattcactgacatcaggcgctacagagaaatcccgcgaaaggagtagagacgtcaaaaattctgaaggagactgtgcttag

SEQ ID NO: 234779 - DNA, 1398 bp, synthetic construct
  misc_feature 1..1398: note = Description of Artificial Sequence: Synthetic coding sequence
  source 1..1398: mol_type = other DNA
atggatctgttttgcatcgctactgggttacccaggaatacgacaatctctctcctgactacggatgacgctatggtgtccattgatccaacaatgccagctaactccgaacgggcttttaagatcaatgagctgaaagcagaggttgcaaaccacctggctgtcctggaaaaaagagtggagctggaaggactaaaggtcgtcgagattgagaaatgcaaaagtgatattaagaagatgcgcgaggagttagccgcacggagtagcagaaccaattgcccttgcaagtattccttccttgataaccataaaaagctgaccccacgcagagacgtgcccacatacccaaaatatttgctgagtcccgagacgatcgaagcccttagaaagcccacgttcgatgtctggttatgggagcctaatgaaatgttgagttgcctcgagcatatgtaccacgatcttggcctggtccgtgattttagtatcaacccagtgacgcttcggcgttggttattttgtgtgcacgacaactatcgcaataatcctttccataatttcaggcattgcttctgcgtcgcgcagatgatgtatagtatggtgtggctttgctccctccaagagaagttcagccagaccgatattttaattctgatgactgctgccatttgccacgacctcgatcaccctggatacaataatacataccaaattaacgctagaactgagctggcagtgcggtacaatgatatttcaccccttgagaatcatcactgtgcagtcgcctttcagattttggcagagccagaatgcaacatattcagtaacatacctccggacggcttcaaacaaattaggcaggggatgattaccttgatcctggccactgacatggccaggcacgcagagataatggattctttcaaggaaaagatggagaacttcgattatagtaacgaagaacacatgactctgcttaagatgattctgattaagtgctgtgacatttccaacgaggtacggcctatggaagtggccgagccctgggtcgactgccttctggaggaatactttatgcaaagcgaccgggagaagagcgagggcctgcccgtggctccgttcatggatcgcgataaggtaactaaagctacagcccagattggcttcataaagttcgtgctcatcccaatgttcgaaaccgtgaccaaactgtttcctatggtcgaagaaattatgcttcaacctctctgggaaagcagagaccgatacgaggaactgaagaggatcgatgatgctatgaaagaactacagaagaagacggactcacttacatcaggagcaacggagaagtctcgggagaggtcacgggatgtcaagaatagcgaaggagactgtgcttag

SEQ ID NO: 234780 - DNA, 1869 bp, synthetic construct
  misc_feature 1..1869: note = Description of Artificial Sequence: Synthetic coding sequence
  source 1..1869: mol_type = other DNA
atgccaccccagttgcagaacggcttgaatctaagcgcaaaagtagtgcagggctccctggactcattgcctcaggccgtgagagagttcctggagaataacgccgagctttgtcagccggatcacatccacatctgtgacggcagcgaggaagaaaacgggcgtttgcttggccagatggaggaggaaggcatccttcggaggctgaaaaagtatgataactgctggctcgccctaaccgacccaagggacgtggccagaattgagtccaaaacggttatcgtgacgcaggagcaacgtgacacagtgcccatccccaagaccggcctttcacagctggggagatggatgtccgaggaggactttgagaaagccttcaacgccagattcccgggttgtatgaagggcagaaccatgtatgtgattcctttttccatgggtcctctgggtagtccgcttagtaagataggaatcgagttaacggatagcccctatgttgtggctagcatgcgcattatgacacggatgggcaccccggtactggaggccgttggcgacggcgagtttgtgaaatgccttcactcagtgggttgcccactgccactccagaagcccctcgtcaacaactggccctgtaatcccgaactgacactgatcgctcatctgccagaccgccgagaaattatcagttttggttccggctatgggggtaattcactcctgggaaaaaaatgctttgctctgcgcatggccagcagactggcaaaggaggaagggtggctagcagaacacatgctgatattaggtataactaatccagagggagaaaaaaaatatttagccgctgcctttcccagcgcctgtgggaaaacgaatctagccatgatgaatccctcgttgcctggctggaaggtggagtgcgtgggggatgatattgcatggatgaagtttgatgcgcaggggcacctcagagctattaatccagaaaatggattctttggtgtggcccctggaaccagcgtgaaaacgaaccccaatgccattaaaactattcagaagaatacaatctttactaacgttgccgaaaccagcgacggcggagtgtattgggaaggaattgatgagcctttagcttccggagtaacaatcaccagttggaagaacaaggaatggtcttccgaggatggtgagccttgcgcgcatccgaattccaggttttgtactcctgcgagtcagtgtcctatcattgatgcggcatgggagtctcctgagggcgtgcctatcgaaggtataatttttgggggaaggagacctgccggagtgccacttgtgtatgaagccctcagttggcaacacggcgtgtttgtgggggcagcaatgcgctcagaagccacagctgcagccgaacataagggcaagattatcatgcatgatccttttgccatgcgacccttctttggctacaacttcggcaagtacctcgcccactggttatccatggcccagcacccagctgccaaacttcctaagatattccacgttaattggttcaggaaggacaaggaagggaaatttctttggccagggttcggtgagaactctcgggtactagagtggatgttcaatcggatcgacggcaaggcgtccaccaagctgacgcccataggctatatacctaaagaagatgcacttaacctgaaaggactcggacatattaacatgatggagctgtttagcatttcaaaagaattttgggagaaggaagttgaggacatcgagaagtatcttgaggaccaggttaacgcagacctgccgtgcgaaatcgagcgcgaaattttggccttaaaacagagaatcagccaaatgtag

SEQ ID NO: 234781 - DNA, 942 bp, synthetic construct
  misc_feature 1..942: note = Description of Artificial Sequence: Synthetic coding sequence
  source 1..942: mol_type = other DNA
atgactacgggcagaacgatgtatgtgatccccttctcaatggggccactggggtctcccctcagcaaaatcggtattgaactgaccgattccccatacgtggttgcttcaatgcgtataatgacacgcatgggcacccctgttctggaggcagtgggcgatggagaatttgtcaagtgtctgcattccgttggctgtccccttccactccagaagcctctggtcaataactggccgtgtaacccggagctaaccctgatcgcacatctgcccgataggcgcgaaattatatctttcgggtccgggtatggagggaactctttattagggaaaaaatgttttgccctccgtatggccagcaggctggcgaaggaagagggctggttggcagaacatatgctgatcttgggaatcaccaatcctgagggcgaaaagaaatacctggccgctgcatttcctagcgcgtgcggtaagacaaacctcgccatgatgaacccaagcctgcccggatggaaagttgagtgtgtcggagatgacattgcttggatgaagttcgatgcccagggacacctgcgtgctattaaccctgagaatggattcttcggagtcgccccaggaacaagcgtaaagacaaacccaaatgctattaagactatccagaaaaatactatcttcaccaacgtggcagaaacctccgacggtggggtgtactgggagggcatcgatgagcccttggcatcaggggtcaccatcacatcctggaaaaacaaggagtggagctcagaagatggcgttagcctcccggaggcattagtttgtcgtgctgcgggaaccgcctgtttatcccaggcactcacctcattgtccctttcttatagagggaccctttgccctccacagttagaggtgctgcacccttgccagccggtaccacatcattag

SEQ ID NO: 234782 - DNA, 915 bp, synthetic construct
  misc_feature 1..915: note = Description of Artificial Sequence: Synthetic coding sequence
  source 1..915: mol_type = other DNA
acaactggccacctgagagccataaacccagaaaatggattcttcggcgtggcccctggcacatccgttaagaccaacccaaatgcgattaagacaattcaaaagaatacaatttttacaaacgtggctgaaacaagtgatggcggagtgtattgggaggggatcgacgagccactagctagtggcgtgactattacgagctggaagaacaaagaatggtccagtgaggatggcgaaccgtgcgcgcacccaaactcaagattctgtactcctgcctctcaatgcccgattatagacgccgcttgggaaagtcccgaaggtgtgcccatcgaagggataatcttcggcggacgccgtccagctggcgtgcctcttgtatatgaggccctctcctggcagcacggcgtttttgtgggtgcggctatgcgctccgaggccacggccgctgccgagcacaaaggtaaaataatcatgcacgacccattcgctatgcgccctttcttcggctataactttggaaaatacctggcacattggctcagcatggcccagcacccagcagctaagctgccaaaaatttttcatgtaaactggtttcgcaaagataaggagggcaaattcctgtggccagggttcggagagaattctcgggtcttggagtggatgtttaatcgcattgacggaaaagcgtcgactaaactgacccctataggttatatccctaaagaggatgcccttaacctcaagggactgggccacattaatatgatggaactcttcagcatatctaaagaattttgggagaaggaagtggaagacatcgagaaatatctggaggaccaggtaaacgccgatctcccttgcgagatcgaacgtgagatactggccctcaagcaacggatatcacagatgtag

SEQ ID NO: 234783 - DNA, 918 bp, synthetic construct
  misc_feature 1..918: note = Description of Artificial Sequence: Synthetic coding sequence
  source 1..918: mol_type = other DNA
atgacaacggggcacctgcgggctattaacccagagaacggatttttcggtgtggcccctggcacctctgtcaagaccaaccccaacgcgatcaagactatacagaaaaatacaatctttactaacgtggctgaaacatcagacgggggtgtgtactgggagggtatcgatgagccactcgcatcaggcgtgactatcacaagctggaagaataaggaatggagcagcgaggacggggaaccatgcgcccatcctaattctcgcttctgcacgcctgcatctcagtgtcctattatcgacgccgcttgggagagcccagagggcgttcccatagagggtatcatattcgggggtagacgccctgccggagtgcccctagtatatgaggcactgtcttggcagcatggggttttcgtcggagccgctatgcgatccgaggcaactgcggctgccgagcacaaagggaaaatcatcatgcacgatcctttcgctatgagacccttttttggatataatttcggaaagtacctggcccactggctgagcatggctcaacaccccgcagctaagttgccaaaaatattccatgtcaattggtttcggaaggacaaggaagggaaattcttgtggcccggatttggcgaaaactctagagtcctggaatggatgtttaacaggattgacggtaaagctagcacaaagcttacccccatcggctacataccaaaggaggatgccctgaacctgaagggactcggacatatcaacatgatggagttgttctccatcagtaaggagttctgggagaaagaggtagaggacatcgagaagtacctagaggatcaggtgaacgcagacctaccctgcgaaattgagcgggagatactggccctgaagcagaggatctcccagatgtag

SEQ ID NO: 234784 - DNA, 1674 bp, synthetic construct
  misc_feature 1..1674: note = Description of Artificial Sequence: Synthetic coding sequence
  source 1..1674: mol_type = other DNA
atgagcgacccagaaatggggtgggttccagaaccccctacaatgactctaggagctagccgtgttgagctgagagtttcttgccatgggctgctcgaccgggatacactgaccaaaccgcacccatgtgtgcttctgaaactgtattccgatgaacagtgggtggaggttgagagaactgaggtgctgcgcagttgctcatcccccgttttctctcgcgtgctcgcactggaatatttctttgaggagaaacaaccattacaattccatgtcttcgatgcagaggacggtgctacctctcctagaaacgacacctttcttggaagcactgagtgcacactgggccagatcgtcagccagaccaaagtgactaagcccttacttttgaaaaatggaaagacggccggtaagtctaccatcacaattgtagctgaagaggtgtctggtacaaacgattacgtgcaacttacattcagggcttataagctagacaacaaggatttgttcagtaaatctgatcctttcatggagatttacaagactaatgaagaccagagcgatcagcttgtgtggcggacagaggtagttaagaataatttaaatccatcttgggagcccttccggttgtccttacactccctgtgttcatgtgatgtacaccgcccacttaaattcctcgtttatgactacgattcttctggaaagcacgacttcatcggcgaatttacctccacattccaagagatgcaagaggggaccgctaacccgggacaggaaatgcagtgggactgtattaaccctaagtacagggataaaaaaaaaaattacaagtctagcggcactgttgttcttgcacagtgcaccgtggaaaaagtccatacattccttgattatatcatgggtggatgccagattagtttcactgttgctattgacttcaccgcatcaaacggggatcctcgatcatcacagtccctgcactgcctgtccccgcgacaacccaatcactacctgcaggccctacgggcagtcggtggcatctgtcaggactacgactccgataagcgcttcccggcattcgggttcggcgcacggattccccctaatttcgaggttagccatgactttgcaattaatttcgacccagagaatcctgagtgcgaggaaatcagtggcgtgatagcttcgtatagacgatgcctcccccagatccaattatacggtcccactaatgtggcacctattattaatcgagtggcagaacccgctcagagggagcagtctacagggcaagctacaaagtattccgtgttgctggtcctcactgacggggttgtctccgatatggccgaaactcgcactgccatcgttagggccagcaggctcccaatgtccatcatcatagtcggcgtaggtaacgcggacttctccgatatgcgacttctggacggggatgacggacccctccggtgcccgagaggcgtccccgcagcccgagacattgtgcaatttgtgccatttcgagactttaaagatgccgctccctccgctctggcaaaatgcgttctcgcagaggtcccccgacaggtcgttgaatactacgccagccagggcatttcgccgggagccccacggccatgtacgctcgctacaactccatctcctagtccctag

SEQ ID NO: 234785 - DNA, 1326 bp, synthetic construct
  misc_feature 1..1326: note = Description of Artificial Sequence: Synthetic coding sequence
  source 1..1326: mol_type = other DNA
atggccgctctctatcgccctggactgcgccttaactggcacggcctgtccccgctaggatggccatcttgccggtcaatacagacattgcgagtgttaagcggagatctggggcagctccctactggaatccgggatttcgtggaacacagcgcgagactgtgccaacccgaggggattcatatttgcgatggcacggaagcagaaaacaccgccacattgaccctgctggagcagcaggggctcatcagaaaattgcctaaatacaataactgctggctggcacgcacagatcccaaggacgtggcacgagtcgaatccaaaacagtcattgtcacgccatctcagcgcgacactgtgcagcttccccctggcggagcgcgtgggcagttggggaactggatgagtccagccgattttcagagggctgtggacgagcggttccctggttgcatgcagggcagaaccatgtacgtcctcccatttagcatggggccagtcggaagcccactttctcgaataggcgtacagttgacagacagtgcctacgtggtcgccagcatgcggatcatgaccagactggggactccggtgctccaggccctgggggatggcgacttcgtgaagtgtttgcacagtgttggtcagccactgaccggccagggggagcctgtgtctcagtggccatgtaaccctgagaagacactaatcggacacgtgccagaccagcgcgagattatcagctttgggtcggggtacggagggaacagcctgctggggaaaaagtgtttcgccctgcggatcgcttctcggttagccagggacgaaggatggctggccgagcacatgctgatcctgggtatcacaagcccagctgggaagaagcgatacgtggcggctgctttcccgagtgcctgcggaaaaaccaacctggctatgatgcggccagccttaccaggatggaaggtcgaatgtgtgggcgacgacattgcgtggatgaggttcgactccgagggcagactgcgtgccattaatccagaaaacggattcttcggagtggccccaggcacttctgcgaccaccaaccctaatgctatggctacaatccaaagcaacacgatcttcaccaatgtagctgagaccagcgatgggggagtttattgggaaggcatcgaccagcccctccctcccggagtgacggtgacatcttggctgggaaagccctggaaacccggtatgtgcggaggagaaggagtggcgcagcctcccggactctctacccttatggtggagaagttatctccacaaccccctaccattttttag

SEQ ID NO: 234786 - DNA, 1521 bp, synthetic construct
  misc_feature 1..1521: note = Description of Artificial Sequence: Synthetic coding sequence
  source 1..1521: mol_type = other DNA
atgtctcccgctgattttcagagggcggtcgacgagcggtttccgggatgtatgcagggtcgcaccatgtacgtgttaccattttcaatggggccagttggctcaccgttaagccgcatcggagtccagctgacagactcggcctacgtagtggcctcaatgagaatcatgactcgtctgggaactcctgtccttcaagcattaggggacggagactttgtcaaatgcctgcactcagtgggccagccacttaccggacaaggtgaacccgtgtctcaatggccgtgcaaccctgaaaagacccttataggacatgtcccagaccagagagaaattattagttttggctctggctacggcggaaactctctactgggcaagaagtgcttcgctcttaggatcgcctctcgactcgctcgggacgaagggtggctcgcagagcatatgctcatcttaggcatcacatcccccgcagggaaaaagcgctatgtggccgcagcctttccatcggcttgcggcaagactaatttggcaatgatgagacccgctctgcccggatggaaggtcgagtgtgttggggacgatattgcttggatgcgcttcgactcagagggcaggctccgcgctattaacccagaaaatgggttcttcggggtcgcacccggaacctctgcgaccaccaatcctaacgcaatggccactatccagtcaaacacgatcttcacaaacgtggcagagacaagcgacggcggagtgtactgggaaggcatcgaccagcccctcccgccaggtgttaccgtaacttcctggttagggaagccatggaagcctggggataaggagccttgtgctcatcctaacagtagattctgcgcccctgcacggcaatgtcccatcatggatccagcatgggaggctccagaaggtgtccccatagatgccatcatatttggtggaagaaggcccaagggggtcccgcttgtttatgaggcttttaactggcgacacggcgtgtttgttggaagcgcgatgcgcagcgagtccaccgccgcagcagagcataagggcaaaattatcatgcacgacccattcgccatgcgcccattctttgggtacaactttgggcactacctggagcactggttgtcaatggagggtcgtaagggggcacaactccccagaattttccacgtcaattggttccggagggacgaagcgggacactttctatggccagggtttggagagaacgcacgggttcttgattggatctgtcgcagactagagggggaagattccgctagggagaccccgatcgggctcgtgccaaaggagggagcgttagatctctcaggactgagggctatcgatactacccagctgttcagcttacctaaagacttttgggagcaggaggtgcgagacatacggtcctatctgacagaacaggtgaaccaagacttgccaaaagaggtcctggcagaactggaagcactggagaggcgcgttcacaagatgtag

SEQ ID NO: 234787 - DNA, 1521 bp, synthetic construct
  misc_feature 1..1521: note = Description of Artificial Sequence: Synthetic coding sequence
  source 1..1521: mol_type = other DNA
atgtcacctgccgacttccagagagcagtggacgagcggttccctggctgcatgcaggggcgtacgatgtacgtcctgccattctcgatggggccagtcggttctccattaagcaggatcggcgtacaactgactgatagtgcctatgtggtcgccagtatgcgcataatgacaaggctcggcacccctgtactgcaggccctcggagacggtgatttcgttaagtgtcttcacagcgtgggtcagcctctgactggccagggcgagcctgtgtctcagtggccctgcaatcctgagaaaacgcttattggccatgttcccgatcagcgcgagattattagtttcggctccggctacgggggtaacagtttgctgggcaagaagtgctttgcactgcgtattgcatcccgccttgcacgggatgaggggtggctggcggaacacatgctaatactcggtatcacaagcccggctggtaaaaagcgctacgtggctgccgctttccccagcgcttgcgggaaaacaaacctggctatgatgcggccagctcttcctggatggaaggtggagtgtgtgggcgacgacattgcctggatgagattcgattctgaaggcagattaagggccatcaaccccgagaatggcttttttggagtcgcccctggcacttcagccacaaccaatcccaatgcaatggctaccattcagtccaacaccatctttacgaatgttgccgaaacttctgatggtggcgtgtactgggaaggaattgaccagcctcttcctccaggcgttacagtgaccagctggctggggaaaccttggaagcctggcgacaaagaaccctgtgcccatcccaattcaagattttgcgcgcctgcccgacagtgtcctattatggacccagcgtgggaggctcctgagggagtcccgatcgatgcaattattttcgggggaaggcgacccaaaggtgttcccctcgtttatgaggctttcaactggcggcacggagtgttcgttgggtctgcaatgagaagcgagagcactgccgctgcggagcacaagggtaaaataatcatgcatgatcctttcgcaatgagacccttctttggctacaactttggtcactatttggaacactggctgagcatggaaggtaggaaaggtgcacaactgccgaggatattccatgtcaattggtttagacgcgacgaggccggtcacttcctctggcccggtttcggggaaaacgccagagtcctggactggatctgccggaggcttgagggcgaggattccgctagagagactccaatcgggctggtgcccaaggagggggctctggacctctcgggactgcgggctatagacacaacccagctgttttccctgcctaaagatttctgggagcaggaggttagagacatccggagctatttgaccgagcaggttaaccaagatcttcctaaggaagtgctggctgagctcgaggctctggaacggagggtccacaaaatgtag

SEQ ID NO: 234788 - DNA, 2343 bp, synthetic construct
  misc_feature 1..2343: note = Description of Artificial Sequence: Synthetic coding sequence
  source 1..2343: mol_type = other DNA
atggccgctgtcgatcttgagaagctacgagctagcggcgctgggaaagccatcggagtgctgacgtcaggtggcgatgcccaggggatgaatgccgctgtaagagccgtgacgagaatgggaatctacgtcggggctaaggtttttctgatctatgaggggtacgagggactggttgaaggcggtgaaaacattaagcaagccaactggttgtccgtgtcgaacatcatccagctgggcggaaccattattggctctgccaggtgtaaagccttcaccacccgagaaggtaggcgcgctgccgcttataaccttgtgcagcatggtattacaaacttgtgtgtaatcggcggagacgggtccctgaccggcgctaacattttccggtcggaatgggggtctcttctggaagagctggtggctgagggcaaaatctccgagaccaccgctcgtacttactctcaccttaacatagccggactagtgggatcaatcgataacgacttctgcgggacggacatgaccatcggcaccgacagcgccctgcaccgaattatggaggttattgacgctataactactacagctcagagccaccagaggacatttgttctggaggtgatgggaaggcactgcgggtacctagccctggtgtcagcgttggcaagtggcgctgactggctattcatccctgaagcccctcccgaagacggatgggagaattttatgtgtgagagacttggcgagaccagatcccggggttctcgactcaacattataatcatagccgagggtgcaattgaccgaaacggaaagcctatctcatcatcctatgtgaaagatcttgtggttcagcggctggggtttgacacccgcgtgaccgttctcggccatgtgcaacgcggaggcactccctcagcttttgacaggattctgagctcaaagatgggaatggaggcggtcatggcactcttggaggccactccagatactcccgcatgcgtcgtcaccctgagcgggaaccaaagtgttagattgcctctgatggagtgtgttcagatgaccaaggaggtgcaaaaggccatggatgataaacgattcgatgaggccacgcagttgagaggcggtagttttgaaaataactggaacatttacaaactgcttgcccaccagaagccaccgaaggagaagtctaatttttctttggcaatacttaacgtgggtgcacctgccgctggaatgaatgcagccgtgcgctctgcagtcaggaccggtattagccacggacacaccgtgtatgtggtgcatgacggatttgagggcctggccaaaggccaagtgcaagaggtgggttggcacgacgttgctggatggcttggtcgaggtggaagtatgctgggcacaaagcggacgctgccaaaaggacagcttgaaagcatcgtggaaaatatccgaatctacggaatccacgccctactggtagtaggaggatttgaagcctacgaaggcgtgcttcagctggtggaggcgaggggtagatacgaagagctctgtatagttatgtgtgttatccccgcaactattagtaacaacgttcctggtaccgacttcagtctgggttccgacactgccgtgaatgccgctatggaaagctgcgaccgcattaaacagtctgcctcagggacaaagcgtagggtgtttatcgtcgagaccatggggggatactgtggttatttggccacagtgacggggatagcagttggcgcagacgcagcttacgtgtttgaggaccccttcaacatccacgacctcaaggttaatgtagagcacatgacagagaaaatgaagacagacatccaacgaggtctggttctgagaaacgaaaaatgccacgattactataccacagagtttctgtacaatctgtacagctccgaagggaagggcgtgttcgattgcaggaccaacgttctggggcatctgcagcagggcggagctcctacgccctttgatcgaaactatggcaccaagttgggtgttaaggcgatgctctggctcagtgagaagttgagggaagtctaccgcaaagggagagtattcgctaacgctcccgactctgcatgtgtgatcggtctgaaaaaaaaggccgtagcgtttagccctgtcacagagttaaagaaagataccgactttgagcatagaatgcctagagaacagtggtggctgtcgctgcggctgatgctgaagatgttagcgcagtatcggatatccatggctgcctatgttagtggagagctggaacatgttactagaaggacattgtctatggacaaagggttttag

SEQ ID NO: 234789 - DNA, 762 bp, synthetic construct
  misc_feature 1..762: note = Description of Artificial Sequence: Synthetic coding sequence
  source 1..762: mol_type = other DNA
atgcggtcgatgtgcaaccaaggcaggggacgcgagagttctcggggtgggttgcacgtgcagggatcctgtagggggctgtctcgttctcctcagcaggagactggcttcgctaaggctccagcgggaaccgactgctttttccactgttcaccaggatcacgagggcagggtgatcgcaaagaggaagtcacaagtgagccaggcggaacgtcgataatgtcacgccttggaggcatgaacgccgcagtcagggctgtaacaaggatggggatctatgtgggtgcaaaagtctttctcatctatgagggatacgagggcctggtggaaggcggagagaatattaagcaggccaactggctaagcgtgagtaatataatacagctggggggtacgattattggaagcgccaggtgtaaagcattcacaactagagaaggcagacgcgcagccgcatataacctggtgcagcacgggatcacaaatttgtgcgtgatcggaggcgacgggtcattaaccggcgctaatatatttaggtctgaatgggggtctctcctcgaggagctagtggctgagggcaagatttctgaaacaactgcgaggacatactctcatctcaatattgcgggtctggtgggcagtatcgacaatgatttctgcggtactgatatgaccatcgggacagactctgcattgcaccgtatcatggaggtcatcgacgcaatcacgacccgagggaggctcggcgaactgcacgtctag

SEQ ID NO: 234790 - DNA, 2484 bp, synthetic construct
  misc_feature 1..2484: note = Description of Artificial Sequence: Synthetic coding sequence
  source 1..2484: mol_type = other DNA
atgtgcaaccagggcaggggccgagagagctcgcgcggaggacttcatgtgcaggggagttgtagggggctgtctagaagtccacaacaagaaaccggcttcgctaaggctcccgctggaaccgactgcttcttccactgttctcctggaagtcgcggacagggagataggaaggaggaggtgacctcggagccaggcggaaccagtatcatgagtcggctcggcggaatgaatgcagcggtcagagccgtgacacgcatgggcatctatgtgggggcaaaagtattcctcatctatgaagggtatgaagggttagttgaaggcggagaaaacatcaagcaggccaactggttgtccgtgtctaatatcattcagctgggcggtacgattatcggctcagccagatgcaaggcatttacaacacgagagggaaggagggcagctgcttataatttggtccagcacggtatcaccaacctttgcgtgataggcggagacggctccttaactggcgcaaacattttccgcagtgagtggggatccctgctagaagagttagttgcagaaggaaagatctccgagacaacagctcgaacatatagtcacctgaacattgcagggctcgtcggaagcatagacaacgacttctgtggcaccgatatgacaattgggacagactctgcgctgcatcgtattatggaggtaatcgacgccatcacaaccactgctcagagtcatcaaagaaccttcgtgctggaggtcatgggtaggcactgtgggtacctcgctctcgtttcagccctggcctccggggcagactggctgtttattccagaagctccaccagaggacggatgggagaacttcatgtgcgagaggttgggcgagacccgaagccgaggttctaggctaaatattattatcatcgccgagggagccatagatcggaatggaaagccaattagctcatcatacgtcaaggatctggtggtccaacggcttgggttcgacacacgagtaacggttttgggacacgttcaacggggaggtacaccttctgccttcgaccgaatccttagcagtaaaatgggcatggaggccgtgatggcactgctcgaagctactccagacacacccgcatgcgtggtcacattatcgggaaaccaaagcgtacgtctccccctcatggaatgcgttcaaatgacaaaggaggtccagaaagcgatggatgataagcggtttgatgaggccacccagctgcgaggcggtagctttgaaaacaactggaacatttacaagctgctggcgcaccagaaacctccaaaagagaaatctaacttttctctggccattctgaatgtgggggcacctgccgcagggatgaacgcagccgtcagatctgccgtgcgcactggcatttcccacgggcacactgtctatgtcgttcacgacggctttgagggcctcgcgaaagggcaagtgcaggaagtgggctggcacgacgtcgctggttggcttgggagaggcggatcaatgctgggaaccaaacgaacactgcctaagggacagctcgagtctatcgttgagaacatccgtatttacgggatccatgctttactggtagtggggggtttcgaggcatacgagggggtccttcagctcgtggaagctcggggaagatatgaggagctgtgtattgttatgtgtgtgattcccgctacgatctctaacaatgtccctggcacagattttagcctgggatcggacacagccgtgaatgcagctatggagagctgtgaccggatcaaacaatctgcgagcggcaccaaaaggcgagttttcatagtggaaactatggggggttactgcggctacctggccaccgtcactggcattgcagtcggagcagatgctgcctacgtcttcgaggacccattcaacatccatgacctgaaggtgaacgtggagcatatgactgagaaaatgaagacggacatccaacgaggtttagtgcttaggaacgagaagtgccacgattattacacgaccgagtttctgtataacttatattcttctgagggaaaaggtgtgtttgattgtcgcactaacgtgctgggacacctccagcaaggcggagctcctaccccatttgataggaactacggaactaagctcggcgtaaaggccatgctttggctgtcagaaaaactccgagaggtatacaggaaaggcagagtttttgcaaatgctccggactctgcctgcgtgataggcctgaagaaaaaagcagtggccttttcaccagtgaccgaactcaaaaaggacaccgatttcgagcatagaatgccgagggagcagtggtggctgagtcttcgattgatgcttaagatgctggcccagtaccgcatcagcatggcggcttatgtgtccggggagctggagcacgtgaccagaagaacactgtcaatggacaaggggttctag

SEQ ID NO: 234791 - DNA, 1722 bp, synthetic construct
  misc_feature 1..1722: note = Description of Artificial Sequence: Synthetic coding sequence
  source 1..1722: mol_type = other DNA
atgggtcgccactgtgggtacctggcgcttgtgtccgccttagctagcggtgccgactggcttttcataccagaggcccctccagaagacggctgggagaattttatgtgcgaaagattaggtgaaacacggtccagaggttctcgtttgaatattattatcatcgcggagggtgcaattgatagaaacggtaaaccaatctcctcgtcctatgtaaaagatttggtggtacaacgccttgggttcgataccagagttaccgtcctgggacacgttcagcgaggcggtactccgtcagcttttgatcggatcctgtccagtaaaatgggcatggaagccgtgatggccctgctcgaagccacacccgataccccggcttgcgtcgtgacattgtcaggcaaccagagcgtgcggcttccactgatggagtgtgtgcagatgaccaaggaagtgcagaaagcgatggatgataagagatttgacgaagccactcagctccgtggtggcagctttgagaataattggaatatctacaaactgctggcacaccagaaaccccctaaggagaaatcgaacttctccctcgcaattcttaacgtcggcgctccagccgcaggcatgaacgcggctgtccgctctgcagtacggacaggcattagtcacggccacaccgtctatgttgtgcatgacggctttgagggcttggctaagggtcaggttcaagaggtgggttggcatgacgtggcaggttggctggggagaggagggagcatgttggggactaaaagaactttacctaaagggcagctggagtcgatagtggagaatattcgcatctacggcatccacgctctactcgtggtcggaggcttcgaggcatacgaaggagtcctccaacttgtggaggccagagggcgttatgaagaactgtgcatcgtgatgtgtgtgattcctgcgacaatctccaataacgtgccaggaactgacttttccctcgggagcgacaccgcagttaatgccgcaatggaatcctgtgaccgtataaaacagagtgcttccgggacaaaaagaagagtttttattgtggaaacaatgggcggttactgcggctatctggccacagttaccggaatcgcggtcggggctgatgcagcgtatgtattcgaagaccctttcaacatccacgaccttaaggtgaatgtcgaacatatgaccgagaaaatgaaaaccgatattcagcggggactggtcctcaggaatgagaagtgccacgactattacacgaccgaatttctttataacctttacagcagcgaagggaaaggggtttttgattgtcggactaacgtgctagggcacctgcagcagggaggggctcccactcccttcgacagaaattacgggacaaaattaggcgtaaaggctatgctgtggctttccgaaaagctgcgggaagtgtatcgaaagggacgcgtgttcgctaacgcccctgattccgcatgtgtcattggcctcaagaaaaaagcagtggcattcagcccggtgacagagttgaaaaaagatacagactttgagcacaggatgccaagagaacaatggtggttatccctgaggctgatgcttaagatgttggcccaatatcgaatctcaatggccgcttacgtcagcggggagctggaacatgttacacgcagaacgctgtccatggacaaaggcttctag

SEQ ID NO: 234792 - DNA, 2343 bp, synthetic construct
  misc_feature 1..2343: note = Description of Artificial Sequence: Synthetic coding sequence
  source 1..2343: mol_type = other DNA
atgacccacgaggagcaccatgctgcgaaaaccctcggaattggcaaagcgattgccgtgctgaccagcggtggcgatgctcagggaatgaacgcggcagttcgcgcagtggtgcgggtaggaatatttaccggcgctagggtgttcttcgtgcacgagggctaccagggattggtcgacgggggtgatcatatcaaagaagcgacctgggaaagtgtcagcatgatgttacagttgggaggaaccgttatcggtagtgctagatgcaaagacttccgcgagcgggaaggtaggctacgggcagcatataacctcgtgaagcggggaattactaacctgtgcgtaatcggtggagatggaagtctaacaggagctgacacctttcgaagcgagtggtcagatctgttgagtgatcttcagaaggctggcaagatcacagatgaggaagccacaaagtcatcctacctgaacattgtgggcttagttggaagcatcgacaatgacttttgtggcactgacatgacaatagggaccgatagcgctctgcatcggattatggaaatcgttgatgccatcactacaacggcccagagccatcaacgcaccttcgtgttggaggtgatgggtcggcattgtgggtatctcgccctcgttacaagcctgagttgcggggcagattgggtatttatcccagaatgtccaccagacgatgactgggaagaacatttgtgccgacgactgtctgagacaagaacccgagggagccgcctgaatatcatcattgtggcagagggagccatcgataagaatgggaagcctatcacctcagaggatattaaaaaccttgtggtgaagaggctgggctatgatacccgcgttactgttctgggtcacgtgcaacggggtggcactccttctgcgtttgaccgtatcttgggatcacgtatgggagtggaagcggtgatggcgcttttggagggaacaccagatacgcctgcgtgtgtggtgagcctgtcaggcaaccaagccgtgcggctgcccctaatggagtgtgtgcaagtcaccaaggacgtgactaaggctatggatgagaaaaaattcgacgaggccctgaagctgcggggacgaagtttcatgaataactgggaagtgtataaactcctagcacatgtcagaccaccggtgtccaaatcaggttcccacacggtggccgtgatgaacgttggagcccctgctgctggtatgaatgcggcagtccgcagcacagtgagaatcggacttatccagggtaacagggtgttagtggttcacgacggctttgaaggtcttgcaaagggccaaattgaggaggccggatggagttacgtgggaggctggaccggacaaggcggatcaaagctaggaacgaagcgaaccctgcccaaaaaaagctttgaacaaatcagtgccaacattaccaagtttaacatccagggcctggtgatcattggagggtttgaggcgtataccgggggacttgaattaatggaaggacgcaaacagttcgatgagctgtgcattcctttcgtggtgatcccagctactgtcagcaataatgtaccaggatcggattttagtgtgggggctgatactgccctgaacactatctgcactacctgtgacagaattaaacagagcgcggctgggacaaagcgcagggtttttattattgagacaatgggcggatactgcgggtatctggccacaatggctggactggccgcaggggctgatgcggcttacatcttcgaggaacctttcacaattagagatctacaggcaaacgtcgagcatttagtgcagaagatgaagaccactgtgaagcgaggacttgtattacgcaacgagaaatgtaacgagaattacactaccgattttatattcaacctgtattccgaggaggggaaaggtatcttcgatagtcgtaaaaatgtcttggggcatatgcagcaaggcggttccccaactccgtttgataggaattttgccacgaaaatgggtgcaaaggccatgaattggatgagcggcaagattaaggagtcttataggaacggacggatctttgcaaacaccccggattctgggtgcgttctcggcatgcgcaagcgcgctctggtcttccagcccgtcgccgaattgaaagaccagactgattttgaacacaggattccaaaagaacagtggtggctgaaactgcggccaatattgaaaattctggcaaagtacgagattgatctggacacgtcagaccatgcacacctggagcacatcaccaggaagaggtctggcgaagctgccgtttag

SEQ ID NO: 234793 - DNA, 2556 bp, synthetic construct
  misc_feature 1..2556: note = Description of Artificial Sequence: Synthetic coding sequence
  source 1..2556: mol_type = other DNA
atgcacaaggatgaatttcatctcaaatttttcatgtgcgtcatccaaagccggcagctggtgcgcaccccccagcgcacagccggagaggcttcaaccagttctatgttaatcccaaaaccaccacccaaaactgacatcctcaaatcacttgatactatggatgaccccgatactgttgggtcgatacccgtctttaaaacggaatggatcatgacccacgaggaacatcacgcagccaagacccttggcatcgggaaagcaattgccgtgttgacaagtggtggagacgcacagggaatgaatgcagcggtccgggcagttgtccgcgtcggcattttcactggcgctcgagtgttctttgtgcatgaagggtatcagggcctggttgatggcggtgaccatattaaagaggctacatgggaatccgtgagcatgatgctacagctgggaggcaccgtcattggaagcgcaagatgtaaggattttcgggaacgcgaagggaggctgcgggctgcttacaacttggtgaagcggggtatcactaatctgtgcgtgatagggggtgacggaagtctcactggagcggatacattccgtagtgagtggagcgatctgctgagcgacttgcagaaagcaggaaaaataactgacgaagaggccactaagtcctcttacttaaatatcgttggtcttgtgggcagtattgacaacgacttctgtgggacagatatgaccataggcacagatagtgccctgcacaggatcatggagatagtggatgccattaccactacggctcagtcccaccagcgtacttttgtgctggaagttatggggcgtcactgcgggtatttagctttggttacatctctgtcttgcggcgcagactgggtattcattcctgaatgcccccctgatgacgactgggaggagcacctgtgtaggagactctctgagactcgaacacgcggaagtcgtttgaacatcataatcgtggccgagggcgcaatcgacaaaaatggcaaacctattacctcagaggacatcaaaaatcttgttgtaaagagactgggctatgacacccgggtgacagtgctaggccacgtccaacggggaggaacaccctccgcatttgacaggatcttagggtcccgaatgggcgtggaggctgtgatggctttactggaaggaacccctgatacaccagcctgtgtcgtgagcctttctggaaatcaagctgtaaggctgccactcatggagtgcgttcaggtgactaaagatgtgacaaaagccatggatgaaaaaaaattcgacgaagcactcaagctccgcggtagatccttcatgaacaactgggaggtgtacaagttattggcccatgtcaggccacctgtcagcaagagcggcagccatacagtggcagtcatgaatgtgggtgcgcctgcggctgggatgaacgcagctgtacggagcactgtgaggattggtctgattcagggcaacagggtcctagtggtgcacgatggctttgagggcctagcaaaagggcagatcgaggaagcagggtggtcatatgtgggtggctggaccggacagggaggtagtaagctgggaaccaagcgcacactcccaaagaagagtttcgagcagatcagcgccaatatcacaaagttcaatatacaaggtcttgtgattatcggagggtttgaggcgtatacggggggactggaactgatggaaggtcgaaagcagtttgatgagttatgcatccccttcgttgtaataccagctacagtaagcaataacgttcccggatctgacttctcagtgggggcagataccgctcttaacacgatctgtaccacgtgcgatcgtataaagcagagcgccgcagggaccaaacgccgtgtgttcattatcgaaactatggggggatactgtggctaccttgccaccatggctggccttgccgcaggtgctgacgccgcttacattttcgaagagcctttcactataagagacctgcaggcaaacgtggagcatttggtgcaaaaaatgaaaacaactgtcaaaagggggctggttctccggaatgagaagtgtaacgaaaactacaccacagacttcatcttcaacctgtattcagaggaaggtaagggcatatttgattcccggaaaaatgtgttagggcacatgcagcagggcggaagcccaaccccgttcgatcgcaattttgccacaaagatgggggctaaggctatgaattggatgtccgggaagattaaagaatcctaccgtaatggcaggatcttcgccaatactccagactccgggtgtgtgctggggatgcggaagagagcactggtttttcagcccgtggctgaattgaaagaccagacagacttcgagcatcggatcccaaaggagcaatggtggctcaagttgagaccaatactgaagatcctggccaagtatgaaatcgacctagatacctctgatcacgcgcacttagagcacattacgcgcaagcgctctggagaagccgctgtctag

SEQ ID NO: 234794 - DNA, 2343 bp, synthetic construct
  misc_feature 1..2343: note = Description of Artificial Sequence: Synthetic coding sequence
  source 1..2343: mol_type = other DNA
atgactcacgaggaacatcatgctgctaagacccttgggattggtaaagccatcgcggtgctaactagtggcggagacgctcaggggatgaacgctgctgtaagggcagtggtcagagtgggtatttttacaggggctcgggtgttcttcgtacacgaaggctaccaagggctcgtagatgggggagaccacatcaaagaagcaacatgggagtctgtgtccatgatgctacaactgggcggtaccgtgattgggtcagccaggtgtaaggattttagggaaagggagggcaggctgcgggctgcatacaacctggttaagcggggaattaccaacctctgcgtgattggtggagacggatcccttactggggcagatacatttcgatccgagtggtctgacctgctcagcgatctgcaaaaggctggaaagatcacggacgaagaggcaaccaaatcaagctaccttaatatagtgggcttagtcggctcgatagacaacgacttttgcggaaccgacatgaccatcggaacagactcagccttacatagaattatggagatagtcgacgcaatcactaccacggctcagtcacaccagcgaacctttgtactggaagtcatgggcaggcattgtggttacctggcactggtgacgtccctttcttgcggtgccgactgggtgtttataccggaatgcccccctgacgacgactgggaagaacacctctgtcgtagactctctgaaacgcgaacccgtggctctcgccttaacattataattgtggccgaaggagcaatcgataagaatggcaaaccaattacgtctgaagacatcaaaaatcttgtcgttaaacgcctaggatacgatactcgggtaactgtcctcggtcatgtgcaaagaggaggaacgcctagtgccttcgatagaattctgggtagccgtatgggggttgaagccgttatggccttactggaaggcacacccgatacccccgcatgcgttgtgagcctctctggcaaccaggcggtcaggttgccgttaatggagtgcgtccaagtgaccaaagacgtcacgaaagcaatggatgagaagaagttcgatgaggctcttaagctcagaggaaggtctttcatgaataattgggaggtctataaactgctggcacacgttcgacccccagtcagcaaatctggaagccacacagtcgcggttatgaatgttggcgcacccgctgcgggaatgaacgccgctgtgcgctcgactgtcaggatcggcttgatccaggggaatcgagtgctggtggttcacgatggtttcgaaggacttgctaaaggccaaatagaggaagccggttggagctatgtgggcggatggactggccagggaggatccaagctcgggacaaagcgtacactacctaaaaagtccttcgaacagatctcagcgaatatcacaaaattcaatattcaagggctggtcatcattggagggtttgaagcctacactggcggtcttgagctcatggagggcaggaagcagtttgatgaactttgtattccctttgtggttatacccgcaaccgtctctaacaatgtgccaggatccgatttttccgtcggcgcagatacagccttgaatacgatatgtactacttgtgaccggattaagcaaagcgctgcgggaactaaaagacgggtgttcattatcgagacaatgggagggtactgcgggtacctggcgacgatggcaggattggcggcaggggctgacgcagcgtacattttcgaggagccttttactattagagatctgcaagcaaacgtggagcatctcgtccagaagatgaaaactacagtaaagaggggactggtgctgcgaaatgagaagtgtaacgaaaactatacaactgatttcatctttaacctctactcagaagaagggaaaggtatcttcgactcgaggaaaaacgtactcggccatatgcagcagggtgggagcccaacaccctttgacagaaactttgctactaaaatgggggcaaaggccatgaattggatgagcggaaaaattaaagaatcttatcggaacggcagaatatttgccaacacccctgattctggctgtgtgcttggaatgagaaaacgcgctctggtattccagccagtggctgagttaaaagaccagacggactttgaacatcgtattccgaaagaacaatggtggttgaaactgcggccaattcttaaaatcctcgcaaaatacgagatcgatctggacacgtcagatcacgctcacctggaacatattaccagaaagagatctggagaggccgcagtttag

SEQ ID NO: 234795 - DNA, 2250 bp, synthetic construct
  misc_feature 1..2250: note = Description of Artificial Sequence: Synthetic coding sequence
  source 1..2250: mol_type = other DNA
atgacccacgaggagcaccacgcagccaagactctggggattggcaaagctattgctgtgctgacatccgggggagacgcacaggggatgaacgcggcagtgcgcgctgtagttcgagtagggatcttcaccggcgctagggttttcttcgtgcacgagggttatcaggggctggtggatggtggcgaccatattaaggaagccacgtgggaaagcgttagcatgatgctccagctgggcggaaccgtcattgggtcggctcgttgcaaggatttcagggaaagggaaggccgactcagagccgcatacaaccttgtaaaacggggtattactaacctctgtgttatcggcggtgatgggtcgttaactggtgcagatacctttcgttcagagtggagcgacctgctgtccgacctgcagaaagcgggtaaaattactgatgaggaagctacaaaaagctcctacttgaacatagttggcctggtaggctccatcgacaatgacttctgtggaactgatatgaccattggcacagactcagccctgcaccgcattatggaaattgttgatgccatcaccactactgcccagagccaccagaggacttttgtcctcgaagtgatggggagacactgtggatacctagccctcgttacctccctctcatgtggggctgattgggttttcattccagaatgccctccagacgatgattgggaagagcatctgtgccggaggctgtctgaaactcggactcggggttcacggctgaatatcatcatcgtcgccgaaggtgccatcgataagaacggaaagcccatcacatccgaagatattaagaatgggagccgcatgggcgtcgaagcagtgatggcgctcctcgagggaacgcccgacaccccggcttgtgtagtgtccctaagcgggaaccaggcagttcgattaccactcatggagtgcgtccaagttacaaaagacgtcactaaagctatggacgaaaaaaagttcgatgaggccctgaagcttcgcggacgtagcttcatgaataactgggaggtttataagctgctcgcccatgtccgtccccctgtgtcgaaatctggaagtcacacggttgcggtgatgaatgttggggctcccgctgccggtatgaacgccgcagttcgctcaacagtgcggatcggcctcatacagggtaaccgagtgctcgttgtacacgatggcttcgagggattggctaagggacagattgaggaagccggatggtcctatgttgggggatggaccggccagggcggatccaagttgggcactaaaaggactctgcccaaaaaatctttcgaacaaatctctgctaacattacgaagtttaacatccagggcctggtgatcattggaggatttgaggcctatactggagggcttgagctgatggagggcaggaagcagttcgacgaattgtgcatcccatttgtggtgatcccagccactgtgagcaacaacgtcccagggtcagatttttctgtcggggctgacactgcgctaaacactatttgcactacctgtgacagaatcaaacaaagtgcggctggcaccaagcggagggtgttcatcatcgagactatgggcggttactgtggttacctcgctaccatggctggcctggccgctggagccgatgccgcatacatcttcgaggaaccattcacaatccgcgacctgcaggcaaacgtcgaacatctggtacagaaaatgaaaactacagtgaagagaggcctagttctcagaaacgagaagtgcaacgagaactacactacagattttattttcaatctttactccgaagagggcaaaggaatatttgactccagaaaaaacgtgctgggccacatgcagcagggaggctccccaacgccgttcgaccgcaattttgctacaaagatgggtgctaaggccatgaactggatgtccgggaaaatcaaggagtcttacagaaacggccgaatattcgcgaacactccggactcagggtgtgtgctgggcatgaggaagcgcgctttggtttttcaaccagtggccgagctcaaagaccaaactgatttcgaacatcgtattcccaaagagcaatggtggctaaagctgaggccgatcctcaagattctggccaagtacgaaatcgacctggacacgagcgatcacgctcacctggaacatattacaagaaaacgctcaggggaagcggcagtgtag

SEQ ID NO: 234796 - DNA, 534 bp, synthetic construct
  misc_feature 1..534: note = Description of Artificial Sequence: Synthetic coding sequence
  source 1..534: mol_type = other DNA
atgacccacgaggagcatcacgctgcaaaaactctgggtatcgggaaggccattgcggtgttaactagtggcggagacgcacaaggcatgaacgctgcggtgcgatcaaccgttcgtatcggtttaattcagggaaacagggtcctagtcgttcatgatggctttgagggacttgccaaagggcagatcgaagaagctggctggtcatatgtgggtgggtggaccggacaggggggtagcaaactgggtacaaagagaaccttgccaaagaagagttttgagcagatcagtgctaacatcaccaaatttaacatccagggcctggttatcatcgggggttttgaggcttataccggcggtctggaacttatggaagggagaaagcagtttgacgaattgtgcattcccttcgtcgtcattcctgcaaccgtgagtaataacgttccaggctctgatttcagtgtgggcgcagacaccgccctgaacactatctgtactacctgtgataggattaaacaatccgctgccggatag

SEQ ID NO: 234797 - DNA, 2343 bp, synthetic construct
  misc_feature 1..2343: note = Description of Artificial Sequence: Synthetic coding sequence
  source 1..2343: mol_type = other DNA
atgacgcacgaggagcaccacgccgcaaagacactgggtattggcaaagctatcgcagttctgacgtccggaggggacgcccagggcatgaacgccgcagtgagagccgttgtgcgcgtaggcatttttaccggagccagagtgtttttcgtccacgaggggtaccagggcttagtggacggaggcgaccatattaaagaagcaacttgggaaagcgtgtctatgatgctgcagttaggtggcacagtcattggctccgccaggtgcaaggacttccgggagcgcgaggggagactgcgcgctgcatataacctggtaaagcgcggaataacaaatttatgcgtgatcggaggggacggttcccttactggggctgatacttttaggtccgagtggtcagatttgctgtccgaccttcagaaggctgggaagattactgacgaagaagccaccaaaagtagctacctaaatatagtcgggctggtgggctctatagataacgatttctgtggaactgatatgaccatcggtacggattccgcactccatcgtattatggagatcgtggatgccatcacaaccactgcccagtcgcatcagagaacattcgtgctcgaagtcatggggagacactgcggctatctcgctctcgtgaccagtctgtcttgtggggcagactgggtcttcatcccagagtgccctccggatgacgattgggaagagcatctttgcaggcgcttatccgaaactaggactagaggttcacggctgaacatcattatcgtggctgagggcgctatcgataagaatgggaaacccatcacaagtgaagacattaagaacctcgtcgtcaagcggttggggtatgatacccgcgtgactgtgctcggacatgtgcagcggggtgggactccaagtgcctttgaccgcatcctgggatcaagaatgggcgtggaggccgtaatggctctgctggagggaacaccagacacacctgcttgcgtagtgtctttatctggcaaccaggctgtaagactgccgctgatggagtgtgtgcaggtgactaaagacgtgaccaaagcgatggacgaaaagaagtttgacgaagctctaaaactgaggggaaggtcattcatgaataactgggaggtctacaaactcctggctcacgtgcgccctcccgtgagcaagtctggcagccacacagtcgccgttatgaacgtaggagctcccgcagctggtatgaacgctgcagttcggagtaccgtgagaattgggctaattcaaggcaatcgcgtgctggtggtgcacgatggctttgagggtctcgccaaaggccaaattgaagaggctggatggtcctatgtcggaggatggactggacagggaggaagcaagctcgggacaaagcgcacccttcccaagaagtcttttgaacagattagcgccaacatcaccaagtttaacatccaggggctggtgatcatcggaggtttcgaagcctacacaggcggattagaattgatggagggacgaaaacagtttgatgagctctgtatccctttcgttgtgatccccgctaccgtaagcaacaatgtccccggatctgactttagtgttggggcagataccgccctgaatacaatttgtaccacatgcgacaggattaaacaatcagcagcagggaccaagaggagagtgttcattatagagactatgggagggtactgtggctacctagctaccatggccggtcttgctgcaggcgcagacgccgcatatatatttgaggagcctttcacaatccgggacctccaagcaaacgtagagcatctggtgcaaaaaatgaagactaccgtgaaacgagggctggttcttagaaatgaaaaatgcaacgagaattacacaaccgactttatcttcaacttatactcggaggaaggcaagggcattttcgatagccggaaaaacgttctggggcacatgcagcagggtgggagccccaccccattcgaccgcaattttgctaccaaaatgggagctaaggccatgaattggatgagtggaaagattaaagagagctatcgtaatggaaggatctttgcaaacacccctgatagcgggtgtgtcttaggcatgaggaaacgagccctagtcttccagccagtagctgagctgaaggatcagacagattttgaacaccgtatccccaaagagcagtggtggctgaagttacgacccattctcaaaattctcgccaagtacgagattgacctggacaccagtgaccatgcacacctggagcacattactcggaaaagatccggagaggccgcagtgtag

SEQ ID NO: 234798 - DNA, 354 bp, synthetic construct
  misc_feature 1..354: note = Description of Artificial Sequence: Synthetic coding sequence
  source 1..354: mol_type = other DNA
atgactcatgaggaacaccatgccgctaagaccctgggtataggtaaggcaattgccgtgctaacctccgggggagatgctcagggtatgaacgccgctgtccgagctgttgtgcgggtggggatttttactggcgcacgcgtatttttcgtgcatgaggggtatcagggactggtcgacggaggcgaccatattaaagaggccacatgggagtctgtcagtatgatgctacagctggggggaacagtaattggcagcgctaggtgtaaggacttccgggagagggaagggcgtttaagagccgcatataacctggtcaagaggggcataaccaacctctgtgtcattgggtag

SEQ ID NO: 234799 - DNA, 486 bp, synthetic construct
  misc_feature 1..486: note = Description of Artificial Sequence: Synthetic coding sequence
  source 1..486: mol_type = other DNA
atgacccatgaagagcatcatgcggctaaaaccctcggtattgggaaagcgattgccgtactgaccagtgggggagacgcccaaggcatgaatgctgcagttagggctgttgttcgggtcggtatcttcacaggtgccagggtgttttttgtacatgaaggctaccaaggactggtggatggtggcgaccatattaaggaggctacttgggagtcggtatctatgatgctacagctgggaggcaccgtcattgggtctgcacggtgtaaagactttagggagcgtgagggacgactgagagcagcttacaacctagtgaaaagaggcattacaaatctatgcgtcatcggcggagatgggtctcttactggagccgatacctttcggtcagagtggtctgacctgttgagcgacctgcagaaagcaggcaaaatcactgacgaggaagccacaaagtcaagttacctcaacatagtcggtctctag

SEQ ID NO: 234800 - DNA, 474 bp, synthetic construct
  misc_feature 1..474: note = Description of Artificial Sequence: Synthetic coding sequence
  source 1..474: mol_type = other DNA
atgacacacgaagagcatcacgccgctaagaccttgggtatcggcaaagccatcgccgtcctcacctctggcggagatgctcaggggatgaacgcagcggtgcgtgcagtcgtaagagtagggatcttcacaggggctagggtgtttttcgtccacgagggctatcagggcctggttgatggcggtgaccatataaaggaggccacctgggaatcagtctccatgatgctgcaactgggcggtacggtcattggcagtgctcgctgtaaggatttccgcgagcgggaagggcgactccgggcagcatataatctggtcaagcgcggtatcaccaacctgtgtgttatcgggggagatgggagcttgaccggtgccgatacattccgcagcgaatggtcagatctgctttccgatctgcaaaaggccggaaaaattactgatgaagaggctactaagtcttcttatctgaattag

SEQ ID NO: 234801 - DNA, 258 bp, synthetic construct
  misc_feature 1..258: note = Description of Artificial Sequence: Synthetic coding sequence
  source 1..258: mol_type = other DNA
atgacacacgaggaacaccatgcggctaaaacattgggcatcgggaaagctatcgcagtactgacaagcgggggagatgctcaggggatgaacgccgctgtcagagctgtggttagggtgggaatctttactggtgcccgagtgtttttcgtgcacgagggttaccaggggctggttgatggaggcgaccacataaaagaggctacttgggaatcagtcagcatgatgctgcaattagggggtacagttatcggatag

SEQ ID NO: 234802 - DNA, 420 bp, synthetic construct
  misc_feature 1..420: note = Description of Artificial Sequence: Synthetic coding sequence
  source 1..420: mol_type = other DNA
atgactcacgaagagcatcatgccgctaaaaccctcggtatcgggaaagccattgctgtgctgacatcaggaggggatgctcagggcatgaatgcagcagtgcgagccgtggtgcgtgtgggtatttttactggtgcccgagtcttcttcgtccacgagggatatcagggtttggttgatgggggtgatcacatcaaggaggcaacctgggagtccgttagcatgatgctgcagctgggaggaactgttataggtagtgccaggtgcaaagactttcgcgagagagagggtcgcctgcgtgctgcctataatctggtcaaaaggggtattacaaatttgtgcgtcatcgggggagatggcagcctgacaggagctgacacctttcggtcagagtggtccgaccttttatcagacctgtag

SEQ ID NO: 234803 - DNA, 2250 bp, synthetic construct
  misc_feature 1..2250: note = Description of Artificial Sequence: Synthetic coding sequence
  source 1..2250: mol_type = other DNA
atgacccacgaggaacatcacgctgcaaaaaccttgggaattgggaaagctattgcagtgctgacatccggtggagatgcacagggcatgaacgcagccgtcagggcggtggttcgagtggggatctttaccggcgcaagagtgttttttgttcatgaaggctatcaggggctggtcgatgggggagatcacataaaggaagctacatgggaaagcgtttcaatgatgttgcaactgggcggaacagtgatcggatcggcgaggtgcaaggactttcgggagcgggagggacggctgcgcgctgcctacaacctggtgaagcgcggaatcacaaacctgtgtgtgattggaggagacgggagtctgaccggggctgacaccttccgtagtgaatggtcggatctgctttctgacctgcagaaagctggtaaaatcacagatgaggaggcaactaagtccagttacctgaatatcgtcggcctggtcgggagcatcgataacgacttctgcggaaccgatatgaccattggcaccgactccgccctacacaggatcatggagatcgttgatgctatcaccactacagctcaaagccaccagcggactttcgttctggaagtaatgggacgtcattgtggctatttggctctcgtgaccagtctttcatgtggcgctgactgggttttcatacctgagtgcccacctgatgacgactgggaggagcacttgtgccgcaggttgtccgagactcggacaagaggaagccggttgaacatcatcatcgtggctgagggagcaattgataagaatggtaagcctattacatccgaggacattaagaatggttcacgcatgggcgtcgaggccgtgatggccctgctggaaggaacacccgacaccccggcatgtgtcgtcagcctctctggtaaccaggccgtccgacttcctctcatggagtgtgtacaagtgacaaaggacgttaccaaggccatggacgagaagaagttcgacgaagccctgaaactgagaggtcggagttttatgaataattgggaagtgtataagctgctggcccatgtgcgtcctcccgtctcaaagtcagggtcccacaccgtagccgttatgaacgtcggcgcaccagcggctgggatgaacgctgccgtgcgctccaccgttaggattgggctcattcagggcaatcgcgtgctcgtagtgcatgacggattcgaaggacttgccaagggacagattgaggaagccggatggtcttatgtgggcggatggacaggacagggagggtccaagttgggcacgaagcggactctgcctaagaaaagttttgagcagataagcgccaatatcactaaatttaacatccagggacttgtgattataggcggatttgaagcttacacggggggtcttgaattgatggaaggacgaaagcagttcgacgagctttgcattcccttcgtggttattccagcaacagtgtcaaacaatgtaccgggaagtgattttagcgtgggcgcagacacggccctgaatactatttgcaccacatgcgatcgtatcaaacagagtgctgccggtaccaagaggagagtttttattatagaaactatgggagggtattgcgggtacctggctacaatggcgggtctggccgcaggggctgatgcagcatacatcttcgaagaaccatttacaatacgcgatctgcaggccaatgtagagcacttggtgcagaagatgaaaactaccgtgaagaggggattggtgctgagaaatgagaaatgcaatgaaaactacaccactgactttatctttaacctttatagtgaggaaggaaaggggatctttgactcccgcaagaacgttttggggcacatgcagcagggagggtcgccaaccccatttgatagaaactttgccaccaagatgggggcaaaagccatgaattggatgtcaggcaaaatcaaggaatcttaccggaacgggagaatctttgccaatactcccgactcaggctgtgttctaggcatgcggaagcgggctcttgtgttccagcccgtggctgagctgaaagatcagacggactttgaacaccgaatccctaaagaacagtggtggcttaaactgcgccctattctgaagatactggctaagtatgaaatcgacctggatacatccgaccacgcccatcttgaacatattacacgaaagcgaagcggggaggccgcagtgtag

SEQ ID NO: 234804 - DNA, 609 bp, synthetic construct
  misc_feature 1..609: note = Description of Artificial Sequence: Synthetic coding sequence
  source 1..609: mol_type = other DNA
atgggcggatactgtggctacctggctaatatggggggactggccgcaggagcagatgcggcatatatatttgaggagccatttgatatacgggatctgcagagcaatgtcgagcaccttacggagaagatgaaaaccaccattcagcgaggtctcgtgctgaggaatgaatcttgttcagagaactacactactgatttcatctaccagttgtactccgaagaggggaagggtgtatttgattgtcgaaagaatgtacttggtcacatgcagcagggaggggctccctcacccttcgaccggaattttggcacgaaaatctccgccagagccatggaatggataaccgccaaactgaaggaggcccgaggtaggggcaaaaaattcacaaccgatgacagcatctgtgtcctgggcatcagcaagagaaatgtcatctttcagcctgtggcagagctgaagaagcaaacggatttcgagcacagaattccaaaggagcagtggtggctcaagctgcgacctttgatgaagatcctggcaaaatacaaggcctcatacgacgtaagtgatagtgggcaacttgagcacgtgcagccctggtccgtctag

SEQ ID NO: 234805 - DNA, 2331 bp, synthetic construct
  misc_feature 1..2331: note = Description of Artificial Sequence: Synthetic coding sequence
  source 1..2331: mol_type = other DNA
atgtgcggatacgagcgatgcaggccatgtagaggagctcacggctacctgaggggaggtcaaggggtattgcaccttcgcggattgccaggtcacgggggacgaagactcaagcaccgcagaggcagacttggcgagtgtctgcagcatccagcgagtggcgcagtccgcggtgattggcgggaaaaaccagggtgctggagtcacagatttccctgccccggaaggcatgctttggtcgggggaaccattattgggtctgcaaggtgccaggctttcagaactagagagggccgtcttaaggcagcatgcaaccttctgcagcgtggcataacaaacttgtgtgtcattggtggagacggatctcttaccggggctaacctgtttaggaaagagtggagcggtctcctcgaagaactggctaggaacgggcagatagacaaagaggctgtgcaaaaatatgcgtacctaaacgtcgttgggatggtgggttccattgacaacgatttctgtggcactgatatgacaattggcaccgactccgcactgcacagaattatcgaggtggtcgacgccattatgactactgcccaaagtcatcagcgcacattcgttctggaagtcatggggagacattgcggctacttggctctggtgtcagcactggcctgtggcgctgattgggtttttctgcctgagtcccccccagaggaaggctgggaagaacagatgtgcgtcaaactctccgagaacagagctcgaaaaaagagactgaatattatcattgtcgccgagggggctatcgacacccagaataaacccatcacatctgagaaaatcaaggaactcgtcgtgacacagctgggttacgatacacgggtcactatcctgggccacgtgcagcgcggaggaactcctagtgcatttgatcgcatcctcgcttcaagaatgggcgtcgaagccgttattgctctgctcgaagctactccggatactccagcatgcgtggtgtcactgaatggtaatcatgccgtccggcttcccttgatggagtgcgtccaaatgacgcaagacgtgcagaaagctatggatgaacggcgattccaggatgcagtccggctgcgcggacgttctttcgctggcaacctcaacacatataaaaggctagcgataaagcttccagatgatcagatccctaaaactaattgtaatgtcgctgtgatcaatgttggtgcacctgcagccggtatgaacgctgctgttcggagtgcagtccgcgtaggaattgcggatggacaccggatgcttgcaatttatgacgggtttgacggattcgccaagggtcagatcaaagaaattggctggacggatgtggggggttggacaggacagggaggcagtatcttggggaccaaaagggtgctccctggtaaatatctggaggagatcgcaacgcaaatgagaacccactcaataaacgcattgctcatcataggcggatttgaggcatatctcggattactggagcttagcgcagccagagaaaagcatgaagagttttgcgtccctatggtaatggttccagctacggtgtccaacaacgtcccagggtcagatttttccatcggagccgacacagcactgaatacaatcaccgacacatgtgacaggattaaacagagcgcttctggcaccaaacggagagtgttcatcattgagactatgggcggatattgcgggtacctggctaatatggggggattggctgccggagcagacgctgcttacatcttcgaggagccattcgacatccgcgacctgcagtcaaatgtcgaacatttaacagagaagatgaagaccacaattcagagggggctcgtgctgcgcaacgagtcctgttctgagaactatacgaccgacttcatttatcagctctattccgaagaggggaaaggggtctttgattgccgcaaaaacgtcttaggccacatgcaacaaggaggagcaccttccccctttgaccgtaatttcggaactaaaatttcagccagagccatggaatggattacggctaaactgaaggaagccagagggaggggcaagaagttcacaaccgacgattctatttgtgttttgggcatctccaaacgcaatgtaatcttccagccagttgccgagctcaaaaaacaaactgactttgagcatcgaattcctaaagagcaatggtggctcaaactgaggcccttgatgaaaattctggcaaagtacaaggcctcttatgacgttagtgattccggacaactggaacacgtccaaccatggagcgtgtag

SEQ ID NO: 234806 - DNA, 2355 bp, synthetic construct
  misc_feature 1..2355: note = Description of Artificial Sequence: Synthetic coding sequence
  source 1..2355: mol_type = other DNA
atggatgcagatgactcccgtgcccctaagggatctttacgcaagttcctcgagcacctgtcaggcgctggcaaagcgatcggagtgttgactagtggaggtgacgcgcaggggatgaacgcggcagttcgcgcagtggtgcgcatggggatttacgtgggcgcaaaagtttattttatatacgaaggctatcagggaatggtggacggcggaagcaatattgccgaagcagactgggagtccgtgtcatccattcttcaggtggggggaactattattggctcagccaggtgccaggcttttcggacgcgggaagggaggctgaaagctgcttgtaacctgctgcagagaggcatcacaaatctgtgtgttattggcggtgatggcagccttaccggggctaacctgttccgaaaggaatggtccggactcctggaagagctcgccagaaacgggcagattgataaagaagccgtgcaaaagtacgcctacctgaatgtcgtagggatggtgggtagtattgataatgacttttgcggtacagatatgactatcggcacagactccgctctccatcgtattattgaagtggtagacgctatcatgacgaccgcgcagtcacaccaacggacgtttgtgttagaagtcatggggagacattgcgggtacttggccctggtttcagccttagcatgcggagctgattgggtgttcttgcccgaatcgcccccagaggaggggtgggaagaacagatgtgtgtgaaactgtcagagaaccgcgctcggaaaaagcgcctgaatataatcatagtggccgaaggcgcaattgatacacaaaacaagccaatcacaagcgaaaaaatcaaagaattggtcgtgacccagctgggctacgatacccgggtgactattttaggccacgtccaaaggggaggaactccaagtgcctttgatcgcatcttggccagccgaatgggagttgaggcagttatagctctgctagaagctacccctgatacccccgcttgcgtcgtgtctctgaatggcaatcatgcggtgaggcttcccttaatggagtgcgttcagatgacgcaagatgtacagaaagctatggacgaaaggaggttccaggatgcagtgaggctgagagggaggagtttcgctggcaatctcaacacatacaaacgccttgccatcaagctccccgacgatcagatacctaaaacaaattgcaacgtggccgtgattaatgttggagcacccgctgctggcatgaacgcagccgtgcggagtgccgttagagtgggcatcgccgacggccataggatgcttgctatctacgatggattcgacggctttgcgaagggacagattaaggaaatcggatggaccgatgtcgggggttggacaggccagggcggtagcatcctgggcacgaaacgagtgctaccaggcaagtacttagaagaaatagccacacagatgagaacgcactcgatcaacgccttgctcatcattggcggtttcgaagcctatctcgggctcctggaattgtctgcagctcgcgaaaaacatgaggaattctgcgtccccatggtgatggtcccggctacggtcagtaataacgtgccaggcagtgatttttcaatcggagctgacaccgccctcaacaccatcaccgatacctgcgaccgaataaagcagagcgcttcaggcacaaagcgccgtgtgttcataattgagacaatggggggttactgcggctatctcgccaatatgggcggactagcagccggtgctgacgctgcctacatcttcgaagagcctttcgatatccgggacttacagtcgaacgtagagcacctgacagagaaaatgaagaccacaattcaaagaggactagtactgaggaacgagtcgtgctctgagaattacacaacggacttcatttaccaactgtattcagaagaagggaagggtgtctttgattgtcggaagaacgtgctcggccacatgcaacaaggcggagccccttccccatttgaccgcaatttcggaacaaagatttctgctagagctatggagtggataactgcaaagctgaaggaggcaagggggagaggaaaaaagtttacaaccgacgatagcatatgtgtactagggatctctaagagaaatgtgattttccagccagttgccgagttgaagaagcaaacagacttcgaacacaggatcccaaaggaacagtggtggttaaagttgcgacctcttatgaagattctcgctaagtataaggctagctatgatgtgtcggattctggacaattagagcatgtgcagccctggagcgtctag

SEQ ID NO: 234807 - DNA, 2322 bp, synthetic construct
  misc_feature 1..2322: note = Description of Artificial Sequence: Synthetic coding sequence
  source 1..2322: mol_type = other DNA
tacgagcgctgccggccatgcaggggagcccatggctatctgcgtggtggccagggtgttctacatttgcgtgggctgccgggacacgggggacgtaggctgaaacacaggcgcggaagactgggcgaatgcttgcagcatcccgcttccggtgcggtgcggggtgattggcgcgagaagcccggatgctggtcacacaggtttccctgccctggccgacacgcactggttgggggaaccattatcggctccgctagatgtcaagctttcaggacccgcgaggggagactgaaagctgcttgtaatctgctgcagcggggtattacaaatctgtgcgtaatcgggggagacgggtccctgaccggcgctaatttgttcaggaaagaatggtccgggctgcttgaagaactagcacggaatggccagatagacaaggaggctgtgcagaagtacgcatatcttaatgtagtgggaatggtcggcagcattgacaacgatttctgcggcacggatatgaccattggcacagactccgcgctccatagaatcatcgaggttgttgatgccattatgaccacggcccagtcacaccagaggacatttgtgttagaggtaatgggcaggcattgcggatatttggccctggtcagtgccctcgcctgtggtgctgactgggttttccttcccgaaagtccccctgaggaaggctgggaagagcaaatgtgcgttaaactgtccgagaatagagctcggaagaaacggctcaacattatcattgtagctgaaggggctattgacacacagaacaagcccatcacttctgaaaaaattaaagagctcgtggtcactcagctgggttatgacactagggttaccattctcgggcacgtgcagaggggagggacccctagcgccttcgaccgaattcttgcttcgcgcatgggcgttgaggccgtgatcgctcttctggaggcaacacctgatacaccggcatgtgtggttagcctgaacgggaatcacgcagtccggcttccattaatggagtgtgtccaaatgacccaagacgttcagaaggccatggatgagcgccgttttcaggacgccgtgcgcctgcgaggccgaagcttcgccggtaatctcaacacatataagcgccttgcgatcaaactacccgacgaccaaatacccaaaactaattgtaacgtggccgtcattaatgtgggtgccccagccgctgggatgaatgctgcggtgaggtccgctgttagagtgggtattgctgacggacacaggatgctggccatttacgacggttttgatggtttcgctaaaggacaaattaaggagatcggatggacagatgtcggtggctggacaggccagggaggcagcatactcggtacgaaaagggtgctgcctggaaagtacctcgaggaaatcgccacccagatgagaacccattctattaatgcccttcttataattgggggatttgaagcctatctggggctcctggagctgtccgcagcacgcgagaaacacgaggaattttgtgtaccaatggtgatggtccccgctacggtttccaacaatgttccagggtcagattttagtatcggcgctgatactgctctgaatactattacggacacctgtgataggattaagcagtctgcctcaggcaccaaaaggagggttttcattattgagactatgggcggatactgcggttacctcgctaatatggggggactggctgcgggtgcggacgctgcatacattttcgaggaacctttcgatattcgtgacttacagtcgaacgttgagcatctgaccgaaaagatgaaaaccacaatccagcggggactggtgctgagaaatgaaagctgtagtgagaattacacaacggacttcatctaccagctgtatagcgaggaaggaaagggcgttttcgactgccgcaagaacgttctaggccatatgcaacagggaggagccccatcgccgttcgacagaaactttggaaccaaaatctctgccagggccatggagtggattacagcgaaacttaaggaggccagagggcgaggcaagaaatttacaactgatgattctatttgtgtgctcgggatctctaaacgcaacgtcatcttccagcccgtcgccgagctcaagaagcagactgattttgagcacaggatccctaaagagcagtggtggcttaagctgcggcctctgatgaaaatcctggccaagtataaggccagttatgacgtgtccgactctggccagctggagcatgtgcagccgtggtccgtatag

SEQ ID NO: 234808 - DNA, 633 bp, synthetic construct
  misc_feature 1..633: note = Description of Artificial Sequence: Synthetic coding sequence
  source 1..633: mol_type = other DNA
atgaatgctgctgtgcgggctgtggtgcggatggggatctacgtgggcgctaaagtgtatttcatttatgaagggtaccaaggcatggtggatggtggttcaaatattgcagaggcggattgggagtccgtctcaagtattctgcaggttggcggtactatcatcggcagcgctaggtgccaggcattccgcacaagggagggccgactgaaggccgcatgtaatctgttacagaggggcattaccaatctctgcgtgattgggggagatggaagccttaccggtgcgaacttgttcaggaaggaatggagtgggctgctggaggaactggccaggaatggacagatcgacaaagaggccgttcagaaatatgcttacctgaacgtggtcggcatggttggctcgattgacaatgatttttgcgggacagacatgacgataggaacagatagtgcactccacaggataattgaggtggtggacgcaataatgacgactgcgcagagccatcagagaaccttcgtgctggaggtcatgggtaggcattgtggatatttggccctcgtgagtgctctggcctgtggcgcagattgggtgtttctccccgaaagtcctcctgaggaagggtggtag

SEQ ID NO: 234809 - DNA, 501 bp, synthetic construct
  misc_feature 1..501: note = Description of Artificial Sequence: Synthetic coding sequence
  source 1..501: mol_type = other DNA
taagctgacggacaccgcatgctggccatatacgacgggttcgatggttttgcaaagggccagatcaaggagataggctggacggacgtgggaggctggaccggtcaaggtggaagcatccttggtactaagagggtgcttcctggcaagtatctagaggagatcgctacccaaatgcggacacactcgatcaacgccctgttaataattgggggattcgaagcctataaatctgcctgcgatatggctgaggcccgtggtcgacatcaggagttatgcatccctctttgcgtggtgcctgccacaataagcaataacgtgcctggtaccgagatttccctgggatcagatacaggactcaacgcagtggtggagacatgcgaccggataaaacagagtgcaagtggcacgaagagaagagtcttcatcattgagaccatgggcggatattgcgggtatttagcaaatatggggggtctcgccgcaggcgctgatgcttag

SEQ ID NO: 234810 - DNA, 723 bp, synthetic construct
  misc_feature 1..723: note = Description of Artificial Sequence: Synthetic coding sequence
  source 1..723: mol_type = other DNA
atgggcagacattgtggctacttagccctggtgtctgctctggcctgtggagccgactgggtattcctccctgaatctccaccagaagagggctgggaagagcagatgtgtgttaaactttctgagaatagggctcggaagaaacggctgaacatcatcatcgtcgcagagggggctatagacactcaaaacaagcccatcacctctgaaaagatcaaagagctagtggtgactcagctaggctatgacacccgcgttaccatactcgggcatgtgcagcgcggaggcaccccaagtgcctttgatcgtatactcgcttctcgaatgggagtagaggccgtgatcgctctcctggaggccaccccagataccccagcttgtgtcgtgtcccttaacgggaaccatgcggtccgccttccactgatggagtgtgtccaaatgacacaggacgtccagaaggcgatggatgagaggaggtttcaagacgcagtccggctgaggggcagatcatttgcaggtaatctgaacacctacaagcggcttgccataaagctccccgacgaccagattccaaaaactaactgcaatgttgccgtgataaatgtgggagcaccagcagctggcatgaatgctgccgttaggtcagccgtgagggtaggaatagcggacgggcacagaatgctcgccatctatgatggtttcgacggatttgccaaaggttag

SEQ ID NO: 234811 - DNA, 501 bp, synthetic construct
  misc_feature 1..501: note = Description of Artificial Sequence: Synthetic coding sequence
  source 1..501: mol_type = other DNA
atgaacgcagccgtccgagcagtggttcggatggggatctacgtaggggcaaaggtgtacttcatctacgagggctaccagggaatggtggacggcggatcaaacatcgcggaagccgactgggaatccgtgagtagcattctgcaggttggaggaaccatcatcggtagtgccagatgccaggcgttcaggacacgcgagggaaggttgaaagctgcctgtaacctgctgcagcggggaattactaatctgtgtgtaatagggggagacggctccctaaccggggcaaacctgttccgaaaggaatggagcggcctcctagaggagctggctaggaacggacagatagacaaagaggctgttcagaagtatgcttatctcaatgtggtgggaatggtaggcagcattgacaatgacttttgcggtacggatatgaccataggaacggatagcgcgttacacagaatcatagaggtagtggacgccataatgaccacatag

SEQ ID NO: 234812 - DNA, 312 bp, synthetic construct
  misc_feature 1..312: note = Description of Artificial Sequence: Synthetic coding sequence
  source 1..312: mol_type = other DNA
tgatttatttaccagctgtatagtgaagaggggaaaggcgtatttgactgccgcaagaacgttctgggccatatgcagcaagggggagccccatccccgtttgaccgcaattttgggaccaaaatctccgcaagggccatggagtggattacggctaaacttaaagaagcaaggggcagaggaaagaagtttactacagatgacagcatttgcgttttagggatctccaagaggaacgtgatctttcagccagtcgctgagcttaaaaaacagacagatttcgagacagttagcatgcagccccctcgctag

SEQ ID NO: 234813 - DNA, 1743 bp, synthetic construct
  misc_feature 1..1743: note = Description of Artificial Sequence: Synthetic coding sequence
  source 1..1743: mol_type = other DNA
atgagcgatttcgaggaatggatttctggcacctaccgaaagatggaggagggacctctgccactgctgacttttgcaacagctccttaccacgaccagaagccgggaacctctgggctcagaaagaagacctattattttgaagaaaagccatgctatttagaaaacttcatccaaagcattttctttagcatcgatctgaaggaccgccaggggtcttccctggtagtcggcggagacgggagatacttcaacaaatctgccatcgaaacaattgtacagatggctgcggcaaacggcattggacgcctggttattggccagaacggcatcctatccacccccgcagtttcatgcatcatccgaaagataaaagcaattggcggaatcatcctcactgcgagccataatcccggaggaccaaatggcgacttcggtatcaaatttaatatctctaatggcggacctgcccctgaggctattacggacaagattttccagatttcgaaaaccattgaggaatacgcggtatgtcctgaccttaaagtggacctcggcgttctcggaaagcagcagtttgacctggaaaataaattcaagccattcaccgtggaaatcgtggacagcgtggaggcatacgctacaatgttgaggtccatcttcgatttctctgcactcaaagagctgcttagcggccctaaccgcctgaaaattcgcatcgacgctatgcacggtgtcgttggcccatacgtcaaaaagatcctgtgtgaagaattgggcgctcccgcaaattctgccgtaaactgtgtgcccttagaagattttgggggacatcacccagaccccaatctgacctacgctgccgaccttgtagagacaatgaaaagcggagagcacgacttcggagctgcttttgacggcgatggagaccggaatatgatcctgggcaaacacggattctttgtgaacccctccgattctgtggcagttatcgcagctaacattttctctatcccttactttcaacagaccggtgtgcgagggttcgctcggtcgatgcccacctccggagcgctggatagggtggcttcggccaccaagattgcactgtacgagacccccacaggatggaagttcttcgggaatctgatggatgcctcaaaattatccctgtgcggggaggagtcctttggcaccggctccgaccacatacgtgaaaaagacgggctgtgggcagtgttggcatggctctccatccttgcgacgagaaagcagagcgtggaggacatcctgaaggaccactggcaaaagtacggaagaaactttttcacgcggtacgattacgaagaagtggaggctgaaggggcaaataagatgatgaaagatcttgaagcgctgatgttcgatagaagttttgtcggtaaacagttttccgccaacgataaggtgtatactgtcgagaaggcagacaactttgagtatagcgacccagtcgatggaagtattagccggaaccaaggattaaggctgatttttactgacgggtcccgaattgttttccggctctcagggacagggtcagcgggagctacgatccgcctgtatatcgactcttatgaaaaagacgtcgcaaaaattaatcaggacccgcaagtgatgctcgccccattgatctctatcgcgctcaaggtgagtcaacttcaggagcggaccgggcgaactgcccctactgtgattacctag

SEQ ID NO: 234814 - DNA, 1689 bp, synthetic construct
  misc_feature 1..1689: note = Description of Artificial Sequence: Synthetic coding sequence
  source 1..1689: mol_type = other DNA
atggtcaaaattgtcaccgtaaaaactcaggcctaccaggatcagaaaccaggcactagcggacttagaaaaagagtcaaagtcttccaatctagcgctaattacgctgagaatttcattcaaagcattatcagtacggtggagcccgctcagcggcaagaagcaacactggttgtaggaggcgacgggaggttttatatgaaggaggcaatccaattgatcgcccgaattgctgctgcgaatggaatcggacgtctagtcatcggacaaaacggaatcctcagcactccagctgtgagctgtataataaggaagatcaaggccatcggcggaatcatcctaaccgcttctcataaccctggaggcccaaatggcgacttcgggatcaagtttaatatctctaatggtggacccgctccagaggcgataactgacaagatttttcagatcagcaagaccatagaggagtacgccgtatgtcctgatttgaaggtggacctgggggtcctgggaaaacagcagttcgacttagagaacaagtttaagccattcacagtggaaatagtggatagtgttgaggcctacgctacgatgctgcggagtatcttcgacttctccgcactgaaagaactgctgtctgggcctaacagactcaaaatacgtatcgatgccatgcatggggtggtgggcccttatgtaaagaagattctgtgcgaggaactaggcgctccggctaactctgcagtcaattgtgtgccactcgaggacttcggcggacaccatccagaccctaacctgacgtacgccgctgacctggtggaaactatgaaatctggcgagcatgacttcggagctgccttcgatggcgatggcgatcggaatatgattctcggtaagcacggattcttcgttaatccctcagatagtgtggccgtgattgccgctaacattttctcaatcccgtatttccagcaaacaggggttcgcggatttgcccgaagcatgcccacgtcgggcgcactcgaccgcgtggccagcgctactaaaatagccctgtatgaaacacccactggttggaaatttttcggaaaccttatggatgcttccaaactgagtctgtgtggcgaagaaagctttggcaccggcagcgaccacattcgcgagaaagacggcctttgggctgtcctggcatggcttagtatactcgcaacccgtaaacagtccgtagaagatatccttaaggaccattggcagaaatacggcagaaacttttttacaagatacgactacgaggaggtcgaggcagaaggcgcaaacaagatgatgaaagatctggaggctctcatgttcgatagatcatttgtgggcaaacagttttccgcaaatgacaaggtctatacggttgagaaagctgacaacttcgagtactcggatccggtagacggctccatcagcagaaaccaagggcttcggctcatcttcaccgacggctcaaggatcgttttccggctatccggcaccggctccgcgggtgccactatcagattgtacatcgactcctacgaaaaagacgtagctaagatcaaccaagatccgcaggtgatgctggcccctctcatcagtatagcactgaaggtttcccagctgcaggagcgcactgggagaaccgctcctacggtaattacgtag

SEQ ID NO: 234815 - DNA, 1617 bp, synthetic construct
  misc_feature 1..1617: note = Description of Artificial Sequence: Synthetic coding sequence
  source 1..1617: mol_type = other DNA
atggttaaggtatttcagtccagcgcaaactacgcagagaattttatccaatcaattatttcgaccgtggagcccgctcagcggcaggaagctacattggtcgtcggtggagacggcagattctatatgaaagaagccattcaactgatagcaaggatcgcagcagccaacggcattggaaggctggtaatcggtcagaacgggatcttgtcaactcccgcagtgtcatgtatcattaggaagatcaaagccataggaggtatcattttgaccgcgagccacaatcctggtggccctaacggcgacttcggcatcaaattcaacattagcaacggaggcccagcaccagaagctatcaccgacaaaattttccaaatttcaaaaacgatcgaggaatacgctgtgtgtccagacttgaaagtcgacctcggagtgttaggcaagcagcagttcgacttggagaacaagttcaagcccttcacagtcgagatcgtggactccgttgaagcctacgctaccatgctgcgctctatatttgactttagtgccctcaaggagctacttagcggacccaacaggctcaagattcgcattgatgctatgcacggagttgttgggccatacgttaaaaagattctttgcgaagagctgggcgcacccgctaactccgccgtgaactgcgtgccactggaagatttcggcggtcaccaccccgaccccaatctgacgtacgcagcagacttggtcgagactatgaagtcaggcgagcatgactttggggctgccttcgatggggacggagacaggaacatgattctgggaaaacatggtttcttcgtcaaccctagcgatagcgtggctgtcatcgccgcaaacatcttctcgattccatatttccagcagacaggagtccgcggttttgccaggtccatgccaacttcaggcgcactggaccgcgtcgcttccgcaaccaagattgcattgtatgagaccccaactggctggaaattcttcgggaatctcatggatgctagcaagttgagtctgtgcggcgaggaatcatttggaaccggcagtgaccatatcagagagaaggatggtctttgggcagttctggcctggctctccatcctggctactagaaagcaaagtgtggaggacatcctgaaagatcactggcagaaatatgggagaaatttcttcacacgctacgactacgaggaagtagaagccgagggagcgaataagatgatgaaggacctggaagcgctcatgttcgacaggtctttcgtgggaaagcagttcagcgccaacgacaaagtgtacaccgttgagaaggccgataactttgagtattccgaccccgtggacggcagcatcagtcgaaaccagggcttgaggctcatcttcaccgatgggtcacgtatcgtttttaggctgagtggaacagggagcgccggagcgaccattcgtctttacatcgactcttatgagaaagatgtagcgaaaatcaatcaggatcctcaagttatgcttgcccctctgatcagcatcgctctgaaggtgagtcaactccaggaacgaaccgggcgtacggcaccaactgtcattacctag

SEQ ID NO: 234816 - DNA, 1098 bp, synthetic construct
  misc_feature 1..1098: note = Description of Artificial Sequence: Synthetic coding sequence
  source 1..1098: mol_type = other DNA
atgttgagatcaattttcgattttagtgctttaaaagagctgctctccggtcctaataggctgaagattagaatcgacgcaatgcatggcgttgttggaccatacgtcaagaaaatcttgtgtgaggagcttggtgcccctgctaacagcgctgtgaattgtgtgccgcttgaggactttggcggtcatcaccccgacccaaacctcacttatgccgctgatctggtggagacaatgaagtccggtgaacacgattttggcgctgcatttgacggcgatggggatcggaacatgatcctaggcaagcacgggttcttcgtgaacccctccgacagcgtagcggtcatcgctgctaatatcttcagcataccatactttcagcagacaggggtgagggggttcgctagatctatgccaactagcggagctctggatagagtcgcatccgccaccaagatcgcactatatgagacccccaccggatggaaattcttcggaaatctcatggatgcgtcaaaactgtccctatgcggagaagaaagcttcgggactggcagcgatcacataagggagaaagacgggctctgggcagttctcgcgtggctgtcaattctggccacgagaaagcagtctgtggaggacattttgaaggatcactggcagaaatacggcaggaatttcttcacccgctacgattacgaggaagtcgaggccgaaggcgcaaataagatgatgaaggatctggaggccctcatgtttgatcgtagctttgtgggaaagcagttcagtgctaacgacaaggtgtacacagttgaaaaggcagacaatttcgagtactctgatccagtcgatggctccatctccagaaaccaagggctgaggctgatttttacagacggctctcgaattgtttttaggctgagcggcactggatcagccggagctactatcagactgtacattgactcttatgaaaaagatgtggccaaaattaaccaggacccccaagttatgcttgcccctctgatctctatagctctgaaagtcagtcagctgcaggagaggactgggcgtacagctccaacggtgataacatag

SEQ ID NO: 234817 - DNA, 1839 bp, synthetic construct
  misc_feature 1..1839: note = Description of Artificial Sequence: Synthetic coding sequence
  source 1..1839: mol_type = other DNA
atggcagctccggagggaagcggactgggtgaagacgccagacttgatcaagaaacagcgcagtggctccggtgggataaaaattcacttaccctagaagcggtgaagagacttatcgcagaagggaacaaagaagagctcagaaaatgctttggtgcccgtatggagttcgggacagctggcctgcgggctgcgatggggcctggcatctccagaatgaatgacttgaccatcatacaaacaacacagggattttgtagatatctggagaagcagttttccgacctgaaacaaaagggcattgtaatttcctttgatgccagggctcacccttctagcggtggcagttctcgcagattcgccaggctggctgcaaccacgttcatttcccaagggattcctgtgtatctgtttagtgatatcacccctacaccctttgtgccatttacagtcagtcatctgaaactctgcgcaggtattatgatcacggccagccacaaccccaaacaggataacggatacaaggtgtattgggataatggcgcacagatcatatctccccatgacaaggggattagtcaggcgatcgaggaaaatctggaaccttggccacaggcttgggatgactcactgattgactcatcaccactgcttcacaatccaagcgctagtatcaacaacgattacttcgaagatctgaaaaaatattgtttccatagaagtgtcaatcgtgagacgaaagtgaagttcgtccatacaagcgtacacggagtgggtcatagctttgtccagtctgccttcaaggcatttgatctggtgccacctgaagctgttcctgaacaaaaggatcctgatcctgaatttcccacggtaaagtaccccaaccccgaagaaggaaaaggggtgcttactctgtcctttgccttggccgataaaactaaggccagaattgtgcttgcaaacgaccccgatgccgaccgcttggctgtggctgagaagcaagactcaggggaatggagggtgttcagtggcaatgaactgggcgcactgctgggatggtggctgtttactagctggaaggaaaagaatcaggatagaagcgccctgaaggatacctatatgctgtcttccaccgtctccagcaaaattctcagagctattgcactgaaagagggtttccatttcgaggaaacgctgacgggatttaaatggatgggcaatcgagcgaagcagctgatcgaccagggaaagaccgtgctctttgctttcgaggaggctatagggtacatgtgctgccccttcgttttagataaggatggcgtatcagccgctgtgatctccgccgagctcgcctcattcctggccaccaaaaacctcagcctgtcccagcagctgaaggctatttacgtggagtatggctaccacattacaaaagctagctacttcatctgccacgaccaagaaacaattaagaagcttttcgagaatcttaggaactatgacgggaagaataactatccaaaggcctgcggcaaattcgaaataagcgctattcgggatctgactacggggtatgatgattctcagcctgacaaaaaagcagtcctgcccacatctaagtctagccagatgataacttttacgtttgcaaatgggggagtggcaaccatgagaaccagcggaacagagccaaagatcaagtactacgcagaactgtgtgccccacctggtaacagtgatcccgaacaactaaagaaggaacttaatgaactggtgtccgctatcgaggaacacttttttcagcctcagaaatataatttgcagcctaaggctgattag

SEQ ID NO: 234818 - DNA, 1359 bp, synthetic construct
  misc_feature 1..1359: note = Description of Artificial Sequence: Synthetic coding sequence
  source 1..1359: mol_type = other DNA
atgatcactgcctcccacaaccctaagcaggataacggctataaggtatattgggacaacggcgctcaaataataagccctcacgacaaaggcatatcccaggccattgaggagaatttggaaccctggccccaggcctgggacgactcgttgatagattcatctcccttgctgcataacccatcggcatctattaacaatgattactttgaggatctgaaaaagtactgctttcaccgctcggtgaacagagagactaaagttaaattcgtccatacatcagtccacggcgtgggacacagcttcgtccaaagtgcttttaaggcatttgacctggtccctccggaggcagttcctgaacagaaggacccggatcccgagtttccaacagtcaaatatccaaatccggaggagggaaaaggggtgctgacactctcattcgcgctagctgacaaaaccaaagccaggattgtgttggccaatgaccctgacgccgacaggctggcagttgcagagaaacaggatagtggagaatggcgtgtcttcagtggcaatgagcttggagcgctgcttggatggtggctgtttacctcatggaaagagaaaaaccaggataggtctgccctgaaagacacttacatgctcagtagcaccgtgtctagcaagattctgcgggcaattgcactgaaagaggggttccattttgaagagacattaaccggatttaagtggatgggaaaccgggctaaacaactgattgatcaggggaaaaccgtgctcttcgcgtttgaggaggccatcggttacatgtgttgcccctttgtgctcgacaaggacggggtctcggctgccgtgatctccgctgagctggcatcctttctggccaccaaaaacttgtcgctgagccaacagctgaaagccatctatgtagagtacggataccatatcacaaaggcatcttacttcatatgccatgaccaggagaccataaagaaactgttcgagaacctcaggaactacgacggtaaaaacaactaccctaaggcctgtggtaagtttgagattagtgctatccgtgatctgaccactggttatgacgactcacagcccgacaaaaaggccgtgcttccaacaagcaagagtagccagatgataacattcacattcgccaatgggggtgtcgccacgatgcggacctcaggcacagaaccaaaaatcaaatattacgcagagctgtgcgcccctcctggcaattctgaccccgagcagctgaaaaaagagttgaatgagctggtttccgccatcgaagagcatttcttccaacctcaaaagtataacctgcaaccaaaagctgactag

SEQ ID NO: 234819 - DNA, 876 bp, synthetic construct
  misc_feature 1..876: note = Description of Artificial Sequence: Synthetic coding sequence
  source 1..876: mol_type = other DNA
atgagctcacagctgattttgaggccattcaccgtaagccatttaaaattgtgcgctggcatcatgattaccgctagccataatccaaagcaggataatgggtacaaggtgtactgggataacggcgcacagatcattagcccccacgacaaaggtattagtcaggctatcgaggagaacttggagccgtggccacaagcctgggatgattctctgatagactcatcaccgctgctacataacccttctgcctccataaacaacgattatttcgaagacctcaaaaaatattgtttccaccgttctgtgaatcgggagaccaaagtcaagttcgttcataccagcgttcacggtgtaggacattcattcgtacagtctgcttttaaggccttcgacctggtcccccctgaagccgtcccagaacaaaaggatcctgatcccgagttccccaccgtaaagtatcccaatccagaggaaggcaaaggcgtgttaaccctaagcttcgctcttgcggacaaaactaaggcgcgaatagtcctggcaaacgatccagacgcagatcgcctagcagtagctgagaagcaagactccggtgagtggagagtattctccggaaatgaactaggagcactccttgggtggtggctctttactagttggaaagagaaaaaccaggaccggtcggcgctgaaggacacttacatgctcagttctactgtgtcttccaagatacttcgggctatagcgctaaaagaagggtttcatttcgaagagacacttactggcttcaagtggatgggaaatcgggcaaagcagctcattgatcaggggaagacagtactttttgccttcgaggaggcaatcgggaagaagtag

SEQ ID NO: 234820 - DNA, 1869 bp, synthetic construct
  misc_feature 1..1869: note = Description of Artificial Sequence: Synthetic coding sequence
  source 1..1869: mol_type = other DNA
atggccgagaataccgaaggtgatctgaatagcaatctgctacacgcaccttatcatacaggagatccccaactcgatactgcaataggacaatggttgaggtgggacaagaatcctaaaaccaaggagcagattgagaacctgctcagaaatggaatgaataaagagctgcgcgacaggctctgctgccgcatgacattcggcactgccggtttgaggagcgctatgggtgccggattttgctacatcaacgacctgacagtgatccagagtactcagggaatgtacaagtacctcgaaaggtgcttctccgatttcaaacaacgcggttttgtggtgggctatgacacacggggacaggtgacatccagctgtagttctcaacggctggccaaactcacagccgctgtattgctagcaaaggatgtgccagtttatctgttttcgagatacgttccaaccccctttgtgccgtacgcggttcagaagctgaaagccgtcgctggggtgatgattacggcatcgcataatcgcaaggaagataatggctacaaggtgtactgggagaccggtgcacagatcacaagcccgcacgataaggaaattctgaagtgcatagaggaatgcgtggaaccctggaatggctcttggaatgataacctcgtggacacgtcacctctgaaacgggaccctctgcaggatatttgtagaaggtacatggaggatctcaaaaagatctgcttttaccgtgagttaaacagcaagaccacactcaaattcgtgcatacgagtttccatggcgtcgggcatgattacgtgcaacttgccttcaaagtcttcggcttcaagccaccaatcccagtccctgaacagaaagaccccgatcctgatttttcaactgtaaagtgtcccaatcccgaagagggcgaatcagtcctggagctttctctgcgcctcgcggaaaaagagaatgctcgggtggtgctggccaccgacccagacgcggatagactggccgcagcggagttacaggaaaacggatgctggaaagtcttcacgggtaatgagttagcagccctctttggctggtggatgtttgactgctggaagaagaacaagtcgaggaatgccgacgtgaaaaatgtttatatgctggctaccacagtgagctcgaagatcctcaaagctatcgcactaaaggagggctttcactttgaggagacgcttcctggatttaaatggatcgggtcaaggatcatcgacctgctggagaatgggaaggaagtcttgttcgcgttcgaggaatcaattggatttctctgtggaacttctgtcttagacaaggatggtgtgtcggccgctgtcgtggtcgctgaaatggcctcatatctggaaacgatgaacatcactcttaagcagcagttggtcaaagtgtatgaaaaatacgggtatcacatctctaagacctcctacttcctctgttacgaacctccaaccatcaaatccatattcgagcggctgcgaaattttgattcaccgaaagagtaccccaaattttgcggaaccttcgccatcctgcatgtgagggatgtcactaccgggtacgacagctcacaacccaacaagaaaagcgttctcccggtctcgaaaaattcacaaatgatcactttcaccttccaaaatggctgcgttgctaccctgcgcacatctggaactgagcccaagatcaagtactatgccgagatgtgcgcttcgccggaccaaagcgacaccgcgctgctcgaagaagagctgaaaaagctaatcgacgctctgattgagaactttttgcagccatccaaaaacggcctaatatggcgtagcgtatag

SEQ ID NO: 234821 - DNA, 1713 bp, synthetic construct
  misc_feature 1..1713: note = Description of Artificial Sequence: Synthetic coding sequence
  source 1..1713: mol_type = other DNA
atgggcggagagtggggacagtcagcaatctgcccagagagtgcgcaggagtggacctaccaggttggacagcacctggtcgacatggatctaggagccattacaaagtattccgcactgcacgcaaagcctaacggcttaatcttgcagtacggcacagccggtttcagaacaaaagccgaacaccttgatcatgttatgttccgcatgggccttttggcagtgcttcgctccaagcagacgaagtcaacgattggggttatggttactgctagccacaaccccgaagaagacaatggggtcaaattagtggatcccctaggcgagatgctggcccctagttgggaggagcacgcgacctgcttggccaacgccgaggaacaggatatgcagcgagtgttgattgatatcagcgagaaagaggccgtgaaccttcagcaggacgccttcgtggtgatcgggcgtgacaccagaccttccagtgaaaagctgtcccagtccgtaatagacggggtcacagtcctagggggacaatttcacgattatggacttctgaccacccctcagttacactatatggtctactgccgcaatacgggtggtcggtatggaaaggctacgatcgagggttactaccagaaactgagcaaagccttcgtggagcttaccaaacaggccagctgctcaggggatgaatatcggtccttgaaggtcgactgcgccaatggcataggtgccctgaagttgagagagatggagcattatttcagccaggggttatccgttcagctcttcaacgatggctctaaagggaagctaaaccatctgtgcggagcagattttgtaaaatcccaccagaagcccccacaaggcatggagatcaagtcgaatgaaaggtgttgcagcttcgacggagatgctgaccggattgtctactactatcatgatgctgatggacattttcacctcattgatggcgacaagatcgccaccttgatcagcagcttcttgaaagaactgctggtggagattggggaaagtctgaacatcggagtcgtgcagaccgcatacgcgaacggttcctccacacggtatctggaggaggtcatgaaggtgccggtgtactgcaccaagacaggggtgaagcacctccatcacaaagctcaggaattcgacatcggagtctatttcgaagcaaatggtcatggcacggccctgttcagcaccgccgtcgagatgaagatcaaacaatcagccgagcagcttgaggataagaagagaaaagcagccaagatgttggagaacattatcgatttgttcaatcaggcagccggagacgccatttctgacatgctggtgattgaagccatcctggcattgaaagggcttactgtccaacagtgggacgctctgtacactgatctgcctaatcgacaacttaaagttcaggtggccgataggcgagtcatctctacaactgatgcggagaggcaagccgtgaccccacccggtctgcaggaagcaataaacgatctggtgaagaaatacaaactctccagagctttcgtgcgaccgtctggcaccgaggacgtggtacgggtctacgccgaggcggatagtcaggaatccgctgaccacctggcacatgaggttagcctcgcagtgttccaactggccggtggcatcggagagcggcctcagcccggattctag

SEQ ID NO: 234822 - DNA, 444 bp, synthetic construct
  misc_feature 1..444: note = Description of Artificial Sequence: Synthetic coding sequence
  source 1..444: mol_type = other DNA
atggacctgggcgctataactaagtacagcgccctgcacgccaaacctaatggcttaatcctgcagtacggaaccgctggatttcgcaccaaagccgagcatcttgaccacgtaatgtttaggatgggccttttggccgtgttgagaagtaaacagacgaagtcaaccatcggggtcatggtcaccgctagccataatccagaggaagataatggtgtcaagctcgtggacccactaggagagatgctcgcaccttcctgggaggaacacgctacatgtttggccaatgcggaagagcaggacatgcagagggtgcttattgacatttctgagaaggaagctgtgaatttacagcaggatgcttttgtcgtgattgggagagatacaaggccaagttctgagaagttgtctcagtccgtcatcgacggtgtgaccgtgctgtag

SEQ ID NO: 234823 - DNA, 1629 bp, synthetic construct
  misc_feature 1..1629: note = Description of Artificial Sequence: Synthetic coding sequence
  source 1..1629: mol_type = other DNA
atggacctcggcgctattactaaatactcagcactgcatgccaagccgaacggattaattctgcaatatgggaccgctggatttcgtaccaaagccgaacacctagaccacgtcatgtttcgaatgggactgttggccgtcctgcggtccaaacagacaaagagcactatcggagttatggtcacagcttctcacaacccagaggaggacaacggtgtgaagctcgtagaccctctgggggagatgctggccccttcctgggaggaacacgccacctgtctggccaatgctgaggaacaggacatgcaacgcgttcttatcgacatcagcgagaaggaagccgtgaatttacaacaggacgccttcgtggtgatcggcagagacactcgtccttcgagcgagaagctcagccagtccgtgatcgacggcgtgaccgtcctgggtgggcaattccacgattacggactccttacaacaccgcagttgcattacatggtctattgtcgcaacaccggcggacggtatggcaaggcaacaatcgagggttattaccagaagctgagcaaagcctttgtagagctcaccaaacaggcatcatgctcgggagacgagtacaggtcattgaaggtggactgcgccaacggaatcggagctctgaaactcagggagatggaacattactttagccaaggcttatctgtgcagctgtttaatgatggctcaaagggaaagctgaaccacctgtgcggcgctgacttcgttaaaagccaccagaaaccacctcagggtatggagatcaagagcaatgagaggtgttgcagtttcgacggcgacgccgacagaatcgtgtattactaccatgacgccgacggacacttccacctcattgacggagataagatcgctactttgatctcaagcttcttgaaggagctgttagttgagatcggagagtccctcaacattggagtggttcagacagcatatgctaacggtagttcaacccgctacctggaagaagtgatgaaggtgcccgtatattgcactaaaacgggagtaaagcatctgcaccataaagcccaagagtttgacatcggggtgtacttcgaagccaatggtcatggaaccgcactgttttccaccgcagtggaaatgaagattaagcagagtgcagagcagctcgaagataaaaagaggaaagccgctaagatgctcgaaaacatcatcgatctgtttaaccaggcagcaggagacgctatctctgatatgttggtgatcgaggcgattctcgccttgaagggtttaactgtccagcagtgggacgctctgtataccgacctgccgaatagacagttgaaggtgcaggtggctgaccgaagagttatatctacgacagacgccgagaggcaggccgtcacccctcctgggttgcaagaagccataaatgatctggttaaaaaatacaagctgagccgggcattcgtacgtccgagcggtaccgaggacgtggtaagagtatacgcggaggccgactctcaggagtccgccgaccacctggcacacgaggtgagcctggccgtgttccagctagccggtggcatcggggagaggcctcagccaggattctag

SEQ ID NO: 234824 - DNA, 1701 bp, synthetic construct
  misc_feature 1..1701: note = Description of Artificial Sequence: Synthetic coding sequence
  source 1..1701: mol_type = other DNA
atggacctcggggctattaccaagtattcagcactacacgccaaacctaacggtctgatattgcaatatgggacagctgggttccggaccaaggccgagcacttggatcacgtgatgtttagaatggggctgcttgcggttttgcggtcaaagcagacaaaatccaccattggtgtgatggtgaccgcttcacataatccagaagaggacaatggtgttaagctagtggatccactcggcgaaatgttggcaccctcttgggaagagcatgccacatgtctagccaatgccgaggagcaggatatgcagagggttctcattgatatttccgagaaggaagctgtgaacctgcagcaggacgcctttgtggtcattggtagggacacgcgtccctcatctgagaagctgtcccagtctgtcatcgacggtgtgaccgtgctggggggtcaatttcacgactatggattgctgaccacccctcaacttcactacatggtttactgtaggaacaccggtgggcgttacggtaaggccaccatcgaggggtactatcaaaagttaagtaaggcctttgttgagcttacaaagcaggcatcttgcagtggagacgaatacaggtctctgaaggtggattgtgccaatggcatcggagccctgaaactgagagagatggaacactatttctcccaaggactgtcggtccagctcttcaacgacgggtcgaagggcaagctgaaccacctctgcggggctgattttgtgaaatcccatcagaagccaccacaagggatggaaattaagagcaatgagagatgttgtagcttcgacggcgacgctgacaggatcgtatactactaccatgacgcagatgggcattttcacctaatcgatggcgataaaatcgccaccctgatttcctcatttcttaaggagctgcttgttgaaattggagaatcactgaatatcggtgttgtgcagaccgcatatgcgaacgggtcatctacacgttacctggaggaggtgatgaaggtgccagtgtattgcaccaagactggcgtaaaacacctgcatcacaaggcacaggagttcgatattggggtctatttcgaagcaaacggccacggcaccgctctgttcagcaccgcggtagaaatgaaaattaagcagtctgcggagcaactggaggacaaaaaacggaaggctgccaaaatgctggagaatataatcgatctgtttaaccaggccgctggcgatgccattagtgatatgctcgtgatcgaagcaattctagccctgaaaggactgaccgtacagcagtgggatgcactctatacagacctgcccaatcgtcagctgaaggtgcaagtagcagaccgaagggtaattagcacaacagacgctgagcggcaggccgtcacgcctcctgggcttcaggaagccatcaatgatctggttaaaaagtacaaactctcccgcgcattcgtccggccttccggcacggaagacgtggtgcgcgtgtacgccgaggccgatagtcaggaatcagccgaccacctggcacacgaagtgtcgctggctgtcttccagctggccggaggcattggcgagagaccccagccagggtataaggcagccgaaaccactcataatatcaataacgccttcgggccagggaccgctaacgaacatactgtcccttag

SEQ ID NO: 234825 - DNA, 720 bp, synthetic construct
  misc_feature 1..720: note = Description of Artificial Sequence: Synthetic coding sequence
  source 1..720: mol_type = other DNA
atggagggatcgccaataccagtgctgaccgtcccaaccgcaccgtatgaggatcagagacctgccggtggcggaggcttaaggcgcccaactggactgttcgaggggcagcggaattatcttccaaatttcatccagagcgtgttatctagcatagacctccgagatcgccagggttgcacgatggtagtaggctcagacggacgttatttctcacgcaccgcgatagaaatcgtcgtgcagatggccgctgctaacggcatcgggcgactgattattggccaaaatgggattttgtccacgccagcagtctcctgcatcatccgcaagatcaaggcagcaggtgggatcattctaacggccagtcactgtcctggaggtccaggaggcgagttcggagtgaaatttaatgttgcaaacggagtagagatcgtcgaccccgtcgatatttatctgaacctgttgagaaccatcttcgattttcatgctatcaagggtctgctgacgggcccttctcagttaaaaattcggatcgatgctatgcatggtgtgatggggccatatgtacgcaaagtgttgtgcgacgaactaggagctccagcaaactctgccatcaactgtgtgcctctcgaggactttggcggacagcatcctgatccgaacctcacatatgccacaactttgttagaagcgatgaagggaggagagtatggcttctag

SEQ ID NO: 234826 - DNA, 1704 bp, synthetic construct
  misc_feature 1..1704: note = Description of Artificial Sequence: Synthetic coding sequence
  source 1..1704: mol_type = other DNA
atggaggggtctcccattccagttttgaccgtgcccaccgccccttatgaggaccagcgcccagcaggcggtgggggtctccgtcgcccaactggtcttttcgagggacagcggaactatctgcctaacttcattcagtccgtgctgtcaagtatcgacttgcgtgacagacagggatgcaccatggttgtcggctctgatggcaggtacttttccaggacagcaattgaaatcgtggttcagatggcggctgcaaacgggatcgggaggctgattattggtcagaacgggatactctcaacccctgcggtgagctgcattattcgtaaaatcaaagccgctgggggaatcattctgacagcctctcattgccctggcggtcccggtggcgagtttggtgtcaagttcaatgtggcaaacggcggtcccgcaccggatgtcgtgagtgataaaatataccagatatcaaagactatagaggagtatgcaatttgccccgatcttaggatagatctatctcgcctgggacggcaagagttcgaccttgagaataagttcaagcccttcagggtggagattgtggatccagtcgatatctacctgaatttgcttcgcaccatctttgatttccacgccattaaaggattgctgactggacccagccagctgaagatcaggatcgacgctatgcacggcgtgatgggtccttatgtccggaaggttttatgcgatgagctgggtgctcccgctaacagcgccattaactgtgtgcctttagaggatttcggtggccagcaccctgaccccaacctgacatatgcaacaaccctcctagaagctatgaaaggtggcgaatacggctttggcgcagctttcgacgccgacggagaccgctatatgattttgggacagaacggtttctttgtttctccttccgattctctagccattatcgccgctaatctgagttgtattccctacttccggcaaatgggagtaaggggcttcgggagatctatgcccacatctatggcacttgatagagtcgcgaaatctatgaaggtgccagtatacgaaacccccgcaggttggcgcttcttcagcaacctcatggacagcggccgttgcaatctctgcggagaggaatcttttgggaccgggagtgatcacctgagagaaaaggatggactgtgggccgtgcttgtatggctgtccatcatcgccgctcggaaacagagtgtggaggaaattgtgagagaccattgggctaagtttggaaggcattactactgtcgtttcgactacgaagggctcgaccccaaaactacttattatatcatgagagaccttgaagctctggtaaccgacaaaagcttcattgggcaacagttcgccgtcggcagccacgtgtactctgtcgccaagaccgattcatttgagtacgttgatcctgtggacggaacggtgactaagaaacaaggcctgaggatcatcttttccgatgcctccagacttatcttcagactttcgtcctcatccggtgttcgtgccactttacgcctgtacgccgaatcttacgaacgcgatcctagcggacacgatcaagaacctcaagccgtactgagcccattgatagcaatcgccctgaaaatatctcaaatacatgagagaactgggaggaggggcccaaccgtgattacttag

SEQ ID NO: 234827 - DNA, 1452 bp, synthetic construct
  misc_feature 1..1452: note = Description of Artificial Sequence: Synthetic coding sequence
  source 1..1452: mol_type = other DNA
atggcacaagcagatattgctctcatcggcctggccgtgatggggcaaaacttaatcctgaacatgaacgaccatggctttgtggtatgcgcgttcaacagaacagtatccaaggtcgacgattttttggccaatgaggctaagggcaccaaggttgtaggggctcagagtctgaaagagatggtctctaagcttaagaaacctagacgtattattctgttagtgaaggcagggcaagccgtagatgacttcatagaaaagttggttcccctgctggacaccggagacatcatcattgacgggggaaactccgagtaccgagacactactcgtagatgtcgggaccttaaggccaaaggcatcctcttcgtgggatccggcgtgtcgggtggagaggagggtgcccgatacggcccatctttaatgcccggtggaaataaggaagcttggccccatataaagacgattttccagggcatcgcagccaaggttggtactggagagccttgctgtgattgggtgggagatgaaggcgcaggccacttcgtcaagatggtccacaatggcatcgagtacggcgacatgcaactcatctgcgaggcctatcacctgatgaaagatgtcttgggcatggcccaggacgagatggcacaggcgtttgaagattggaataagactgaactggactccttccttatcgagattaccgccaacatcctcaagttccaggacacggacgggaagcatcttctgcccaagattcgagattccgcagggcagaaagggaccggcaaatggactgctatttccgccctcgaatacggagtgccagtcactttgatcggcgaagctgtgtttgcaaggtgtctgagtagcttgaaggacgaacgcatccaggctagcaaaaagctgaaagggccacaaaagtttcaattcgacggagacaaaaaatctttcctcgaggacataagaaaggcgctgtacgcttccaagatcatctcatatgctcagggctttatgcttctaaggcaggcggcaactgagtttgggtggactttaaattacgggggaatcgcactcatgtggagaggaggatgtataatacgctccgtattccttgggaaaatcaaggatgcctttgaccggaaccctgagctgcagaatttactgttagatgacttctttaagtctgccgtagaaaactgccaggattcttggagaagagctgtgagtactggagtccaggctggaattcccatgccttgctttacaactgccctttccttctacgatgggtatagacacgaaatgcttccagcatcactgatccaagcccagcgggactattttggcgctcacacctatgagctcctggccaaacctggacagtttatccacaccaactggacgggacatgggggtacagtctcgagctcctcatataatgcgtag

SEQ ID NO: 234828 - DNA, 1413 bp, synthetic construct
  misc_feature 1..1413: note = Description of Artificial Sequence: Synthetic coding sequence
  source 1..1413: mol_type = other DNA
atgggacagaacctcatactaaacatgaatgatcatgggtttgtggtctgtgcattcaaccgaactgtgagcaaagtggacgatttcctggcaaatgaagcaaaaggcacaaaggtggttggggctcagagcttaaaggagatggtaagcaaattaaagaagccgagaaggattatcctcctggtcaaggcagggcaggccgtggatgacttcatcgagaaactcgtgccacttctggataccggggacataattattgatggcggaaattctgagtaccgggacaccacaagacgctgccgtgatcttaaggctaaaggcatacttttcgtcgggtctggcgtctccgggggtgaggaaggagccaggtacggcccatccttgatgcctgggggtaataaggaggcctggcctcatatcaaaacaatatttcaggggattgctgccaaggtcgggacgggtgagccttgctgtgattgggtgggtgatgaaggtgccggacacttcgtgaaaatggtacataatggaatcgagtacggcgatatgcagttgatctgcgaagcataccaccttatgaaggatgtcctaggcatggctcaggacgaaatggcccaagcctttgaagactggaataaaaccgaactggattcgttcctgatcgagatcaccgccaacattttgaagtttcaggacacagatgggaagcacctcctacctaagattcgcgacagtgcaggccagaaaggcaccggcaaatggaccgcaatatcggctctggagtatggcgtacctgttacacttataggcgaggcggtgtttgctcggtgtctgtctagcttgaaagacgaacgcattcaggcatccaaaaaactcaaggggccacagaagtttcagttcgatggggataagaagagttttctcgaagacattcggaaagctctttacgcttctaaaataatatcatatgcccagggatttatgctgctgcgccaggccgcaacagaattcggatggacactgaactacggcggaatcgcattgatgtggcggggaggatgtattatccgcagcgtgttcctgggtaagatcaaggacgcctttgatcggaaccctgaacttcaaaatttgctgttggacgactttttcaaatccgctgtagagaactgtcaggacagctggcggagggctgtgtctaccggagtgcaagcagggatcccaatgccctgtttcactacagccctgtccttctatgacggctacaggcacgaaatgttacccgcatcattgatccaggcacaacgcgactattttggggcacacacctatgaactattggccaagcccggacaattcattcacaccaattggactggccatggcggtacagttagctcaagctcctataatgcttag

SEQ ID NO: 234829 - DNA, 1386 bp, synthetic construct
  misc_feature 1..1386: note = Description of Artificial Sequence: Synthetic coding sequence
  source 1..1386: mol_type = other DNA
atggcccaggcggatatcgccctgattggcctggcagtgatgggccagaatctgatcctaaacatgaacgatcatggatttgtggtctgcgcattcaacaggacggtttcaaaggtggacgactttctggcgaatgaagccaaaggaactaaggtcgtgggcgctcagagtctgaaagaaatggtctctaagctgaagaagccaagaagaataatactgctcgtgaaagcaggccaagccgtcgatgactttatcgaaaaacttcggcgatgtagggacttaaaagccaaaggcatcttattcgtgggctccggcgttagtgggggagaagagggagctcgctacggcccttccttaatgcctgggggaaataaagaggcttggccccacatcaaaacgatcttccagggaatcgctgccaaagtgggaaccggagaaccgtgctgtgattgggtcggagatgaaggcgcaggccatttcgttaagatggtgcacaacggaatagagtatggggacatgcagttgatctgcgaagcctaccacttgatgaaggatgtccttggaatggcacaggatgagatggcgcaagctttcgaggactggaacaaaactgagctggattcattcctgattgagatcacagcgaatattttaaaattccaagatacagatggcaaacacttgctgcccaagatcagggattcagccggacagaagggcaccggaaaatggaccgccatttcagccctggaatacggggtgccagttacactcattggcgaggcggtgtttgccaggtgtttgtccagtctgaaggacgagcggatccaggcatctaagaaattgaaaggcccacagaaattccagttcgacggggacaagaaaagctttctggaggatatacggaaggccctctacgcatcaaagatcatctcctatgctcaaggcttcatgttactgcgccaggcagccacggaatttggatggacccttaactacgggggaattgcactaatgtggcgcggaggatgcatcatccgcagcgtgttcctggggaagatcaaagatgcatttgatagaaatcccgagttgcagaatctgctgttggacgatttttttaaatccgctgtagaaaattgccaggatagttggagaagggctgtgagcacaggagtccaggccggtataccaatgccatgctttaccaccgccttatctttctacgacggttaccgacatgaaatgctgcctgcaagcctcatccaagcccagcgcgattatttcggcgctcacacatacgaacttctggctaaacctggacagtttatccacactaattggactggccatggcggtacggttagcagttcctcctacaacgcatag

SEQ ID NO: 234830 - DNA, 1290 bp, synthetic construct
  misc_feature 1..1290: note = Description of Artificial Sequence: Synthetic coding sequence
  source 1..1290: mol_type = other DNA
atgacgaccgcgctttggagtgtgctgctgatagggctgtcccccaagctgatgatttcctggccgatgagacaagcggtagacgatttcattgagaagctggtgccactgctggatactggcgacatcatcattgacggaggcaactcagaatatcgggatacaaccaggcgatgcagggatctgaaggctaaggggatcctctttgtgggctcaggcgtaagcggcggtgaggagggtgccagatatgggccatctttgatgcccggtgggaacaaggaggcctggcctcacatcaagaccatattccaggggatagccgctaaagtgggcaccggggagccatgctgtgattgggtcggagacgagggggctgggcacttcgtgaagatggtgcataatggcatcgaatacggcgatatgcagctgatttgcgaagcctatcacttaatgaaggacgtcttgggaatggctcaggacgagatggcgcaggctttcgaagattggaacaaaacagagctggatagctttctcatcgaaataacggctaacatcctgaaattccaggatactgacggtaagcacctgcttcccaagatcagggacagtgcgggacaaaaaggcacaggcaaatggacagctatcagcgcattggagtatggcgtgcctgttactctaatcggtgaggccgtattcgcgcgatgtctctcgtcactgaaagacgagcggatccaggcctcaaagaagttaaaaggcccacagaaattccagttcgatggcgataaaaaatccttcctggaggacattaggaaggccctgtatgcctctaagattattagctatgcacaaggcttcatgttgctcagacaggccgctaccgaatttggatggacactcaactacggcggaatcgctttgatgtggcggggtggatgcattataagaagcgtgtttctcggcaagatcaaagacgccttcgaccgaaatcccgaacttcagaacctgttgttggacgatttctttaagtcggcagttgagaattgccaagattcctggcgtagagcagtgtcaacgggtgtccaggctggcataccaatgccatgctttactacagccttgtctttctacgacggttatcggcacgaaatgcttcccgcatcgctcatccaggctcagcgagactattttggggctcatacctacgagctgctggctaaacctggccaattcattcataccaattggactggacacgggggaactgtgagtagttcgtcgtataatgcttag

SEQ ID NO: 234831 - DNA, 1500 bp, synthetic construct
  misc_feature 1..1500: note = Description of Artificial Sequence: Synthetic coding sequence
  source 1..1500: mol_type = other DNA
atgacattttggacccaaatgtttttcctgctgcaggactgcgaaggacttatcgtccgatcagccactaaagtaacggccgacgttatcaatgccgctgagaaactacaagtagtgggacgggcagggaccggggtggacaacgtggatctggaggctgccacaaggaaagggatcttggtcatgaataccccgaatggtaacagcctgtctgctgcagaactcacatgtggaatgatcatgtgcctggctaggcagattcctcaggcaaccgcctccatgaaagacggtaaatgggaaagaaaaaagttcatggggaccgagttgaacgggaaaacgctgggcattctcggactgggaaggattggccgagaagtggccacgcgaatgcagagttttggcatgaagacaattggctatgacccgattataagcccagaagtttctgcttctttcggagtacagcaactcccactggaagaaatttggcccctctgcgatttcatcaccgtgcataccccattgctgcctagcaccactggcttgctaaacgacaacactttcgctcagtgtaagaagggcgtccgggtggtgaactgtgcaaggggtgggatcgtcgatgagggcgctctcctccgcgcactgcagtcaggtcaatgtgcgggagccgctctggatgtgtttactgaagagcccccacgggatcgcgctctggtggaccatgagaacgtcatctcttgccctcatctgggcgcatctacgaaagaagcacagagccgctgcggagaggaaatagcagtgcagtttgttgacatggtaaagggcaaatctttgacaggtgtggtgaacgcgcaagccctgacctctgctttctcccctcacactaagccttggattggtctcgccgaggccttgggcaccctcatgagggcctgggctggttcccctaagggaacaatccaagtaatcacccagggcaccagtctgaaaaatgcgggtaactgtttgagtcctgccgtgatcgtggggctgcttaaagaagcttctaaacaggcagatgtcaatctggttaatgccaagctcctcgtgaaggaagcgggactgaatgtgactacctcacacagccccgctgccccaggtgagcagggcttcggcgagtgcctgcttgccgtggcactagctggggcaccctatcaagccgttggcctcgtacaggggaccactccagtcctccagggactcaacggagccgtattcagacctgaggtgcccctccgacgcgatttgcctctccttctgtttcgaactcagacatctgacccggctatgttaccaacaatgattggattgctggccgaggctggcgttcgcctcctgtcgtaccaaacgtccctggtctcagacggagagacctggcatgtaatgggaatttctagtttgttgcccagcctggaggcatggaaacaacatgttaccgaagccttccagttccatttttag

SEQ ID NO: 234832 - DNA, 1602 bp, synthetic construct
  misc_feature 1..1602: note = Description of Artificial Sequence: Synthetic coding sequence
  source 1..1602: mol_type = other DNA
atggcatttgctaatctacggaaagttctgatcagcgactccctggatccttgctgccgcaaaatcttacaggatggcggtttgcaggtggtggagaagcaaaatctatctaaggaagagctcatagccgagctgcaagactgcgaaggtctaatagtcaggtcagctaccaaagtgaccgccgatgtgattaacgctgccgaaaagctccaggtagtcggaagggcgggtaccggcgtggataatgttgatctcgaggccgctactcgtaagggcatccttgttatgaatacccccaacggcaacagtctctctgccgcagaattaacgtgtgggatgatcatgtgcctggcaaggcagatccctcaagctacggccagcatgaaagacggaaaatgggaacgcaagaaattcatggggaccgaactcaacggaaagacgctgggaatcttgggtcttggcagaatcgggcgagaggtcgccacccgcatgcagtcattcggcatgaaaaccatcggttatgaccccattatttcacctgaagtgagcgcctcattcggcgtgcagcagctgccacttgaggaaatctggccactgtgcgactttattaccgtccacactccactgcttcctagcaccacagggttactgaacgataatacgtttgcccagtgtaaaaagggcgtcagagtcgtgaactgtgctcgaggtggcatcgtggacgagggggctcttctccgcgcactccagtccggtcaatgcgccggagccgcacttgacgtgtttacagaggaaccccctcgtgacagagctctggttgaccacgaaaatgtcatatcttgcccacatctgggagcaagcactaaggaagcacagtcccggtgcggggaggagatcgctgtacagttcgtggacatggttaaggggaaaagcttgaccggcgtggttaacgctcaggctctcacttccgcattttcaccccacactaagccttggatcggtttagccgaagccttaggtacactcatgcgcgcatgggccggaagtcctaagggaacaattcaggttattacccaagggacttcactcaaaaacgcgggtaattgtctgtcgcccgctgtgatcgtgggactgctgaaagaggctagtaaacaagcagacgttaacctggtcaacgctaagttgttggtgaaagaggcaggactcaacgtaacaaccagtcattcaccggcagctcccggagagcaaggattcggggaatgccttttggccgtggctctggcgggagctccttaccaagcagttggcctcgtgcagggcactactcctgtgctgcaaggcctaaacggggcagttttcaggcctgaggtgcctttgaggcgcgatctccccctgctgctcttccgcactcaaacgagcgaccctgctatgctgcctaccatgattgggctgctggccgaagcaggggtcagactgctttcataccagacctctctggtctcggatggcgagacttggcacgtgatgggtataagcagtctactgccgagtctggaagcttggaagcagcatgtgacagaagccttccagttccatttctag

SEQ ID NO: 234833 - DNA, 291 bp, synthetic construct
  misc_feature 1..291: note = Description of Artificial Sequence: Synthetic coding sequence
  source 1..291: mol_type = other DNA
atgaagacaattggatatgacccaattatttcccccgaggtgtcggccagctttggtgttcagcaactgcctctggaagagatctggcccctctgcgattttattactgtacatacaccactgctgccctcaaccaccggactgttgaatgacaacacctttgctcaatgcaagaaaggcgtcagggttgtcaactgtgccagagggggaattgtcgacgaaggcgcactgctgcgcgcactgcagagtggccagtgtgcaggggcagcattggacgtattcaccgaatag

SEQ ID NO: 234834 - DNA, 1221 bp, synthetic construct
  misc_feature 1..1221: note = Description of Artificial Sequence: Synthetic coding sequence
  source 1..1221: mol_type = other DNA
atgaaggacggtaaatgggagaggaagaaattcatgggtaccgaactcaatgggaagacacttggcatcctggggctgggcagaatcggacgggaggttgcgacaagaatgcagagttttggtatgaaaactatcggctacgaccccataattagtccagaggtttccgctagttttggggttcagcagctgccgcttgaggaaatctggcctctttgtgattttattacagttcataccccactgctgccatctaccactggtctgctaaacgataacacattcgcccagtgtaagaagggcgttagggtggtcaactgcgctaggggtggtattgtggacgaaggagccctcctgcgtgcgctgcagagtggccagtgcgccggagccgctttggacgtctttacagaggaaccgcctagggatagggccttggtcgatcacgagaatgtgattagttgtcctcacctcggcgcatcaacaaaagaagcgcaaagtcggtgcggagaggagattgcagtgcaattcgtggacatggtcaagggaaagtccctgaccggcgtggtgaacgcgcaggcccttacttccgctttttctccccacaccaagccgtggattggtctggccgaggctttggggacactgatgagagcctgggccggatctcctaaaggcacaatacaggtgattacacagggcaccagtcttaagaacgcaggtaattgcctgagtcctgccgtcattgtgggacttctgaaagaagcctccaagcaggcggacgtgaatcttgtaaatgccaagctacttgtcaaggaggcgggacttaatgtgacaacttctcacagccctgcagcacctggggaacagggtttcggtgagtgcctcctggccgtcgccctggctggggctccctaccaggcagtcggcctggtgcaaggcaccactccagtcctccaagggctcaacggcgctgtgtttcggcctgaagtccccctcaggagagatcttcctctgctgctcttccgtactcagactagcgatccagctatgttgcccactatgatcgggctgctcgccgaggccggagtcaggttactcagctatcagacgtctcttgtgtccgacggcgagacctggcacgtcatgggtatcagctccctgctgccctcactggaagcctggaaacagcacgtgacagaggcctttcagtttcacttttag

SEQ ID NO: 234835 - DNA, 1254 bp, synthetic construct
  misc_feature 1..1254: note = Description of Artificial Sequence: Synthetic coding sequence
  source 1..1254: mol_type = other DNA
atgtctctctccaacaagcttacattggacaagttagatgtcaaaggcaaacgagtggttatgagggtggatttcaacgtgcctatgaagaacaatcagatcaccaacaaccaacgcattaaagccgcagtgccatccatcaagttctgccttgataatggggcaaaatctgtcgtccttatgtctcacttggggcgtccagacggtgtcccaatgccagacaaatactcactggagccagtggcggttgagctgaagtccctactagggaaggacgttcttttcctgaaggactgcgtaggtcccgaagtggaaaaggcctgcgctaatccagcagcaggatccgtgattctgctcgaaaacttgcgcttccacgtagaggaggagggcaaggggaaggacgcaagtggcaataaagtcaaggccgagcccgcaaaaatcgaggcgttccgcgcttcattgagtaagctgggggacgtgtatgtgaacgatgcgttcgggacagctcatcgggctcatagcagcatggttggcgttaacctgcctcagaaggccggaggctttctcatgaagaaggagttgaactatttcgctaaggccctcgagtcacccgagcgcccattcctggcgatcctgggcggagctaaggtggctgataagatccagctcatcaacaatatgcttgacaaggtgaatgaaatgatcatcggaggaggtatggcattcacctttctgaaggtgctgaataatatggagattggtacaagcctttttgatgaggaaggggctaaaatagtgaaggaccttatgtctaaagctgagaaaaacggtgtcaaaatcacactacctgtggatttcgtgacagcagataagttcgatgaaaatgcgaaaactggtcaggctactgtggcatcaggtatacccgctgggtggatgggactcgactgcggaccagaaagtagtaagaagtatgccgaggctgtcaccagagccaagcagatcgtgtggaacgggcctgttggcgtatttgaatgggaagcgtttgctcgagggacaaaggcccttatggatgaggtggtaaaagcaacgagtagaggatgtatcactatcatcggaggcggagacacagccacctgctgtgcgaaatggaatacggaggacaaggtgagccacgttagcacggggggtggagcttctttggaactgcttgaaggcaaagttctgccgggagttgacgctctgagcaacatctag

SEQ ID NO: 234836 - DNA, 846 bp, synthetic construct
  misc_feature 1..846: note = Description of Artificial Sequence: Synthetic coding sequence
  source 1..846: mol_type = other DNA
atgagtttaagtaataaacttacactagataaattggatgtgaaaggcaagcgtgttgtgatgcgggttgacttcaatgtccctatgaagaataaccagataacgaataaccagcggataaaggcggcagtgccaagtatcaagttctgcctcgacaatggagccaagtcagtcgtcctgatgtctcatttgggcaggccagacggaaggcccttcctggcaatcctcggaggcgctaaggtggccgacaagatccaactgatcaacaacatgttggacaaagtgaacgaaatgattatcggtggagggatggcgttcacattcttaaaagtcctaaataacatggagataggcacctcattgtttgatgaagaaggcgctaagatcgtaaaggatctgatgtccaaggctgaaaagaacggggtcaagattaccctgcccgtggacttcgtgacggccgacaagttcgacgagaacgccaaaaccgggcaggcaacagtcgcctctgggatacccgctggctggatggggctagactgtggtccagagagttccaaaaagtatgcggaggcagtcacccgggcaaagcagatcgtgtggaatggaccagtgggagtgtttgaatgggaagcattcgccagagggaccaaggcccttatggatgaggtggtcaaagccacgagccggggatgcataacaataatcggtggtggggacacggcaacctgctgtgccaagtggaacactgaggataaggtcagtcacgtcagcaccggtggtggggcttcactggaactcttggagggaaaggtcttgcctggggttgacgctctgtctaacatctag

SEQ ID NO: 234837 - DNA, 729 bp, synthetic construct
  misc_feature 1..729: note = Description of Artificial Sequence: Synthetic coding sequence
  source 1..729: mol_type = other DNA
atggtaggggtcaacctgccccagaaggctggcggatttctcatgaagaaagagttaaattactttgcgaaggctctcgagagccccgagcgccctttcttggctattcttggaggggctaaagtcgcggataagatccagctgatcaacaacatgctggataaggtgaatgaaatgatcattggtggtgggatggcattcactttcctgaaggtgctcaacaacatggaaattggcacatcgttatttgacgaagagggcgcaaaaatcgtcaaggatctaatgtccaaggccgaaaagaacggcgttaagattaccttacccgtcgactttgtgaccgccgataaattcgatgagaacgctaaaaccggccaggctaccgtggcctcaggaatcccggcaggctggatgggcctagactgcgggccagaatccagtaagaagtacgcagaagccgtgacgagggctaagcagattgtttggaacggacctgtcggggtgtttgagtgggaggcttttgcccgtggcaccaaagcgctgatggacgaagtggtcaaagcgacctcgaggggctgcattactataattggaggcggagatacggcgacatgctgtgcaaaatggaatactgaagataaggtgagccatgtaagtaccgggggaggcgcatccctcgagctactggaggggaaggtcctgcccggagtggatgcactgtcgaacatttag

SEQ ID NO: 234838 - DNA, 1170 bp, synthetic construct
  misc_feature 1..1170: note = Description of Artificial Sequence: Synthetic coding sequence
  source 1..1170: mol_type = other DNA
atgaaaaataatcagatcactaataaccagcgcataaaagccgctgtgcccagtatcaagttctgcttagataatggcgctaaatcggtggtcttaatgagccatctgggcaggccggacggagtaccaatgcccgacaaatactccttggaacccgtagccgttgaactcaagtctctgctgggtaaggatgtgctgttcctgaaagactgtgtggggcctgaggtcgagaaggcttgcgccaacccagccgctgggagtgtgatcctgttggagaacctgcggtttcacgtggaggaggagggcaagggtaaggatgcttccggtaataaggttaaggcagaaccagcaaaaatcgaagccttccgcgcatcgttgagtaagctaggtgatgtctatgtaaacgacgcttttggaacagcgcatagagcccattcatccatggtcggcgtgaacctgccccagaaagcgggaggattcttaatgaagaaggaattaaattacttcgccaaggctctcgagtcgccagagaggccattcctggcaatactgggaggcgcaaaagtggcagacaagatccagctcatcaacaacatgctggataaagtaaacgaaatgattattggcggaggaatggccttcacatttctcaaagtgttaaacaacatggaaatcggcacttcactgtttgatgaagagggcgcaaagatagtgaaagacctaatgtccaaggccgagaagaacggtgtgaagattactctccctgtggatttcgtgacggcagataagttcgatgaaaatgcaaaaacaggacaggcgactgtggcgtctggcattcccgctggctggatgggactcgattgtggtccggaatcctccaagaaatatgcggaggccgtgactcgcgctaagcagatcgtgtggaatgggccagttggggtgtttgaatgggaggcgttcgcacgcggtacaaaagccctcatggacgaggtcgtgaaagctacttctagaggatgcataacaatcatcgggggtggggatacggcaacctgttgcgccaagtggaacaccgaggacaaagtgagtcacgtcagtactggcggaggcgcatctctcgaattgctggagggcaaggtcctgccaggggtcgatgcgctctcgaacatatag

SEQ ID NO: 234839 - DNA, 1254 bp, synthetic construct
  misc_feature 1..1254: note = Description of Artificial Sequence: Synthetic coding sequence
  source 1..1254: mol_type = other DNA
atgtccttaagcaaaaaactgaccctggataaactggacgtgcggggaaagcgcgtgatcatgcgcgtggatttcaatgttccaatgaagaaaaatcagatcaccaataaccagcgaatcaaagcgagtattcctagcatcaagtattgcctggataacggagccaaggctgtggttctgatgtcacatttgggcaggcctgatggtgtacctatgccggataagtactcgttagccccagtggcggtcgaactgaagtcacttttgggaaaggatgtccttttcttaaaggactgcgtgggtgctgaggtagagaaagcctgtgcaaaccccgcaccgggatcagtaatcctgttggaaaacctgagatttcatgtggaagaggagggaaaaggccaagatccttccggaaaaaagatcaaggctgagccggacaagattgaggcctttcgagctagcttgagcaaattaggtgatgtgtatgtgaatgacgccttcgggactgcccatcgtgcgcattcatccatggtgggggttaatttgcctcacaaggcaagcggattccttatgaagaaagagctcgattacttcgctaaggcactggagaaccctgttcgaccattcttagcaatattaggcggagccaaagtggcagacaagattcagttgatcaagaatatgctggacaaggtcaatgaaatgatcatcggtgggggaatggcctacacattcttgaaagtcctaaacaacatggaaatcggcgctagcctgtttgacgaagaaggcgcaaaaatcgttaaagatatcatggccaaggcccagaagaacggtgtgcggataacattccctgtggatttcgtgaccggggacaaatttgatgagaacgctcaggttggtaaggctacagtggcttctggaatttcccccggatggatgggactggattgcgggccagagagcaataagaaccacgcacaagtggtcgctcaagccagactcatagtttggaacggacccctgggcgtgtttgaatgggacgcattcgccaaaggcacgaaagccctcatggacgaaattgtaaaggctacctcaaaggggtgtattaccgtcatcggcggtggggacactgccacgtgctgtgcaaaatggaataccgaggataaagtgtcccacgtgtccactgggggtggcgcatctctggaactgctggaaggtaaaatcctgcctggagtggaggccttgagcaacatgtag

SEQ ID NO: 234840 - DNA, 765 bp, synthetic construct
  misc_feature 1..765: note = Description of Artificial Sequence: Synthetic coding sequence
  source 1..765: mol_type = other DNA
atggcggcttacaaactggtccttattcgacatggcgagtccgcctggaacctggagaatagattctctggatggtatgacgctgatctctctccagcaggccacgaggaggcgaagcggggaggtcaagccttacgggatgccggttatgagtttgacatctgtttcacatccgtgcagaagcgagcaatccgcacactatggaccgtcctggacgcaattgaccagatgtggctgccggtggttcgtacttggcgattgaatgaaaggcattatggaggcttaactggtttaaataaagcagaaactgccgcaaagcatggcgaagcccaggtaaaaatctggcgacgcagttacgatgtaccacccccacctatggagccagaccatccattttattcaaatataagcaaagaccggagatatgccgacctgacagaagatcagctgccctcatgtgaaagtcttaaggataccattgccagggcactgccattctggaatgaagaaattgtaccacagattaaggagggcaaacgagttctgatcgcggcacacggcaatagtctgaggggtattgtgaagcaccttgagggtctttccgaagaggctattatggagttaaacttacctaccggaatcccaatcgtctacgagctggacaaaaacctgaagcctataaagcctatgcagttcctgggggatgaagagacggtcaggaaagccatggaagcagtagccgcacaggggaaggctaagaaatag

SEQ ID NO: 234841 - DNA, 435 bp, synthetic construct
  misc_feature 1..435: note = Description of Artificial Sequence: Synthetic coding sequence
  source 1..435: mol_type = other DNA
atgcctcttataagatgcggatgccatgatgtgccacctccgcctatggagcccgaccaccccttttattccaatatctctaaggatcgccgatacgcggatctgacggaagaccagctaccaagttgcgagagcctaaaggatacgatcgcacgtgccctgccgttctggaatgaggagatcgtgccccagatcaaagaggggaaaagggtactgatcgctgcgcatggaaacagtctcagaggtatcgtcaagcatctggaaggactttctgaagaggcaataatggagcttaatctacctacaggcatccccattgtgtacgagctggacaagaacctgaagcccatcaaaccaatgcaatttcttggagatgaagagactgtgcgcaaggccatggaggcagtcgccgctcaggggaaggcgaagaaatag

SEQ ID NO: 234842 - DNA, 762 bp, synthetic construct
  misc_feature 1..762: note = Description of Artificial Sequence: Synthetic coding sequence
  source 1..762: mol_type = other DNA
atggcgactcaccgcctcgtgatggtccggcatggggaaagcacctggaaccaggagaaccgattctgcgggtggtttgatgccgaactgagcgagaaaggaaccgaggaggctaaacgcggtgctaaagcgatcaaggatgctaaaatggagttcgacatctgctatacctccgtgctaaaacgggcaattcgaacactgtgggccattttggatgggaccgatcagatgtggctccccgtcgtgagaacttggaggctgaacgaacggcactatggcggactgacaggcttaaataaagccgaaacagcagctaaacacggtgaggaacaagttaagatatggcggcgttcattcgatatacctccgcctcccatggacgagaagcatccatattacaactccattagcaaggaacggcgttatgccggactaaagcccggagaacttcctacctgcgagtccctgaaagacaccatcgcacgtgccctcccgttctggaatgaggaaattgttccacagatcaaggctgggaaaagggtactcatcgctgctcatggaaactctctcagaggcattgtcaagcacctggagggcatgtctgatcaagccatcatggaactcaatctgccaaccggcattccaattgtgtacgagctgaataaggagcttaagcccaccaagcctatgcagtttctgggcgacgaggagaccgttcggaaggccatggaggctgtcgccgctcaaggcaaggccaagtag

SEQ ID NO: 234843 - DNA, 765 bp, synthetic construct
  misc_feature 1..765: note = Description of Artificial Sequence: Synthetic coding sequence
  source 1..765: mol_type = other DNA
atggcagcatacaagctcgtgctcattaggcatggtgaatcaacatggaatctcgagaatcggttctcctgctggtacgacgccgacttgagcccggcaggacacgaggaagcaaagagagggggtcaggcattaagagacgctggttatgaattcgacatttgcctaacatccgttcagaagagggtgatacggaccctgtggacagtgctggatgcaatcgatcaaatgtggttacctgtcgtgagaacatggaggctgaacgagcgccactatggcggtcttactggtctgaataaggccgagactgcggctaaacacggggaagctcaggtcaagatttggcggagaagctatgacgtcccccctccgcctatggagccagaccacccattttatagcaacatatcaaaggatagacgctatgctgacctgaccgaggatcagctgcctagctacgagagtcccaaggatacaatcgccagagctctgccgttttggaacgaagagatagttcctcagattaaagagggaaaaagagttttgatcgctgcacacgggaatagtcttcagggcatagcaaagcatgtggaggggttgtcagaagaggctatcatggagctaaacttaccaaccgggattcccatcgtatacgaactagataaaaatctcaagccgataaagcctatgcaatttttaggggatgaagagaccgtgtgtaaagccatcgaagctgttgctgctcagggcaaggccaagaaatag

SEQ ID NO: 234844 - DNA, 966 bp, synthetic construct
  misc_feature 1..966: note = Description of Artificial Sequence: Synthetic coding sequence
  source 1..966: mol_type = other DNA
atggccgctgccgaggccggtggcgacgacgcgagatgtgtgcgcctctctgccgagagggcacaagctctgctggctgacgtggacacactacttttcgattgcgatggagtgttgtggcgaggcgagaccgccgtccccggtgctcctgaagctctccgtgcacttagagcccgagggaagaggctcggatttattactaataattcatccaagacaagagctgcctacgccgagaaactgcggagacttggttttggaggtccggctggccctggggctagcctggaggtatttggaactgcatactgtacagccttgtatctgcgccaaagattggctggcgcaccagctcccaaagcctatgtgctgggctctccagccctggctgccgaactggaggccgtgggcgtggccagcgtcggcgttgggcctgagccgctgcagggcgaggggcctggcgattggctgcatgcacctctcgagcccgacgttcgcgcagtggtggtgggatttgatccccacttctcctatatgaaacttaccaaggcgttacgctatctgcagcagccaggttgtctcctcgtcggtacgaacatggataataggttaccattagaaaacggacgctttatagccggaacaggttgtctagttagagctgtggagatggctgcccagaggcaggcggatattattgggaagccaagcagatttatctttgactgcgtgagccaagagtatgggatcaaccccgagaggacagtgatggtgggggaccggctggatacagacattctgctcggcgctacgtgcggcctgaaaaccatccttaccctgaccggggtcagcacattaggcgatgtaaaaaataatcaggaatccgattgcgtgagcaaaaagaaaatggtccctgacttctatgtggatagtatcgctgatctgctcccagccctgcagggctag

SEQ ID NO: 234845 - DNA, 378 bp, synthetic construct
  misc_feature 1..378: note = Description of Artificial Sequence: Synthetic coding sequence
  source 1..378: mol_type = other DNA
atggccgtggccgatctggcactgatacctgatgtggacatcgacagtgacggcgtttttaagtacgttttgatcagagtccactccgcaccgcgaagcggagcccctgcagccgagagcaaagaaattgtgcggggatacaaatgggctgagtaccacgctgacatctacgacaaggtatctggcgatatgcaaaaacaggggtgcgactgtgaatgccttgggggtggcaggatctcccaccagtcacaggacaaaaagatacacgtgtacggctattcaatggcctacggtcccgcacagcatgccatcagcactgaaaagatcaaagccaaatatccggattatgaggtgacctgggcgaacgacggctattag

SEQ ID NO: 234846 - DNA, 375 bp, synthetic construct
  misc_feature 1..375: note = Description of Artificial Sequence: Synthetic coding sequence
  source 1..375: mol_type = other DNA
atggccgtagctgatcttgcccttatccctgatgtagacatcgacagtgatggcgtgttcaagtacgtgttgatccgagtacactccgcacccagaagcggggctcccgctgccgaaagcaaagaaatagtacggggatataagtgggcagagtatcatgccgacatctacgacaaagtgtcaggagatatgcaaaagcaaggctgcgattgtgaatgtctcgggggaggaaggattagccaccagtcacaggacaaaaaaatccatgtgtacgggtattctatgatgaggcccacttgcgtgcccttgggggctagtggaccacggattcaccaccagggactgtggtcctgtccagcgagacactttaactag

SEQ ID NO: 234847 - DNA, 375 bp, synthetic construct
  misc_feature 1..375: note = Description of Artificial Sequence: Synthetic coding sequence
  source 1..375: mol_type = other DNA
atggcggtggcggatcttgctctgatccccgacgttgacatagatagtgacggggttttcaagtatgtgctgatccgcgtgcatagcgccccaaggtccggcgcacctgcggcagagagcaaggagattgtgaggggatataagtgggccgagtatcacgctgacatctacgacaaggttagcggggacatgcagaaacaggggtgtgactgcgagtgtctgggcggaggaagaatttcccatcaatcacaggataaaaaaatacacgtatatggctactctatgatgcgcccaacatgcgtgcccttgggcgcaagcgggccaagaattcaccatcagggcctgtggtcctgtcctgccaggcactttaattag

SEQ ID NO: 234848 - DNA, 1356 bp, synthetic construct
  misc_feature 1..1356: note = Description of Artificial Sequence: Synthetic coding sequence
  source 1..1356: mol_type = other DNA
atggctaccgacgataagacctctcccacactagattcagctaacgatctgcctcgcagtcccactagcccaagccacctcactcacttcaaacctttgaccccagatcaagatgaacctcctttcaagtccgcctattcctcctttgttaacctttttagatttaataaagaaagggccgagggcggtcagggggaacagcagcctctgtctggcagttggacaagcccacagcttccgagcaggacccagtcagtgaggagcccaacaccatacaagaaacagctcaatgaagagctacaacgccgttccagcgcgctcggggatctccgggcatgtacatactgtcgaaaaatcgccctgtcctacgcacattcgacggattcaaacagcattggggaagatctcaacgcgttgagcgattccgcctgttctgtgtcggtccttgacccatctgagccacggacgcccgttggtagccggaaggccagtaggaatatctttttggaggatgatctcgcatggcaatcacttattcatcctgacagttcgaacacccccctgtctacaagattagtctcagtccaggaagatgcaggtaagtcgcccgctagaaaccggtcggcctccattaccaatctgtctctggatcgctccggcagccctatggtgccttcctatgaaactagcgtatcccctcaggcgaaccggacatacgttcggacagagactaccgaggacgaacgcaagatactcctcgactccgttcagttgaaagacctgtggaaaaagatctgccatcactcctctggaatggaattccaggaccacaggtattggctccgcactcatcccaattgcattgtgggcaaagaacttgtcaattggctgattaggaatggacacatagccacaagagcacaggccatcgcgatcggccaggccatggtggacggcagatggttagactgcgtcagccaccacgatcaactgttcagagacgagtacgccctgtacaggcctcttcagtccacagaattctcggagacccccagccccgacagcgactctgtcaatagtgttgaggggcatagtgaaccatcctggttcaaggatatcaagttcgacgactccgacaccgaacagatcgccgaagagggcgacgataatctcgccaactctgcaagtccatctaaaagaacaagcgtgtctagctttcaatccaccgtggatagcgactctgcggctagtatttcattgaacgttgagctcgacaatgttaatttccatatcaagaagccctcaaagtaccctcacgtgccccctcatcctgcggaccaaaaaggcagacgatag

SEQ ID NO: 234849 - DNA, 1647 bp, synthetic construct
  misc_feature 1..1647: note = Description of Artificial Sequence: Synthetic coding sequence
  source 1..1647: mol_type = other DNA
atggcaacagatgataaaacgtcaccaacgctcgattcagctaacgatctccctcggagccccacctcccccagccatctgacccactttaaaccattaacgccagatcaagatgagccgccttttaagtctgcctattcctcatttgtgaatctgtttcgctttaataaagaaagagccgagggtgggcagggagagcaacagcccctgtctggatcatggacttctccccaattaccaagccggacccagtctgtccggtctcccaccccctacaagaaacagttgaacgaggaactgcagaggcgatctagcgctttagatactcggaggaaggctgagccaacgtttggcggacacgatcctagaaccgctgtgcagctcagaagcttgtcaactgtgctcaaaaggctcaaggagatcatggagggaaagtcccaggactccgacctgaaacagtattggatgcccgatagccagtgtaaagagtgctatgactgcagcgagaaatttacgacattccgcagacgacatcactgtagactgtgtggacaaattttttgtagtcgctgctgcaaccaagagattcctgggaagtttatgggatataccggggatctccgggcatgcacatactgtagaaagatagccctctcatacgcacactcaactgatagtaactccatcggtgaggatctcaatgcactcagcgattcagcttgtagcgtttctgtgctagatccttctgagcctcggaccccagtggggtctaggaaagcctccaggaacatctttctcgaggacgatttagcttggcagtcgttaatccatcccgatagcagcaacaccccgctatcgacccggctggtcagcgtccaggaggatgcgggaaaatctcccgctagaaatcggtcggcttcaatcaccaacctgagcttggacagatctggatccccaatggtcccctcctatgagacaagcgtctcgcctcaggctaaccggacatacgtgagaaccgagacaactgaggacgagaggaagattcttttggactccgttcagctcaaagatttgtggaaaaaaatatgtcaccacagtagtggcatggagttccaagaccaccggtattggctgaggacccatcctaactgcatcgtagggaaggagcttgtcaactggctgataagaaacgggcacatagccactagggcacaggcaatcgcgatcggccaagctatggtggatggcagatggctcgattgtgtgtcccatcatgatcaactgtttagggacgaatacgctttatatcgccctctgcagtctaccgaatttagcgagaccccatcccctgatagtgactccgtgaattcagtagaagggcactccgagccttcctggttcaaagacattaagttcgatgattctgatacagagcagatcgcagaggaaggtgacgacaatctggcgaacagcgcctcccccagcaagcgaacgtcagtgtcatcgtttcaaagtacagttgattctgactcggccgcatctatcagccttaacgtggagcttgataacgttaatttccacattaaaaagccaagcaagtatccacatgtccccccacatcccgcagatcagaaggggcgacgatag

SEQ ID NO: 234850 - DNA, 6297 bp, synthetic construct
  misc_feature 1..6297: note = Description of Artificial Sequence: Synthetic coding sequence
  source 1..6297: mol_type = other DNA
atggctaccgacgataagacttctccaactcttgatagcgccaacgatctgccccgaagtccaacctccccgagccacctgactcacttcaaacctcttacacccgaccaggatgagcctccatttaagagtgcttacagctcatttgtcaacctcttcaggtttaacaaagaaagagccgaagggggacagggcgaacaacaaccactctccggttcgtggacaagccctcaactgcccagtcgaacacagagcgtgagaagccctacaccctacaagaagcaactcaacgaggaactgcagcgtcgttcatctgccctggacacgcgcaggaaggcggagcctacttttgggggtcacgatcccagaactgccgttcagcttcgcagtttatctacagtgctgaaaagacttaaagaaattatggaggggaaatcccaggacagcgacctgaagcagtactggatgcccgattcccagtgcaaggaatgctatgattgttccgagaagttcacaacatttagaaggaggcatcattgccgcctgtgcgggcagatcttctgtagcagatgctgtaatcaggagatccctggtaagtttatggggtatactggggacctccgggcatgtacttattgccgaaagatagcgctgagctacgctcatagcactgactccaacagtattggtgaagacttaaacgcgctgtctgattctgcgtgttctgtcagcgtgctcgatcctagcgaacctaggaccccggtcggttcgaggaaggcatctcggaacatattcctcgaggacgatctggcttggcagagccttattcatcccgattctagtaatacccccctgtccacacgattggtaagtgtgcaggaggacgccggaaagtcaccagcccgaaaccgctccgcaagcattactaacctgagcctagatcggtccggctcccccatggttccatcctatgaaacctctgtcagcccccaggccaaccgtacatacgtcaggaccgagaccaccgaagatgaacggaaaattctattagacagcgttcaactaaaggacctgtggaagaagatctgccaccactcttccggaatggagtttcaggatcaccgctattggttacgaacccatccaaattgcatcgttggaaaagaattagtaaattggctaattagaaacggccacattgccacccgcgctcaggctattgccattgggcaggcaatggtggatgggcgatggctggattgtgtcagccaccacgaccaactgtttagagatgagtatgctctgtatcgtcctttgcagtctacagagttctcggaaacgccctcacctgacagcgactcagtaaactccgtggaggggcactccgagccgtcctggttcaaagatattaaatttgacgactcagataccgaacaaatcgcggaagagggagatgataacctcgcaaatagtgcaagcccatcgaaacgcactagcgtctcaagcttccagtctacggtcgactccgattccgccgctagtatatccctcaatgtggagcttgacaatgtgaacttccacattaaaaaaccatcaaagtacccccacgttccaccccacccggcagatcaaaaagagtacctcattagcgataccggcggacagcagctctccatctcggacgcctttatcaaggagtccctgtttaatcgaagggtggaagaaaaaagcaaggagctgccatttacccctctggggtggcatcacaacaacctggagctgctgagggaagagaacggagagaagcaagcgatggagagactgctgagcgccaaccataaccatatgatggccctgcttcagcaactgctgcattctgattccctgagctcgagctggagagacattattgtgtcgctggtctgccaggtggtgcagacagtcaggcccgatgttaaaaatcaggacgatgatatggatatccgccaattcgtccacatcaagaaaataccaggcggaaagaagttcgactctgtggtagtgaacgggttcgtttgtaccaagaatatcgctcacaagaaaatgtcttcttgtatcaagaatcccaagatactcctgctaaagtgttctattgaatacctctatagggaagagacaaagtttacttgcatagatccgatagtgctacaagagcgggagtttctaaagaactatgtccagcgcatagtggatgtccgccctactctggtgctggtggagaaaaccgtcagtaggatcgctcaggacatgctgcttgagcacggcattaccctcgttatcaatgtcaaaagccaagtgctcgaaagaattagccgcatgacacaaggcgatttggtcatgtcaatggatcagctcctgaccaaaccacatctcggaacctgccataaattttatatgcaaatcttccagctgccaaatgaacaaacaaagacactgatgttcttcgagggttgccctcagcacctgggctgcaccatcaagctccgcggaggctcagactacgagctggcaagggtcaaagaaatcctaatatttatgatctgtgttgcttaccactctcagctggagatttctttcttgatggacgaattcgcaatgcccccaactctcatgcaaaaccccagctttcactctctgattgagggcagaggccatgaaggggcagtccaggagcagtacggcggaggatcaattccctgggatcctgatataccaccagagagcctgccatgtgatgacagcagtctgctggagctcaggatcgtcttcgagaaaggggaacaggaaaataagaatctgccccaggctgtggcttctgtaaaacaccaggaacattccacgaccgcatgtccagccggactcccctgtgccttttttgcacctgtgccagagtctttgcttcctcttcccgttgacgaccagcaggacgccttgggaagcgagcaacccgaaactttgcagcagaccgttgttctgcaggaccccaagtcacagattagggcttttcgggatccgctccaggacgatacaggactctacgttactgaagaagtcaccagttccgaggacaaaaggaaaacttactcgctcgcatttaaacaggaacttaaagacgtaattctttgtatctcccccgtcattacctttcgggaaccattccttctgacagaaaagggcatgcggtgtagcactcgggactatttcgctgagcaggtgtactggtcccccctcctaaacaaagagttcaaggagatggaaaatcgtcgcaaaaaacagctcttgagagatctttctggacttcaaggcatgaatggtagcattcaggctaagagtatacaggtactaccatctcatgaattggtttccacaagaatcgctgaacacctgggcgattcacagtcccttggcaggatgcttgccgactaccgcgcacggggaggcagaattcagccaaagaattcggaccctttcgcccattcaaaagacgccagctccacctcctctggtcagtctggctctaagaacgagggagatgaagagcgcggacttattctgtcggacgccgtctggtccacgaaggttgactgtttgaatccgattaaccaccagcggctgtgcgtgctgttttcctcttcctccgctcagtctagcaacgccccaagtgcctgcgtttccccctggattgtcaccatggagttttatgggaagaatgatttaacgctgggaatcttcctggagcgctactgctttaggcctagttaccagtgtccttcgatgttctgcgacacaccgatggttcaccacatcagacgattcgtccatgggcagggatgtgtgcagattattctcaaagagttagactctccagtccccggatatcagcatacgatcctaacttacagttggtgcagaatctgtaagcaggttactcctgttgtagccctgtcgaatgaaagctggtctatgtccttcgcgaaatatcttgagctccggttctatggtcaccaatatacaaggcgtgccaatgcggaaccgtgtggccacagcatccatcacgattatcatcaatatttttcctacaaccagatggtcgcctcattttcctactctccaattcgcctgctggaagtgtgtgtccccctgcctaagattttcatcaagcgacaagctccactgaaagtatccctgttacaggatttgaaagattttttccagaaggtcagccaagtgtatgtcgctatcgatgagcgcctagcctcactgaagacggacactttttcaaagacacgcgaagagaagatggaggatatctttgctcagaaagaaatggaagagggcgagttcaagaactggatagagaagatgcaggctcgattaatgagctcttctgtggacacccctcaacagctccagtctgtgttcgagagcctgatagctaagaagcagtccttatgtgaagttctgcaggcatggaataacagactgcaagatctcttccagcaggagaagggtcgtaaaagaccctcagtgcctccttcaccgggtcggctgcggcagggcgaagaatcgaagatctctgctatggacgcaagcccacgtaacatttcccccggtctgcagaatggcgaaaaggaagacaggtttcttactaccctgtcgtctcagagttcgacgtccagcacacatctgcaattgccaacaccgcctgaagttatgtccgagcagtcggtgggaggtcctcctgaactggatactgcatcttcctccgaagacgtctttgacgggcatctgctggggagcaccgactctcaagtgaaggaaaaaagcaccatgaaagcgatatttgccaatctcctgccaggcaacagttataatcccatcccctttccctttgaccccgataagcactacctgatgtacgagcacgaacgcgtaccaattgccgtctgcgaaaaggagccaagtagtattattgcatttgcactaagttgtaaggagtatcggaacgctcttgaggaactgagtaaggcaactcagtggaacagtgccgaagagggccttcctaccaattccacatcagatagtagaccaaagagctcctccccgattagactacctgaaatgagcggagggcagaccaacaggacgaccgaaactgaaccgcagcctaccaagaaggcgtccggaatgttatcatttttcaggggcacggcgggtaaaagtcctgacctaagctctcagaagcgcgagactctgcggggagcagactctgcgtattaccaggtcggtcagacagggaaagagggcaccgagaaccaaggggttgagccacaggatgaggtggatggcggtgacacccaaaagaaacagttaataaacccccatgtggaactgcagttctccgacgcgaacgcgaagttttactgccgcctttactatgcgggagagttccacaaaatgcgcgaggtgatactagattctagcgaagaagatttcattcgaagcctttctcattcaagcccttggcaggccaggggtggaaaatctggtgccgcattctacgcaacggaagacgacaggttcattctaaaacaaatgccaagacttgaggtacagtcctttctcgatttcgcacctcactactttaattacatcacaaacgccgttcaacagaaacgtccaacagccctggccaagatactgggggtttacaggatcgggtacaaaaattcgcagaataataccgagaagaagctagacctcctggttatggagaatttgttctacggccgtaagatggcccaggtgttcgatctgaaaggtagcctacggaaccgcaacgtgaaaaccgacactggtaaggaatcctgtgacgtggtgctgcttgatgagaatctactgaagatggtgcgagacaatcccctctatattcgttctcacagtaaagccgtcctccgtacaagcattcactccgattctcattttttgagtagtcacctgatcatcgactactctctcttggtggggagagatgatacctctaacgagctcgtggtaggcatcatagattatattcgcacctttacttgggacaaaaagctcgaaatggtggtgaagagcaccggtattttgggcggacagggcaaaatgcctaccgtggtgagccctgagctgtataggacacggttctgcgaagccatggacaaatacttcctaatggtcccagatcactggacggggctcggactcaattgttag

SEQ ID NO: 234851 - DNA, 3051 bp, synthetic construct
  misc_feature 1..3051: note = Description of Artificial Sequence: Synthetic coding sequence
  source 1..3051: mol_type = other DNA
atggagtttcaggatcaccgctactggctgagaacccaccctaattgcattgttggcaaggagctggtgaactggctgatcaggaatggccacatcgcaacgcgtgctcaggccatcgcaattggtcaggctatggttgatgggaggtggctggactgcgtaagccaccacgaccagctcttcagggatgagtacgcattgtaccgccctctgcagtccaccgaattcagtgagacacccagccctgactcagacagcgtcaactctgtcgaggggcacagcgagccatcttggtttaaagacattaagtttgacgacagcgacactgaacagatcgctgaggaaggcgacgacaacctcgccaagtatctgatctctgacacaggcggacagcagctatctattagcgatgcttttatcaaagagtcgctctttaatagaagggtagaagaaaagtcgaaggagctgcccttcacaccgttgggctggcaccataacaatctggaactgctgcgagaggaaaatggagagaagcaggcaatggagagactgttaagcgcgaatcataatcatatgatggcactgctgcagcagctgctgcactctgactcactgagttcatcttggcgcgacatcattgtgtcactcgtctgtcaggttgtccagaccgtcagaccagatgtgaaaaatcaggacgatgatatggatatccgtcaattcgtacatatcaaaaaaatccccggaggaaaaaaatttgattccgtggtggtcaatgggttcgtgtgtacgaaaaacatcgctcacaaaaagatgtcctcttgcatcaagaaccccaagatcctactgctcaagtgctctattgagtacttgtacagagaagagaccaagttcacgtgcatagaccctatcgtgctgcaggaacgcgagtttctgaaaaactatgtccagcggattgtcgacgtaaggcccaccttagtgctggtagagaaaactgtgagccggattgcccaagatatgctgctcgaacacgggattacgttagtaattaatgtcaagagtcaggtacttgaacgcatttcccgcatgacccagggcgatctggtgatgagcatggatcagttgttaaccaaaccacatctgggcacctgtcataaattctacatgcagatttttcagctccccaacgaacagactaaaacccttatgtttttcgagggatgcccgcagcatctcggctgtaccatcaagctgaggggcggatcagactacgaactcgctagggtgaaggagatcctgatctttatgatctgtgttgcctatcactcccagctcgagatatcctttctgatggacgagtttgccatgccgccaacgctgatgcagaatccaagtttccactcccttattgaggggagaggccacgagggcgctgtccaggagcagtacggaggcggaagcattccttgggaccccgacatccccccagagagcctgccatgcgacgactctagcctgctggaactgaggattgtgtttgaaaagggcgaacaggaaaacaaaaacctgccccaggcagtggccagcgtcaaacaccaagagcacagcaccactgcctgcccggctggcctgccatgtgctttctttgctccagttcctgaatcactgcttccgttgcccgtagacgaccagcaagacgcactgggatctgaacagccggagactttgcagcagacagtcgtattgcaggatcccaaatctcaaataagggcgtttcgtgaccccttgcaggatgataccggactgtacgttacagaagaggtgacatcttcggaggataagagaaagacatactccctcgcattcaaacaggaattaaaggacgtgattctgtgcattagccccgtgattacatttcgtgagcccttcctcctgactgaaaaagggatgcggtgttcaactcgtgattactttgccgaacaggtgtattggtctccgttactcaataaagagtttaaggaaatggagaatcgaagaaaaaagcaactgctcagagacctgagcggtctgcaggggatgaatggtagcatccaggcaaaatccattcaggtgctgccttctcacgaattggtgagtactagaatcgctgaacacttgggggattcacaaagtctgggacggatgttggctgactaccgcgcacgagggggacggatccaacccaagaatagtgacccgtttgcccattccaaggatgcgagttccacgtcttccggccagtccggcagcaaaaacgagggagatgaagagaggggcttgattctttcagatgccgtgtggtccaccaaggttgactgcctcaatcctatcaatcaccagcggctttgcgttttattttcctcctcttctgcacagagttcaaacgccccatctgcgtgcgtttctccttggattgttacgatggaattttacggcaagaatgacctgactctcgggattttcctagagcgatattgcttccggccaagctatcagtgtcctagcatgttttgtgatacgccaatggtccaccatattcggagattcgtgcacggccagggctgcgtacagatcatccttaaggagctcgacagccccgtaccaggttatcagcacactattcttacctacagctggtgcagaatctgcaaacaagtgaccccagtcgttgctctcagcaacgagagttggtccatgtcattcgctaaatacctcgagttaaggttctatggccaccagtacactcgcagggcaaatgcagagccatgtggccattcgattcaccatgactatcaccagtatttctcctacaatcagatggtcgcctccttctcctactcccccataaggctgctggaggtgtgtgtgcccctgcctaaaatttttatcaaacggcaggctccgttaaaggtctccctgctgcaggaccttaaggatttttttcagaaggtgtctcaggtatatgtagccatcgatgagagactcgctagcctgaagaccgatactttctcctag

SEQ ID NO: 234852 - DNA, 522 bp, synthetic construct
  misc_feature 1..522: note = Description of Artificial Sequence: Synthetic coding sequence
  source 1..522: mol_type = other DNA
atgaggccttggtcctctccagcccaactggttgcaggcgctcagcccgctggccgaggggatcctttaggtcctaggcctatcccccctccgaggtttcggagggcttcttcacagcgggaaccaccgtatccacgacccgcagagccggctttggagctggctggctcaaaatgtcagcctgacactcccgcagcaagtctttgccccgctgacagcccaagtcagcacagggtcatgcctccaggaccggcttcgtgggcgaatgtgggctcacgccctcatacagttgccaatggacacgaacttttcgaagtgagtgaggagagagatgaagaggtggccgctttctgtcacatgttggacatcctgcggagtggatccgatattcaggactatttcttaacaggttacgtatggagtgccgtgacgcccagccccgagcacctcggagatgaggttaacttaaaagtgaccgtcctttgcgacaggctgcaggaagccctgactttcacctgctag

SEQ ID NO: 234853 - DNA, 4904 bp, synthetic construct
  misc_feature 1..4904: note = Description of Artificial Sequence: Synthetic coding sequence
  source 1..4904: mol_type = other DNA
atgagcagcactcagggaaacggagagcattggaagtcactcgaaagcgtaggcatctcccgtaaagagctggctatggccgaagccctccagatggagtacgatgccctgagtaggctcaggcacgacaaagaggaaaatcgcgctaagcagaatgcagatccttctctgattagttgggatgagccgggagtggatttctattctaaaccagctggaagaagaaccgatttgaagctgcttcgaggactgtccggcagcgacccaactctcaattacaatagcctctctccccaagagggccctcctaatcattccacatctcagggaccacagccagggtccgatccttggccaaagggcagcctttccggagactatctttacatatttgacgggtccgatggtggtgtgtcaagtagtcccggacctggagacatcgagggttcatgcaagaagctgagccctccgcctttaccaccacgcgcatcgatctgggatacgcccccattgccacctcgtaaaggttctccctcatcctcaaaaattagtcagccatccgacattaacactttctccctcgttgagcaattgccaggtaagctgctggagcataggatcctcgaggaggaggaagtgttgggcggaggaggtcagggcaggctgctcggctccgtggactatgatggcataaatgacgccataactcgcttaaatttgaaatccacatatgatgcagaaatgctcagagacgcaactcggggatggaaggagggacggggtcctcttgacttcagcaaggacacgtctgggaagcccgtggccagaagtaaaacaatgccaccgcaagtgcccccaagaacgtatgcttccagatacggcaaccgcaaaaatgccacccccggaaagaaccggaggatatccgcagcccctgtgggatcacgaccacatacagtagctaacggccacgaactctttgaagtcagtgaagagcgggacgaggaggtggccgctttttgtcatatgctggatatcctgaggtccggcagcgacattcaggattacttcctgaccggatacgtttggtccgccgtgacccccagcccggagcacctgggtgacgaggtgaatcttaaagtcacagtattgtgtgaccgcctgcaggaggctcttacattcacatgtaattgttcctccaccgtggacttgctgatctatcagacactatgctatactcacgatgacctccgtaacgtcgatgtgggagacttcgtgttgaaaccatgcggcctggaggagtttctccagaacaagcatgccttagggagccatgaatatattcagtactgtcggaagttcgatatcgatattcggctgcagctgatggagcagaaagtcgttcggtctgaccttgctcgtacagtaaacgacgatcagtctccctcgacactgaactatcttgtacacctgcaggagcgaccagtaaaacagacaataagcaggcaggcgctgtctctgctgtttgacacatatcacaatgaggtggatgcttttctgctcgctgacggagacttccctctgaaggctgacagggtagtgcagagtgtcaaggccatatgtaacgcattggccgcagtggagacaccagagattacgagcgccctgaatcaactccctccctgccccagcagaatgcagcccaagatccaaaaagacccatccgtgctagcagtccgcgagaacagggaaaaagttgtcgaagcactaacagccgctatccttgacctggtggaactttactgtaatacctttaatgccgattttcaaaccgccgtgccaggttcgcgtaagcacgatctggtgcaggaggcctgtcattttgccagatcactagccttcacagtctacgccacacatagaattcccataatttgggctacttcttatgaggatttttatctctcatgctcactcagccacggcggaaaggagctgtgttcccccttgcagactcggcgagctcatttcagcaagtacctctttcatttaatcgtgtgggatcagcaaatctgttttcctgtgcaggtcaatcgactccctagagaaaccttgctctgcgcgacactttacgcactacctatcccgcctcccggtagcagctctgaggcgaacaaacagcggagagtcccagaagctctgggctgggtgacaactcctctgttcaattttcgccaggtgttgacttgtggaagaaaactgctcggactttggccggctactcaagagaacccatccgctaggtggtcagcccctaattttcaccagcccgattctgtaatcctgcaaatagacttccccacctccgccttcgacataaaattcacatccccccctggcgataagttcagtccacgttatgagtttgggagtctgagagaggaagaccagagaaaactcaaggatatcatgcagaaagaaagcctctactggctgacggatgctgataaaaagaggctgtgggaaaagcgatattattgtcacagcgaggtatcttcacttcccctcgtgctcgcctccgcaccaagctgggagtgggcgtgtctgccggatatctatgttctcttgaaacaatggacacatatgaatcatcaggacgcattgggccttttacacgccacattccccgatcaggaggttcgacggatggcggttcagtggatcgggagcctatcagacgcggagctgctggattacctgcctcagctggtgcaggcattaaagtatgagtgctatctagacagcccactggtgcgattcctgctaaaacgcgcagtgtccgacctgcgagtgactcactactttttttggctacttaaagacgggctgaaggattcacagttttccataaggtaccagtacctgttggccgcactgctgtgctgttgcggcaaagggctgcgcgaggaatttaaccgacagtgttggcttgttaatgctctggcaaagttggcccagcaagttagagaagcagcacccagtgccaggcagggcatactacgaaccggcctggaggaggtgaaacagttctttgccctcaatggctcatgcagattgccacttagcccctcacttttggtgaaaggtattgtccccagggactgcagttatttcaatagcaatgccgttccactgaagttgtcgttccagaacgtggaccctctgggagaaaacattcgcgttatctttaagtgcggggacgacctgcgccaggatatgctgaccctccaaatgataagaatcatgagcaaaatctgggtgcaagagggcctggatatgaggatggtgatttttcggtgcttctccactggtaggggccgtggcatggtcgagatgataccaaatgctgaaactctgcgcaagatccaggtggagcacggagttaccggatcattcaaagacagaccacttgccgactggttgcagaaacataatcctggggaggatgagtatgaaaaagcggtcgagaatttcatttatagttgtgctgggtgctgcgtcgcaacgtatgtattgggcatttgcgacagacacaatgataatatcatgcttaagaccaccggtcatatgtttcacatcgacttcggtagattcttgggccacgctcagatgtttgggaatataaaacgtgatagagctccttttgtcttcaccagtgatatggcctacgtcatcaacgggggagataagccatctagccgcttccatgacttcgtcgatttgtgttgccaggcttacaacctcattcgtaagcacacacatcttttcctaaatcttctcggactcatgctcagctgcggcatcccagaactgtctgacttggaagacctaaagtacgtgtacgatgcacttcggccacaggacactgaggccaacgcaactacttacttcacaagattgattgagtcaagtttgggttctgtggcaacaaagctcaacttctttatacacaatctggcccaaatgaagtttactggatcagacgatagactcacacttagtttcgctagcagaacacataccctgaaaagctccgggaggatcagtgacgttttcctttgcaggcatgaaaagattttccaccccaacaaagggtacatttacgtggtcaaggtcatgagggagaacacccatgaggctacctacatccagcgaacattcgaggagttccaagaactacacaataagctccggctgctgttcccctcctctcatctgccctcatttcctagccgattcgtgattggcaggtctcgtggagaagccgtggctgagcgccgtagagaagagcttaacggctacatctggcacctgatccatgccccacctgaggtcgctgagtgtgacctggtctacacgttttttcaccccctgcctagagacgaaaaggctatgggtacttctcccgcacccaagtcctccgatggtacctgggctaggcccgtgggaaaagtgggcggagaagtcaaactaagtatctcctacaagaacaacaaactgtttattatggtgatgcatattcggggtctacagttactgcaggacggcaatgatcctgatccctacgtgaagatctacctcctccccgacccacaaaagacaaccaagcgtaaaaccaaggtcgcccgaaaaacgtgcaacccaacttacaatgaaatgctggtgtatgacggaatccccaaaggcgatctgcagcagagagagctacaactgagcgtgctgtctgagcagggattctgggagaacgtactactgggcgaggttaatatccggttacgggagctcgatctagctcaggaaaaaaccggatggttcgcactggggtcaaggagccatggaacgctcta

SEQ ID NO: 234854 - DNA, 360 bp, synthetic construct
  misc_feature 1..360: note = Description of Artificial Sequence: Synthetic coding sequence
  source 1..360: mol_type = other DNA
atgtttggcaacatcaaacgcgacagagcgcctttcgtgtttacaagcgatatggcgtatgtaattaacggtggtgacaagccttcctctagattccacgatttcgtggacctttgttgccaggcctacaacttaattcgcaaacacactcacttgttcttaaacttgttaggtttgatgctgtcctgtggtatacccgagctgagtgacctagaagacctgaaatatgtttacgatgctcttcggccacaggatacagaggccaatgccacaacttactttacacgcgtgatccttgcaagtgtagtgggaggacgagaatccaagacatgcagcgcagtgagctcctccggagattag

SEQ ID NO: 234855 - DNA, 396 bp, synthetic construct
  misc_feature 1..396: note = Description of Artificial Sequence: Synthetic coding sequence
  source 1..396: mol_type = other DNA
atgtcaagtacacaaggcaacggagagcactggaaatcactcgagtccgtagggataagcaggaaggagctggctatggcagaggccctgcaaatggaatatgacgctttatctagactgaggcacgataaggaagagaatagggccaaacagaatgccgatcctagtctgatatcttgggacgagcccggagtcgatttctatagcaagccagctggacgccgtacagacctgaaactattgcggggacttagtgggtcagacccgacgctgaattacaactcactcagtccgcaggagggtcctccaaaccactcaacatcacagggccctcagccaggcagtgacccctggcccaaaggctcactgtctggagactacttatatatattctag

SEQ ID NO: 234856 - DNA, 4820 bp, synthetic construct
  misc_feature 1..4820: note = Description of Artificial Sequence: Synthetic coding sequence
  source 1..4820: mol_type = other DNA
atgagtagcacccagggtaatggcgagcactggaagagtctggaatcggttgggatctctcgcaaggagctggcaatggcagaagcgcttcagatggaatatgacgcactatcacgcctgaggcatgataaggaagaaaatcgtgccaaacagaacgcagacccctcacttatctcctgggatgaacccggtgtcgatttttactcaaaacctgcgggaaggagaacagacctcaaactattaagggggttaagtggttccgatccgacactgaattacaatagtctctctccccaagaaggccctcctaatcacagcacctcccagggacctcagccaggatccgacccgtggcctaagggcagtttatcaggcgactacctttacattttcgacggctccgatggaggggtgagtagctcgccagggcctggcgatatcgaggggtcatgcaaaaaattatcacctccgccactgccaccgcgtgcttctatctgggacacgccgcctctgcctcctagaaagggctcccctagtagcagcaagatctcccagccaagcgacatcaacactttcagcctcgttgagcagctgcccggtaagttgttggagcaccggatcctcgaagaagaagaggtgctgggtggcggaggtcaagggagattactgggatccgtggactatgacggcataaatgatgccataacgcgccttaacctgaagagcacatacgatgctgaaatgttacgggatgctacccggggttggaaagagggaaggggaccgctggactttagcaaggacacttcaggtaaaccagtggcgcgatccaagacaatgccaccacaggtgccgcctagaacatacgcatcgagatatggaaatcggaagaacgccactcctgggaagaaccgtcggattagtgcggcacccgtaggcagccggcctcacaccgttgccaacggtcatgagttgttcgaggtgagcgaggaacgggacgaagaggtggctgcattttgccacatgctggacatcctccggtcagggtcggatatccaggattacttcttgaccggctacgtgtggagcgctgtaacaccctctcccgagcatctgggtgatgaagtcaatttgaaagtgactgtgctctgtgacaggctccaagaagctctcaccttcacatgtaattgcagctccaccgtcgatcttctgatataccaaactctgtgctacacccacgatgatctgagaaacgtggacgtaggcgactttgtcctcaagccttgtggtctggaggaatttctgcagaataagcacgctttgggcagtcatgaatacatacaatattgcaggaagttcgacattgatatcaggctgcagcttatggaacagaaggtcgtgaggagtgatctggccaggacagtgaacgacgatcagtcccccagcacactcaactacctggtccacttgcaggagagacctgtgaagcagacgatttctcggcaggcgctcagcttgttattcgacacttaccacaatgaggtagacgcctttcttctggctgatggcgattttcccctgaaggctgatagggtagtgcagtcagtgaaggctatttgtaatgccctggccgcagtggagacaccagagattacgtctgcacttaaccaacttcccccttgtccatcgcggatgcaaccaaaaatccaaaaggatccatcagtattggccgtgcgggagaaccgggagaaggtggtggaggcactgactgccgctattcttgatctagtggagctatattgtaacacctttaacgccgattttcaaaccgctgtccctggtagccgcaagcatgacctggtgcaggaagcatgtcatttcgcaaggagcttggcctttacagtctatgccacacacaggattccaatcatctgggccactagttacgaagatttttacctctcctgttctttatctcatggagggaaggaactttgttctcctctgcagactagaagagctcactttagtaaatatttgttccacctcattgtgtgggaccaacaaatctgcttccctgtacaggtgaataggctgcctagagaaactctgctatgcgcaactttgtacgcactcccaattcctcccccaggctcctccagcgaggcaaataaacagagacgcgttcctgaagctcttgggtgggtgaccacccccctgttcaacttcagacaggttctgacctgcggtcgcaagctgttaggactatggcccgctacacaggaaaatccgtctgccaggtggtctgcaccaaatttccatcagcccgattctgtaatcctgcaaattgattttcccacaagcgcatttgatatcaagttcaccagtcctcctggggacaaattcagccctcgctacgagttcgggtctctgcgcgaggaggaccagcggaaactgaaggacatcatgcaaaaggagtctttatactggctgaccgacgccgacaaaaagcgcctttgggagaagagatattactgtcatagcgaatggacacacatgaaccatcaagacgccctgggactgctccacgccactttcccagatcaggaagttcgccgaatggccgtgcagtggatcggctcactgagcgacgctgagctactggattatctgcctcaacttgttcaagccctcaaatatgaatgttaccttgactcgccactggttcgatttctgctaaagcgcgctgtgtcagaccttcgggtgactcattactttttctggcttcttaaggatggactgaaggactcacaattcagcataaggtaccaatatctgctggcggctttattgtgttgttgcggcaaagggctccgtgaggagtttaatcgacagtgttggcttgtgaatgccctcgcgaaattggcccaacaggtgcgtgaggccgcaccctcagccaggcaggggatcctgcggaccggactggaagaggtaaagcagttttttgccctgaatggatcatgtagactgccactttctccttctctgcttgtgaagggcatcgttcccagagactgctcctatttcaattcgaatgcagtccctttgaagctgtcctttcagaacgttgatcctcttggggaaaacattcgagtgatttttaagtgtggtgatgacctgcggcaggacatgttgaccttgcaaatgatccgaattatgtcgaagatctgggtccaagaaggacttgacatgcgtatggtgatctttaggtgtttttctacaggccgtggcaggggcatggtggagatgattccaaatgcagagactctgagaaaaatccaggtggagcatggggttaccggttcgttcaaagataggcctctggcagactggttacagaagcacaacccaggtgaagatgagtatgaaaaagcggtcgagaattttatttattcttgcgccggatgttgtgtggccacttatgtgctgggtatctgtgatcggcacaacgataacattatgctcaagaccacgggccacatgtttcatatcgattttggcaggtttctggggcatgcccaaatgttcggcaacattaagagggatcgggcaccctttgtctttacatctgatatggcatatgtcatcaacggcggagacaagccatcatccagatttcacgacttcgttgacttatgctgccaggcgtataatctaatacgcaaacatacccacttgttccttaatctgttgggtctgatgctctcttgtggtatcccagaactctcggacctggaagacttgaagtatgtttatgacgcgctccgccctcaggacacagaagcgaatgccaccacatattttacaaggttgattgaatcaagcctggggtcagtcgcaactaagttaaatttttttatccataacctggcacagatgaagtttacggggtccgacgaccgactgacactaagcttcgctagccgcacacacacattaaaatccagcggacgaatttcggatgtgtttctctgtaggcacgaaaaaatatttcacccaaacaaaggatatatctacgtcgttaaggttatgcgtgaaaatacccacgaggcaacgtacattcagaggacctttgaagaatttcaagagctccataacaaactaaggctgctgtttcccagcagccaccttccctcattcccgagccgtttcgtgattggcagaagcaggggtgaggccgtggccgaacggcgtagagaggagctgaacggctacatttggcacctgatccacgctcctcccgaagttgcggagtgcgacctggtctacaccttctttcacccactgccgcgagacgagaaagctatggggacatcgcccgcacctaagagcagtgatggaacctgggccagacctgttgggaaggttggcggagaagttaagttgtcgatctcttacaaaaacaataaactttttataatggtgatgcacattagagggctacagctccttcaggacgggaacgatccagacccatatgttaagatttatctgctgcctgacccgcagaaaaccaccaagaggaaaactaaagtagctaggaaaacatgcaaccctacatataacgagatgctggtttatgacgggataccgaagggagaccttcagcagcgagaactccaactctccgtgctttccgaacagggattttgggagaacgtgctactcggagaagtcaatatccgtcttcgtgaactcgatctggctcaggaaaaaactgggtggttcgccctgggctcccggtctcacggaaccttgta

SEQ ID NO: 234857 - DNA, 183 bp, synthetic construct
  misc_feature 1..183: note = Description of Artificial Sequence: Synthetic coding sequence
  source 1..183: mol_type = other DNA
atgtcatcaacccagggcaacggggagcactggaagagtctcgaatccgtaggcatctcacgcaaagaactggcgatggcagaggcactgcagatggaatatgacgccctgtcacggttacgccacgataaagaagagaacagagccaaacagaatgctgatccctccttgatcagttggtag

SEQ ID NO: 234858 - DNA, 522 bp, synthetic construct
  misc_feature 1..522: note = Description of Artificial Sequence: Synthetic coding sequence
  source 1..522: mol_type = other DNA
atgcggccttggtcttcacctgcacagcttgtggctggggctcaacccgcagggagaggagatccactgggcccacgccctattccaccaccgcgattcaggcgcgcttcctcacaaagggagcccccttatcctcggccagctgagcccgcactggaactcgccggaagcaagtgtcagccagatacaccagcggcatctctgtgccccgcagactctcccagtcagcatagagtcatgccgcctggcccagcctcttgggccaacgtgggctctcggccacatactgtcgctaacgggcacgagctcttcgaggtgtctgaagaaagagacgaagaagtagcagccttttgccacatgttggacatactgaggtcgggatctgacatacaggattatttcctgacgggctacgtgtggagcgccgtgaccccttcacctgaacatctgggagatgaggtgaacctgaaggtgacagtgctctgtgatcggctgcaggaagctttgacattcacttgttag

SEQ ID NO: 234859 - DNA, 4338 bp, synthetic construct
  misc_feature 1..4338: note = Description of Artificial Sequence: Synthetic coding sequence
  source 1..4338: mol_type = other DNA
atggcctatagctggcagacagacccgaaccctaatgaatcccatgagaagcagtatgaacaccaggagtttctcttcgttaatcagccacactcgtcatctcaggtgtcactgggatttgatcagatcgtggatgagatttccggaaaaatcccacattatgaaagcgaaatagatgaaaacacattttttgtgccaacagctcctaaatgggatagcacaggacacagcctgaacgaggcgcaccagatatctctgaacgagtttacgtcaaagtcccgtgagctctcctggcaccaagtaagcaaggcgccagcaatcgggtttagcccctctgttctgcctaagccacagaatacaaacaaggaatgctcatgggggagcccaattgggaaacatcacggagcagatgatagcagattctcgatattagctccctcattcacgtccttggataaaattaatctagaaaaggaacttgagaacgagaaccataattaccacattgggtttgagagctcaatccccccaacaaacagctcattcagctctgatttcatgcctaaagaggagaataagaggtccgggcacgttaacatcgtggaaccctctctgatgctgctgaagggtagcctccaacccggtatgtgggaaagtacatggcagaaaaacattgaatccattggttgctctatccagcttgtcgaggtccctcagtcgtccaacacctccctggcttcgttctgtaataaagtgaaaaaaatcagggagcgctaccacgcggctgacgtcaacttcaacagtggaaagatttggtccacgaccactgctttcccatatcagcttttttctaagactaagtttaacattcatatcttcattgacaatagcactcagcccttgcattttatgccgtgcgccaattatctggtgaaagacctgatcgctgaaatcctgcatttttgcacaaacgaccagttgctccccaaggatcatattcttagtgtgtgcggctctgaggaatttctacagaacgatcactgtcttgggagtcacaaaatgttccagaaagacaaaagtgtgatccaattgcacctgcaaaagagccgggaggcacctgggaagctgtctcgaaagcatgaggaggaccacagccaattttacctgaaccagcttctggagttcatgcatatctggaaagtctcccgacagtgccttcttacactgatccggaagtacgattttcacctcaaatatcttctgaagacccaggaaaacgtgtacaacattattgaagaggtgaagaaaatttgcagtgtcctgggatgcgtggagaccaagcaaatcaccgacgccgtcaacgagctgagcctgatattgcagaggaaaggggagaatttctaccaaagcagcgaaacctctgcaaaagggctcatcgaaaaggtgaccaccgagctgagcacctccatttatcagttaattaatgtatattgcaactctttttacgcagacttccagcctgtgaacgtccctcgctgtaccagctatctcaaccctgggttgccctcccatctgtctttcactgtatatgccgcacacaacattccagagacgtgggtgcatcggatcaatttcccactggaaattaagagcttgcccagggagagtatgcttaccgtaaaactgttcggcatagcctgtgctactaacaacgctaatctgctggcatggacttgcctaccccttttccccaaggagaaatccattctcgggtcaatgttattttcaatgacactgcagtcagaaccacccgtggagatgatcacacccggagtgtgggacgttagccaaccttcacctgttaccttgcagatcgacttcccggcaactgggtgggaatacatgaagcccgactccgaggagaatcggtcaaacctggaggagccactgaaggagtgcatcaaacacatcgcacgcctcagccaaaaacagacccccttactgttatcagaagagaaaaagcgatacctgtggttttaccggttttactgcaacaacgagaactgctcactccccctggttctgggcagcgccccaggctgggacgaaaggacggtgtccgaaatgcacactatcttgcggaggtggaccttcagccaacctttagaggctttaggccttcttacaagcagtttccccgaccaggagattagaaaggtcgctgtgcaacagctggacaacttattgaacgacgaacttctcgaatatctgccacagctggtacaggctgtaaaattcgagtggaacctcgagagtccacttgtgcagcttttacttcatcggtcgttgcagtctattcaggtggctcaccgcctctactggttgctcaagaatgcagaaaacgaggcctactttaagagctggtatcagaaactgcttgccgcactccaattttgtgctggtaaagccttgaacgacgaattttccaaggaacagaaactgattaaaatcctgggggacataggtgaacgcgtcaaatcggccagcgaccatcagaggcaggaggtgctaaaaaaagaaattggacggctggaagagtttttccaggacgtgaacacttgtcacctgcccctgaatccagccttatgtattaagggcattgatcacgacgcgtgtagttactttacttccaatgccctcccgcttaagatcaccttcatcaacgcaaatccgatgggcaaaaacatctccattatctttaaagccggtgacgacttgagacaagatatgttggttctccagttgatccaggttatggataacatttggctccaggagggactcgacatgcagatgataatttaccggtgtctaagcaccggtaaggaccaagggctcgtacagatggtgcccgacgcggtcacccttgccaaaatccatcgccattcaggtctgatcggacctctgaaggagaacaccatcaagaagtggttctctcagcataatcatttgaaggcagattatgagaaagcccttcgcaacttcttttattcgtgcgcgggatggtgtgtggtaaccttcattctcggtgtttgtgatcgtcacaatgacaacattatgttgacaaagagtggccatatgttccatattgacttcggcaaatttttgggccatgcacagacgttcggcggaataaaacgcgatcgtgccccatttatttttaccagcgaaatggagtactttatcactgaagggggaaaaaacccacagcacttccaagacttcgtggaactgtgttgccgcgcttacaacattatccgtaaacattcccaactccttctgaacttgctcgagatgatgctctatgccggactgcccgaactaagcggcatacaggatctcaagtatgtctacaataacctgcgtcctcaggacacggacctggaggccaccagccacttcaccaagaagattaaggaaagcctggagtgtttcccagtcaagttaaataacctcatacataccctagctcagatgtcagccataagccccgcaaaaagcacctcccagactttcccgcaggagtcgtgtctcctgtcaaccactaggtccattgagagagccaccatccttggatttagcaagaagtcttctaacttgtacctgatccaggtcacccattcgaacaatgaaacctctcttactgaaaaaagttttgagcagttctctaaactgcacagtcagttgcagaagcagtttgcttccctgaccctgcctgagtttccccattggtggcacctgccatttactaattccgaccataggaggtttagagacttgaatcactacatggagcagattctaaacgtatcgcatgaagtgaccaactctgactgcgtgcttagcttttttctttccgaagctgtccagcagactgtggaagagagctcacccgtgtacctgggggagaagttccctgataaaaaacccaaggtccagctcgtgatcagttacgaggatgtgaaacttaccatcctcgtaaaacacatgaagaatattcacttacccgatggaagcgcgccatctgctcacgtggaattttacctgctcccctacccgtctgaggtccgccgacgtaaaaccaaatccgtgccaaagtgtaccgaccctacctacaacgaaatcgtggtgtatgatgaggtgaccgagttacagggtcacgtgctgatgctaattgtgaaatctaagaccgtttttgtcggcgcaataaatatccggctgtgctccgtacccctggacaaggagaaatggtaccccttgggtaacagtataatctag

SEQ ID NO: 234860 - DNA, 4338 bp, synthetic construct
  misc_feature 1..4338: note = Description of Artificial Sequence: Synthetic coding sequence
  source 1..4338: mol_type = other DNA
atggcgtattcgtggcagaccgacccaaaccctaatgaatcacatgagaagcaatacgagcatcaggagtttttgttcgtcaaccagccccactcatcctctcaggtgtctctgggcttcgatcagatcgtcgatgagatcagtggcaagataccacattacgagagcgagattgacgagaacaccttctttgttccaaccgcacccaaatgggattctacgggccatagccttaatgaagcgcatcagattagtctgaacgagttcacctcgaagagtcgcgagctgtcctggcatcaggtgagtaaagcaccggctattggctttagtccgagtgtcctgccaaagccccagaatacaaacaaggagtgttcttggggtagccctattggtaaacatcacggcgcagacgactcacgcttttccattttggctccgagtttcaccagtctggacaaaattaacctggagaaggaactggagaatgaaaaccacaattatcacattggctttgaaagttctatccccccaactaattcatcgttcagttctgatttcatgcctaaagaagaaaacaaaaggtccgggcacgttaatattgtagagccttctctaatgctgctcaaaggatccctgcagccaggaatgtgggagagcacatggcagaaaaacattgaatcgatcggttgctccattcagcttgtggaggtccctcaatcaagtaatacatctcttgcgagcttctgcaataaggtgaaaaagatccgggaaagatatcatgctgcagacgtgaacttcaacagcggaaagatttggagtactacaactgctttcccttatcaactgttcagcaaaaccaaatttaacattcacatatttatcgacaatagtacccagcccttgcactttatgccatgcgccaactacctagttaaggaccttatcgcagagatcttgcatttttgcacaaatgaccaattgttgccaaaagatcacatactttccgtgtgcggctccgaagagttccttcagaatgaccactgcttggggtcacataaaatgttccagaaggataagagcgtgatacaactccaccttcagaagagtcgcgaggctccagggaaactgtctcgcaaacatgaagaggatcactcgcagttttatttgaaccagctgctcgaatttatgcatatctggaaagtctccagacagtgcctgctgaccctgatccgaaaatacgattttcatttaaagtatctcctcaaaacccaggaaaatgtgtataacatcatcgaggaagtcaagaaaatatgcagtgtcctcggctgtgtggaaacaaaacaaatcaccgacgccgtgaacgaactgtcactgatacttcagagaaagggcgagaacttttatcagtctagcgaaaccagcgcgaaggggctaatcgagaaggtaaccacagagctttccacttctatctaccagcttatcaatgtatactgcaactcattttatgccgacttccagcctgtgaacgtgccaaggtgcacttcatatcttaatcctggtctccccagccacctctcgtttacagtctacgcggcacacaatataccagaaacctgggtgcaccgcataaatttccctttagaaatcaaaagtctgccaagagagtccatgctgaccgtcaagctgtttgggattgcatgcgccactaataacgcaaacctgctggcctggacttgtctgccgttattccccaaggagaagagtatcttagggagtatgcttttcagcatgaccctgcagtcagagccacctgtggagatgataactccaggtgtgtgggacgtctcacagcccagtcccgttactctacagatcgacttccccgctactggttgggagtatatgaaacccgattccgaagaaaacagatctaatttggaagagccgctcaaggaatgtatcaaacacatcgctagactgagtcagaaacagactccacttctgctgagtgaggaaaaaaaacgttatctttggttctacaggttctactgcaataatgaaaattgctcactccctctagtcctgggttcagcccctggatgggatgaacgcacagtaagtgaaatgcatacaatcctcagacgatggacattttctcagccccttgaagccctcggtcttctgaccagctcctttcccgaccaggagatcaggaaggttgctgttcagcagctcgataacctcctcaacgatgagctgttggaataccttccccagcttgtccaggcagtcaagttcgagtggaatctggagagcccattggtccagctgctgctgcaccgttcactccaatcaatccaagtggcgcatcgactctactggctattgaagaacgcggaaaacgaggcctacttcaaatcctggtaccagaaactgctagctgccctccaattttgtgcaggtaaagcattaaacgatgagtttagtaaggagcagaagctcatcaagatcctaggagacatcggcgaacgcgtaaaatctgcttccgatcatcagcgccaggaagtactgaagaaagaaatcggcaggcttgaagagttctttcaggatgtgaatacatgtcatctcccactcaatcccgctctctgtatcaagggcatcgaccacgatgcctgttcttacttcacttccaatgcccttccactgaagatcacatttattaacgccaatcctatgggaaagaacatctccattatcttcaaagctggtgacgacctcagacaagacatgctcgtgctgcagctcattcaggttatggataatatctggctccaggaaggactggacatgcagatgatcatctataggtgccttagtaccggaaaggatcaaggtctcgtgcaaatggtaccagatgctgtgacactagcaaagattcatagacatagtggtttaattggaccactgaaggaaaacaccatcaagaagtggttttcccagcataaccatttgaaggcagactatgagaaagccttgagaaatttcttctatagttgcgcagggtggtgtgtcgtgacattcatcctcggtgtgtgcgaccgccacaacgataatataatgctcaccaagtcagggcatatgtttcacattgatttcgggaaatttttagggcatgctcagaccttcggagggattaaaagggacagagcacctttcattttcactagcgaaatggagtattttattaccgaaggaggcaaaaatccacaacacttccaggacttcgtggagctgtgctgccgcgcttataacattatacggaagcacagccagctactgttaaaccttctggagatgatgctctatgctggattgcccgaattaagcggcattcaggatcttaagtatgtgtataacaatctgcggccacaggacaccgacctggaagcgaccagccacttcacgaagaagatcaaggaaagtctagagtgtttccctgtcaagcttaataacctgatacacacccttgcgcaaatgtcagccatttcccccgcaaaaagtacttcccagacttttccgcaggagtcgtgcttgctttcgacaacacggtctatagagagggcaacaattttggggttcagcaagaaatcctcgaatctgtacctcattcaggtaacacacagtaacaacgagactagcctcacagagaagtcgtttgagcagttcagtaagctgcattcgcagctgcagaagcaattcgccagcctcaccctccccgaattcccgcattggtggcaccttcctttcacaaactcggaccacagaaggttcagagacctgaatcattatatggagcagatcttgaacgtttcccatgaagtgacaaattctgattgcgttctgagcttcttcttgagcgaggccgttcagcagactgtcgaagaaagcagtcccgtatatctgggggaaaagttcccagacaagaagccgaaggtacaactggtcattagctatgaagacgtgaagctgacaattctcgtgaaacatatgaaaaacattcacctccccgacggatcggcccctagtgcacatgtggagttctacctcctcccatatcccagtgaggtgcgccgtcggaaaactaaatctgttccgaagtgcacagatcccacctacaacgagatagtcgtctatgacgaggttacagaattgcagggtcacgtgctcatgttaattgtcaaatccaaaaccgtcttcgtgggtgcaataaacatcagactatgcagtgtgcccctcgacaaggaaaagtggtacccattgggtaactctatcatctag

SEQ ID NO: 234861 - DNA, 4461 bp, synthetic construct
  misc_feature 1..4461: note = Description of Artificial Sequence: Synthetic coding sequence
  source 1..4461: mol_type = other DNA
atggcttattcctggcaaactgaccccaatccaaacgagtcacacgagaaacagtacgaacaccaggagttcctttttgtcaatcagccgcatagcagcagccaagtcagtctaggcttcgatcagattgtagacgagattagtggcaagatcccacattatgagagtgaaatcgacgagaacaccttctttgtaccaacagcccctaagtgggacagtaccggccacagcctgaacgaggcacaccaaattagcctgaatgagttcactagcaaaagccgggagctcagctggcatcaggttagcaaggctcctgccatcgggttcagtccttctgtgctcccaaagcctcagaacactaacaaggaatgctcttggggatcacctataggaaaacaccatggagctgatgactctcggttcagtatcctggcaccgtcctttacctctcttgataagatcaatctcgaaaaagagctagaaaacgaaaatcacaattatcacataggattcgaatcgtccattccacctaccaatagctccttctccagcgacttcatgcctaaggaggagaacaaacgcagtggtcacgttaatatcgtggagccatctctgatgctgttgaaggggtctctccaaccgggaatgtgggagtcaacctggcaaaagaatatcgagagcattggctgctccatccagctcgtcgaggtcccccagagtagtaacacttcactggcttcattttgcaacaaagtgaaaaagatcagggagaggtaccacgcagccgatgttaactttaactcaggcaagatctggagtaccacgactgcattcccctaccagttattttccaagaccaaatttaatatccacatcttcattgacaatagcacccagccccttcacttcatgccatgcgccaattacctggtgaaggacctcatcgcagaaatcctccacttttgtaccaatgaccagctgctgccaaaagaccacattctcagcgtatgtggctccgaggagttcctgcagaatgaccactgtctgggcagccacaaaatgttccaaaaggataaaagcgtgatccaactgcatttgcagaaatccagggaagcacctggcaagctcagtcgaaaacacgaagaggatcactcccaattctacctcaaccagctgctggagtttatgcacatctggaaggtaagccggcaatgcctattgactcttattcgcaagtacgatttccatctgaagtacctgctgaagactcaggaaaatgtctacaacataatcgaagaagtgaaaaagatctgtagcgtccttggatgtgtagaaacaaaacaaataacagacgccgtgaacgaactttcactgatcctccaacggaaaggcgagaatttttatcagtcatctgagacctcagctaaaggtctgattgaaaaggtaacaacagaattgagtactagcatttatcaactgatcaatgtttactgcaatagcttttatgccgacttccaaccggtaaacgtccctaggtgcacctcctatttaaatcccggtcttccttcccatctttcatttaccgtgtacgccgcacataacattcctgagacttgggttcactcttacaaagcattctccttcacctgttggttaacatacgccggtaagaagctgtgtcaggtgaggaactacaggaatatccctgacaaaaaattgttcttttttttagtcaattggaacgaaactatcaatttcccacttgagatcaaatccctccccagggagagcatgctgacagtgaaactatttgggatcgcatgtgccacaaacaatgctaacttgttggcatggacttgcctgcctctgtttcccaaggagaagtccattctgggatctatgctgtttagcatgaccctgcaatccgaaccccctgtggaaatgatcacccccggagtgtgggacgtctcccaaccttctcccgttacacttcagatcgattttcccgcaactgggtgggaatacatgaaacctgacagcgaagaaaatcgctctaacctcgaggagcccctgaaggaatgcattaagcatatcgcccgacttagtcaaaagcagacccctctgctcctgagtgaggaaaaaaaacggtatctctggttttaccgcttttattgcaacaacgagaactgctccctgcctcttgtgctgggctctgcgcctgggtgggacgagcggacggtgtctgagatgcatactatcctgcgcaggtggacttttagccaacctctggaggcattaggtctccttaccagcagttttcccgaccaggaaattcgcaaggtggcggtacaacagttggataatctcctcaatgatgaactgttagagtacttgccacaactggtgcaggctgtgaaatttgagtggaatcttgaatctcccctggttcagctgctgctacatcggagcctacagtcaattcaggttgcccatagattgtactggttattaaagaatgctgagaacgaagcctactttaagtcgtggtaccagaaactgctggccgctcttcagttttgcgctggtaaggcacttaatgatgaattttctaaagagcagaagctgattaagatcttgggtgatatcggcgagcgcgtaaagagcgcttccgatcaccagcgacaggaagtgctgaagaaggagatcggcagacttgaagaattctttcaggacgtcaacacatgccacctgccactgaacccagcactttgtataaaaggcattgatcacgacgcctgcagctacttcacatcaaacgcactacctctgaaaatcacctttattaacgccaaccccatgggaaaaaacatttcgatcatatttaaagctggggatgatttgcgccaggatatgctggttctgcagctgatacaggtgatggacaatatatggctacaagagggtctggacatgcagatgatcatatatcggtgcctcagtacaggcaaggatcaaggacttgttcaaatggtgccagatgcagtcacacttgccaaaatccatcgccattcaggactgattgggcctctgaaagaaaatacaatcaaaaagtggtttagccagcacaatcatctcaaggctgactacgagaaagcactgcggaactttttctactcttgcgccggttggtgcgtggtaacctttattcttggcgtctgcgatagacataacgataatatcatgctgacaaaatcaggccatatgttccacatcgattttggcaaatttctggggcatgcgcagaccttcgggggaataaagagagatagagcaccctttattttcacatccgaaatggagtacttcataactgaggggggaaagaatccacagcatttccaggattttgtcgagctctgctgtcgggcttataacataatacggaagcactcgcaactcttactgaatttgctcgagatgatgctgtacgccggtctgcctgaattgagcggcattcaggacctcaagtatgtctacaacaacctcaggccacaggatactgatctcgaagcgacttcccatttcactaagaagatcaaggagagcctggagtgttttccagtaaaattgaacaatctgatccataccctggcccaaatgtccgctatttcaccggcaaagtcaacctcacagacctttccccaggagagttgcctgctctccacaactagatctattgagcgagcgactatcctgggcttctccaagaaatcctccaacctgtacctgatccaggtgacacactctaacaacgagacatccctgactgagaagagcttcgagcagttttccaaactgcacagccagctccagaagcagttcgcctcactgactctgcccgaattcccgcactggtggcacttaccattcaccaattcggatcatcgtcgctttagagacctgaaccactacatggagcagatactgaacgtgtcccatgaggttacaaattccgactgcgtactgtcttttttcctcagcgaagctgtgcagcagacagtggaagagagcagtcctgtgtatctgggtgaaaagttccctgacaaaaagcccaaagtgcagttggtcatatcctatgaagatgtcaagctcaccattctggtgaagcatatgaaaaacatacatctgcccgatggttcagccccatcggcccacgtggaattctacctattgccttacccaagcgaagttagacgtcgaaagactaagtctgtccccaaatgcacagatcctacttacaacgagatcgtcgtttacgacgaggtcaccgagcttcagggccacgtgctcatgctgattgtgaaaagcaaaaccgtctttgtcggcgctataaacatcagactctgttctgtacctctggataaagaaaaatggtatccccttggcaattccattatctag

SEQ ID NO: 234862 - DNA, 414 bp, synthetic construct
  misc_feature 1..414: note = Description of Artificial Sequence: Synthetic coding sequence
  source 1..414: mol_type = other DNA
atgactatggaaacgctccccaaggttctcgaagtagacgaaaaatcacccgaggctaaggatctgttgcccagccagacagccagtagcctctgtatctctagcagatctgagtccgtctggactacgacgccgcgaagcaattgggaaatttacagaaaacccattgtgattatgtcagtcggcggagcaatcctgctcttcggagtggtaatcacatgcttggcatacacccttaagctcagcgataaatcactaagtatcttaaaaatggtaggccctgggttcctgagtctgggactgatgatgttagtgtgcggacttgtatgggttcctatcataaaaaaaaagcagaagcacaggcagaagtcaaatttcctgcgcagtctgaaatcattctttttaacacggtag

SEQ ID NO: 234863 - DNA, 414 bp, synthetic construct
  misc_feature 1..414: note = Description of Artificial Sequence: Synthetic coding sequence
  source 1..414: mol_type = other DNA
atgactatggaaacactgcccaaggtgctagaagtcgacgagaaatctcccgaagcaaaggatctgttaccctcacaaacagcctcttctctctgtatttcatcccgatcagagtcagtatggacaacgaccccaagatctaactgggaaatttatagaaagccgatagttattatgtcagttgggggagccattctgctgtttggagttgtcatcacttgcttggcatatacgttaaagctgagtgataagagtctgtctatccttaagatggtgggtcccggatttctatctctgggcctcatgatgctggtgtgcggcctagtgtgggtgcctatcattaagaaaaagcaaaagcacaggcaaaagagcaactttctccggagcctaaaatcatttttcctcacgaggtag

SEQ ID NO: 234864 - DNA, 159 bp, synthetic construct
  misc_feature 1..159: note = Description of Artificial Sequence: Synthetic coding sequence
  source 1..159: mol_type = other DNA
atggagaaagtgcagtatttgacgcggtccgcgattagacgcgcttcaaccatcgagatgccgcagcaggcgagacagaagttgcagaacctgtttattaatttctgtctaatccttatttgtctgctgcttatttgtattatcgtgatgctgctctag

SEQ ID NO: 234865 - DNA, 1371 bp, synthetic construct
  misc_feature 1..1371: note = Description of Artificial Sequence: Synthetic coding sequence
  source 1..1371: mol_type = other DNA
atgcccccaggaccctgggaatcctgcttctgggtgggtggtcttatactatggttgtctgtcgggtcatcaggcgacgcgcctcccacaccccaaccgaagtgtgccgatttccagagcgcaaacttattcgaggggactgatctcaaagtccagtttctccttttcgtaccatctaatccgtcatgtggtcagctggttgaggggagtagtgacctgcagaacagcggttttaatgccacattgggaaccaagttgattattcacggttttcgtgtgctgggcacaaaaccaagctggattgacacgtttataaggactctactgcgggctactaatgcaaacgtgatagcagtcgactggatttacgggagcaccggagtgtattttagcgcagtcaagaacgtaatcaaattgtctttggaaatctctcttttcctcaacaaactgctggttctcggtgtctctgagtccagcatacatataatcggtgtatccctcggggctcacgtgggcggaatggtgggccagctgttcggaggccaactgggccaaattacagggctcgaccctgctggccctgagtatacccgcgctagtgtggaggagcggttagatgcaggagatgcactgttcgtcgaagcaatccacacagatacagataatctgggtatcagaattccagtagggcatgtggactacttcgtaaatgggggacaagaccaacccggatgccccacttttttctacgccggatatagctacttgatttgcgaccatatgagagcagtgcatctctacattagcgccctcgagaactcgtgtcctctgatggctttcccatgcgcttcttacaaggcgttcctcgccggtagatgtctggattgttttaacccatttttactttcctgcccccgtatcgggctggtggaacagggaggagttaagatcgagccactcccaaaagaggtaaaggtgtacctgctcaccacttcaagcgctccgtattgtatgcaccactctctggtagagtttcatcttaaagagcttcgaaataaggacactaacattgaagtgacctttctgtcctctaacattacctccagttctaaaatcacaatacctaaacagcaacggtacggtaagggtatcatcgcacacgctacgccccagtgccagatcaaccaggtaaaattcaaatttcagtccagcaatcgagtgtggaagaaggatagaacaaccatcatagggaaattttgtaccgctcttctcccagtcaacgaccgcgagaagatggtttgtcttcccgagcccgtaaaccttcaggcttcagtcacggtgtcatgcgacttgaagattgcctgcgtgtag

SEQ ID NO: 234866 - DNA, 1323 bp, synthetic construct
  misc_feature 1..1323: note = Description of Artificial Sequence: Synthetic coding sequence
  source 1..1323: mol_type = other DNA
atgccaccagggccttgggaaagttgcttctgggtcggcggactaatcctgtggttatccgtagggagcagcggcgatgccccacctaccccacagccaaaatgcgctgactttcagagtgcaaacctgttcgagggcaccgatctcaaagtgcagttccttctgttcgtcccaagtaatccctcttgtggacagctcgttgaagggagcagcgatctgcagaatagtgggtttaacgccactctcggaaccaaactgatcattcatggattcagggtactgggaacaaaacccagctggatcgacacttttattagaacacttctgagggccacaaacgctaatgtgatcgccgtcgactggatctatggctccacaggagtatactttagcgctgtaaaaaatgtgttgggtgtcagcgaaagctcaatccatattatcggcgtgagtcttggggctcacgttgggggtatggtaggccagctcttcggtggccagctaggccagattaccggcctggatcccgctggcccagagtacacgcgtgcgtccgtggaggaacgtcttgatgctggagacgctctgtttgtggaagccatacacacagataccgacaacctcgggatacgtatccctgtgggtcatgtggattatttcgtaaacggagggcaggaccagccagggtgtcctacatttttctatgccggatactcgtatttgatatgcgaccatatgcgcgctgttcacctgtatatcagcgcactcgaaaactcttgcccactgatggcttttccatgtgcctcctacaaggcctttttagcaggcagatgtctcgactgtttcaacccgtttcttctcagctgtcctaggatcgggcttgttgaacagggcggtgtcaagatcgagcctctccccaaagaggttaaggtttacctgctgactaccagttccgccccatactgtatgcaccatagtttggtggaatttcacctgaaagaactgcggaacaaagacaccaacatcgaagtgacttttctgtcatccaacattacgagttctagtaaaattaccattcccaagcagcagcggtatggtaaaggcatcatagcccatgcaacacctcaatgccaaatcaaccaggttaagtttaagtttcaaagctccaaccgcgtatggaagaaagacaggacaaccatcatcggcaagttctgtactgccctgctccctgtcaatgatcgcgagaagatggtgtgtcttccagaacctgtgaatttgcaagccagcgtgacagtttcttgtgatctaaaaattgcctgcgtgtag

SEQ ID NO: 234867 - DNA, 852 bp, synthetic construct
  misc_feature 1..852: note = Description of Artificial Sequence: Synthetic coding sequence
  source 1..852: mol_type = other DNA
atggtggggcagctgtttggcggtcagcttggtcagattaccggcctggacccagctggcccagagtataccagggccagtgtggaggaacgtctggacgctggcgatgccctgttcgtggaagccatacacaccgacaccgataacttggggatacgaatccccgtagggcatgtggattatttcgtcaatggtgggcaagatcaacctggatgcccgacttttttttatgctgggtattcatatctgatttgtgatcacatgcgagctgtgcatctatacatatccgcacttgaaaactcatgcccattgatggcctttccctgcgcctcctacaaggccttcctggccggacggtgtctggactgttttaatccttttctgctgagctgcccccgtataggcctggttgagcagggaggagtgaagattgagccgctgccgaaggaggtgaaggtatatctgctcacaacctctagcgctccttactgtatgcaccacagtctcgttgagttccaccttaaagaattacgaaataaagacaccaacatagaagtcacatttttgagttcaaacattacctccagtagcaagattactatcccaaagcagcagaggtacggcaaaggcataattgcccacgccacgccacagtgccaaatcaaccaggtaaagttcaaattccagagcagcaacagggtgtggaagaaagatagaacaactatcattggcaagttctgcactgcattactgccggtcaatgatagggaaaaaatggtgtgtctgcctgaacccgtgaatctgcaggccagcgttacagtgagctgtgaccttaagattgcgtgtgtctag

SEQ ID NO: 234868 - DNA, 1656 bp, synthetic construct
  misc_feature 1..1656: note = Description of Artificial Sequence: Synthetic coding sequence
  source 1..1656: mol_type = other DNA
atgcgtacacgaccccgaccccgtctgcggagaacagaaaacttcttaactgccgtccatcacggtaagaaggaagagaaggcggctgtggaacgaaggcgcctccacgtcctgaaggcactgaaaaaactccgtattgaagcagatgaggcccctgtagtggccgttctgggctccggcggagggctgagggcccacattgcctgccttggcgtattgtccgaaatgaaagaacagggtctgctggacgcagttacatatctagctggagttagcggttccacatgggctatcagttccctgtacacaaacgatggagacatggaggcattagaagctgatctcaagcataggtttaccagacaggagtgggacttggccaaaagcctgcagaagaccattcaggccgctcgatcagagaactattccctgactgacttttgggcctatatggtgatttcaaagcagacccgggagctgccagaatcccatctcagcaacatgaaaaaacctgtagaagagggcaccctaccttaccccatcttcgccgctatcgacaacgacctccagccctcttggcaagaggcacgcgcacccgagacttggttcgagtttacgcctcatcacgccggtttctctgcactgggcgcatttgtgagcattacccattttggtagcaagtttaaaaagggacgcctggtgcggacacatccggaacgggacctgacgtttctcagagggctgtggggctccgcactcggcaacacagaggttatccgtgaatacatatttgaccagctacgtaacctcactctcaaaggtctgtggaggcgcgcagtggcaaacgctaagtcaattggccatctgattttcgctcggttgttaagactccaggaatcctcgcagggcgaacatccgccacccgaggatgaagggggtgagcccgagcatacctggctcacagaaatgctggagaactggactcggacctcgctcgaaaaacaggagcagccccacgaggatccagagcggaagggctctctcagcaacctgatggatttcgtgaagaagactggaatttgcgccagtaagtgggagtgggggaccactcacaattttctttacaagcacggcggaattagggacaagatcatgagttccagaaagcacctgcatttagtcgacgctggccttgctatcaacacacccttcccattagtgctgcctcccacccgggaagtccatctgatcctttcctttgacttctcagctggcgacccatttgagaccattagggccaccacggattattgccgccgtcacaagatcccctttccccaggttgaagaagccgaactcgacctctggtctaaggctcctgcctcctgctatatcctcaaaggcgagactggccctgtggtcatgcattttccactgtttaacattgatgcatgcggaggggacattgaggcctggagtgatacttatgacacctttaagttggctgacacatatacacttgatgttgtcgtgctacttctggctctggcaaagaagaatgtacgcgagaacaagaagaaaatcttaagagaactgatgaacgtggctgggctgtactatccaaaagacagcgcacgcagttgctgcctggcttag

SEQ ID NO: 234869 - DNA, 4392 bp, synthetic construct
  misc_feature 1..4392: note = Description of Artificial Sequence: Synthetic coding sequence
  source 1..4392: mol_type = other DNA
atgctcctgtcgcccagcctgttgctgctgttgttgttaggagcacccaggggctgcgccgagggcgtcgctgcagcgctcactcctgagagacttctggaatggcaggacaaggggatctttgtcatacagagtgagtccctgaaaaagtgtatccaagccggaaagagtgtccttactttagaaaattgcaaacaggctaacaagcacatgttatggaaatgggtctccaatcacgggctgttcaacatcggaggctcaggatgcttaggcctgaacttctccgcaccggagcagccactgtccctgtacgagtgtgactctaccctggtttccctgagatggcgctgcaacaggaagatgatcactggaccgttacagtacagcgtgcaagtcgcgcatgacaatactgtggtggcatcgcgtaagtatatccataaatggatttcttacggcagtggcggaggcgacatttgtgaatatcttcataaggatctgcacactattaaagggaatacccatggaatgccttgcatgttccccttccagtataaccaccagtggcaccacgaatgcacaagggagggcagagaagatgacctgctttggtgcgccaccacctctcggtacgaaagagatgaaaagtggggattttgccccgatcccacaagtgcggaggtggggtgtgacacaatttgggagaaagacctgaactcccatatctgttaccagtttaacctgctatcctcactgtcctggtctgaggctcatagttcttgtcagatgcaaggaggcaccctcctgtcaatcacggacgagacagaggagaacttcatccgggaacacatgtcctccaagaccgtcgaggtctggatgggacttaatcagctggatgagcacgctggctggcagtggtctgatggaacacccttaaattacctgaactggtctcctgaagttaatttcgagccattcgtggaagatcactgtgggacattcagcagcttcatgccatctgcctggcgctcccgcgattgcgagagcacacttccctatatctgtaaaaaatatctcaaccatatcgatcacgagatagtggagaaggatgcctggaaatactacgccactcactgcgagccgggttggaacccttataaccgaaactgttacaagctgcagaaagaggagaaaacatggcacgaggccctgcgatcttgtcaggccgataattcagctctgatagacatcacaagtctggcagaggtcgaatttcttgtgactctcctgggagacgaaaacgcttcagaaacgtggatcggactctcatctaacaagattcccgtaagttttgaatggtctaatgattcttccgtgatattcacaaactggcataccctcgagcctcacattttcccgaaccggtcccagctatgcgtatcggcggaacagagtgaaggacactggaaagttaagaattgtgaggaacgcctgttttatatttgcaaaaaagccggtcacgtcctgtcagacgcagagtccggatgccaggaaggctgggaacggcacggcggattctgctacaagatcgataccgtccttaggtcttttgatcaggccagttctggttattattgtcctcccgcattggtgactatcaccaacagattcgaacaggcttttatcacttcactcatcagtagtgtcgtcaagatgaaggattcctatttttggattgctctgcaggatcagaatgataccggagaatacacatggaaacccgtggggcaaaagcctgagcccgtacaatatacccactggaacactcaccagcccagatactctgggggatgcgtggccatgaggggaagacatcctctgggacggtgggaagtaaagcactgcagacatttcaaagcgatgtcactctgcaagcagcctgttgaaaatcaggaaaaagctgagtacgaggagagatggcctttccacccttgttacttggattgggaaagcgaacccggactggcctcctgcttcaaggtgtttcacagtgagaaggtacttatgaaaagaacctggagggaggcggaagccttctgcgaagaattcggagcccacttggcatcttttgctcacattgaggaagaaaattttgttaacgaacttctgcattctaagttcaactggaccgaggaacgtcagttctggatcggatttaataagcgtaaccccctcaatgctgggtcctgggagtggagtgacaggacccccgtggtatccagctttctcgacaatacctatttcggcgaggacgccaggaattgcgccgtctacaaggcgaacaaaactttactgcctttgcactgcggatctaaaagggagtggatttgtaagataccccgagacgtcaagccgaagatccccttctggtaccagtacgatgtgccctggctgttttaccaggacgccgaatatttgtttcacacatttgcttccgagtggctcaactttgagtttgtttgctcctggctccatagcgacctgctaactatccattccgctcatgaacaagaattcatacatagcaaaatcaaagccctgtccaaatatggagcctcttggtggatagggctgcaggaggagagggccaatgatgaatttagatggcgagatgggacacctgtgatatatcaaaattgggatacggggcgagagcgcacagtgaacaaccaaagccagaggtgcggttttatctcctccatcactggtctgtggggcagcgaggaatgttctgtgagtatgcccagcatttgtaagaggaagaaggtgtggcttatcgaaaagaagaaggatacccctaaacagcatggaacctgccctaaaggttggctctacttcaattacaagtgcttactgctgaatataccaaaggatccctctagctggaaaaattggacccatgcacagcatttctgcgcagaggaggggggaacactggtggctatcgaatcagaggtggagcaggccttcataaccatgaacctgttcggccaaaccactagtgtctggatcggcttacagaatgatgattacgagacttggctgaacgggaagcccgtagtttattctaactggagcccctttgacatcattaacatcccatctcacaataccaccgaggttcagaagcacattcccctgtgcgccctattgtcatcgaaccccaacttccactttaccggcaaatggtactttgaagattgtgggaaggaaggatatgggtttgtgtgcgaaaaaatgcaggacacctcaggccacggagtgaacaccagcgatatgtatccgatgccaaacaccctcgagtatggtaaccgcacttacaagattataaacgctaatatgacttggtacgctgcgattaagacctgtctaatgcataaggcacaactggtctccatcaccgaccagtaccaccagtcttttttgaccgtggtgcttaataggctgggatacgctcactggattggcctgtttacaacagacaatggcctcaattttgactggtccgatggaaccaagtccagctttacgttttggaaagacgaggagagtagccttctaggggactgcgtgtttgcggactcgaacggtagatggcacagcacggcttgtgaatcattcctacagggagcaatttgccatgtcccacccgagaccagacagtcagaacaccccgaactctgctctgaaacttcaatcccctggattaaatttaaatctaactgctattcattcagtaccgtgctggactctatgtcattcgaggctgcacacgagttttgcaaaaaagagggtagtaatctgcttacaataaaagacgaagccgagaacgcgttcctcctcgaggaactgtttgcctttgggagttctgttcagatggtgtggcttaacgcgcagtttgacggaaataatgagacgatcaaatggttcgacggcacccctaccgaccagtcaaattgggggattcgaaagcccgacactgactatttcaagccccatcactgtgtggctctgcgcattccagaagggctttggcagttatccccgtgccaggaaaagaaaggcttcatttgcaagatggaagcggacatccataccgctgaagcgctacccgaaaagggtcccagtcactccataattcccctggctgtggtactcacattaatcgtgatcgtagcgatatgcacgctgagcttttgcatctacaaacataatgggggattcttccggagactggcaggtttccggaatccgtattatcccgcaactaatttctcaaccgtctatctggaagaaaacatcctcattagcgacctggagaagagtgaccagtag

SEQ ID NO: 234870 - DNA, 3975 bp, synthetic construct
  misc_feature 1..3975: note = Description of Artificial Sequence: Synthetic coding sequence
  source 1..3975: mol_type = other DNA
atgctgctttctccaagcctgctcctgctgttgctgctgggtgcccctcggggatgtgccgagggtgtggccgctgccctgactccagagcgactgctcgagtggcaggataagggcattttcgtgatccagtcagaatcactcaagaaatgcatccaagccggaaagtctgtgctgacactggagaattgtaagcaggccaacaaacatatgctgtggaagtgggtgagtaatcacggcctttttaacataggaggcagcggctgtcttggcctcaacttcagcgcccctgagcagccgctgagtctatacgaatgcgacagcaccttggtttcactgagatggagatgtaaccgtaagatgataaccggaccactacagtactccgtgcaagttgcccacgacaacacagtagttgcttctagaaagtacatacacaagtggatttcctatggaagcggcggtggggacatctgcgagtatcttcacaaggaccttcacaccattaagggtaacacacatggcatgccttgtatgtttcccttccagtacaatcaccagtggcatcacgaatgcacaagggaaggtagggaagatgatctgctgtggtgtgccacgacctcccgctatgagcgcgatgaaaagtgggggttttgtcccgacccgacctcagcagaggttggatgcgacaccatctgggagaaggaccttaacagtcatatatgttaccaattcaatctcttgtcaagcctgtcatggagtgaggcccacagctcgtgtcagatgcaaggaggaaccctgctttctatcacagacgagacagaagagaatttcattcgggagcacatgtccagtaagactgtggaggtgtggatggggttgaatcagctcgacgaacacgccggatggcagtggagcgatggtactcccttaaactatttaaattggagcccggaagtgaattttgagccctttgtggaggaccactgtgggacattttcgtcctttatgccctccgcctggcgctcacgggactgcgagtctactctaccctatatttgcaagaagtacttgaatcatatcgaccatgaaatcgtggaaaaggacgcatggaaatattatgccacgcactgtgaaccaggctggaatccttacaaccgtaactgctacaagcttcaaaaagaggaaaagacttggcacgaggccttgcggagctgccaagcagataacagtgcactgatcgatataaccagcttggcagaagtggaattccttgtgacactgctgggggatgagaatgcctcagaaacctggattgggctcagctcaaacaaaattccagtgagcttcgagtggtcaaatgactcgtccgtcatcttcacaaactggcacacccttgaacctcacatctttccgaatagaagtcagctgtgcgtaagtgcagagcagagcgaaggacactggaaagtcaagaactgtgaagaacggctcttttacatctgtaagaaggcgggacacgtcttgtcagatgccgagtctggctgtcaggagggttgggaacgccacggcggattttgttacaaaatagacaccgtgctgcgcagttttgaccaggcaagttctggttattactgtcctcctgctctggtgacgattactaacagatttgaacaggcgtttatcaccagcctgatctcttcggtcgtgaagatgaaggacagctacttctggattgctcttcaggaccaaaatgatacaggagaatatacatggaagccagtgggacagaagccagagcctgtgcagtatacacactggaacacccatcaacctcggtactcaggtggctgcgtggccatgcgaggcaggcatccattggggagatgggaggtcaagcattgccgccattttaaggctatgtccctttgtaagcaacctgttgaaaaccaagaaaaagcagaatatgaggagcgatggccctttcatccctgttacctggattgggaaagcgaacctggattggccagttgcttcaaggtgtttcattcagagaaagtcctcatgaagcggacatggagggaggcagaggctttttgtgaggagtttggggcacacctggcttcatttgcgcacatagaagaagagaactttgtgaacgagctgctccattctaagttcaactggacagaggagagacagttttggattggatttaataagcggaaccccctgaacgcgggttcgtgggagtggtctgatcgcacccccgtggtttcatccttcctggacaacacctatttcggagaagacgccagaaactgcgcagtttacaaggctaataaaactctcctccccctccactgcggctctaagcgcgaatggatttgtaaaatccctagagatgtcaaacccaagattcctttttggtatcaatatgacgtaccttggctattttaccaggacgcagagtatctgtttcatactttcgcctctgaatggttgaactttgagtttgtctgttcctggctccactccgacctgctgaccatccattcagcgcacgaacaggaatttatccatagcaaaatcaaagctctgtctaagtacggagcctcttggtggattggcttacaggaagaaagggccaacgatgagttccgttggagggatgggacaccagtgatttaccagaactgggataccggtcgggaacggacggtgaacaatcagtcccagaggtgcggctttatttcaagtatcaccgggctgtggggatctgaagagtgtagtgtgtccatgccctccatttgcaagcggaaaaaggtctggttgatcgaaaaaaagaaggacactcctaaacagcacggaacgtgcccaaagggatggttgtacttcaactataagtgcctgctcctgaatatccctaaagacccatcatcctggaagaactggactcatgctcagcacttttgtgccgaagaaggcggaaccctcgttgccatagagtcagaggtggagcaagcttttattacgatgaatctgtttggtcaaacaacgagcgtgtggattgggcttcagaatgacgactacgaaacctggctgaacgggaagcccgtcgtgtacagcaattggtctccgttcgatataatcaacataccctcacacaatacaactgaagtccaaaagcacattccactgtgcgccctcctgagttctaatcctaacttccatttcactggcaaatggtactttgaggactgcgggaaggaaggttacggtttcgtgtgcgagaaaatgcaggacacaagtgggcatggggtgaatacctccgatatgtaccccatgccaaacacccttgaatatgggaatcgtacctataaaattatcaacgcaaatatgacgtggtatgccgctatcaagacatgcctgatgcacaaagcccagctggtgagtatcactgatcaataccaccagtcattcctgacggttgtgctcaatcggctgggctacgcccattggatcgggttgtttacaacagataacgggctaaacttcgactggagcgacgggactaaatcttccttcaccttttggaaggatgaggagtcttccttactaggggactgtgtgttcgcggactccaacggcaggtggcactccactgcatgcgagagctttctgcaaggagcaatctgtcatgttccaccagagacacgtcaatccgagcatcctgaactgtgttcagaaacatccatcccatggataaagttcaagtcgaactgctactccttctctacggtgctggactctatgagcttcgaggccgctcacgagttctgtaagaaagagggtagcaatctgctcactatcaaagatgaagctgagaacgcctttcttctggaggaactgttcgcttttggttcatctgtccagatggtctggttaaatgcacagtttgacggaaactctaaatag

SEQ ID NO: 234871 - DNA, 1584 bp, synthetic construct
  misc_feature 1..1584: note = Description of Artificial Sequence: Synthetic coding sequence
  source 1..1584: mol_type = other DNA
atgggctcttcagaggtgtctattattcctggcctgcagaaggaagagaaagccgcagtggagaggcgaaggttgcacgtgctaaaggccctgaagaaactccgcatcgaggcagatgaggccccagttgtagccgtcctcggatcaggcggtggactcagagcccacatagcctgccttggtgtcctctccgagatgaaggagcagggtctgctggacgcggtgacctacctggctggcgtgtccgggagcacttgggctatctccagcctgtatactaatgacggtgacatggaggccctagaagcagacttgaagcataggtttacccggcaggaatgggatctggcaaaaagtctgcaaaaaaccatccaggctgccagaagcgaaaactactcactgaccgacttctgggcttatatggttatctcaaaacagacgcgcgaactgcctgaatctcatctgagcaatatgaaaaagcccgtagaagaaggaacactcccataccccattttcgcagccattgataacgatctgcagccatcctggcaagaagctcgggcacccgagacttggtttgaatttacacctcaccacgctggcttctccgcactcggggcatttgtttcgattacacacttcgggagcaagtttaagaagggacgactggtcaggactcatccagagagggatctgacatttctgcgagggctatggggatcagctctcgggaacacagaagtgatccgggaatatattttcgatcagcttaggaatttgacattgaagggcttatggcgtcgcgctgtcgccaacgctaagagtattggacacttaatttttgcacgtctcctgcgactccaggaaagtagccaaggggagcacccccctcctgaagacgaaggcggagaacccgaacatacatggttaaccgaaatgctggagaattggacccggactagcctggaaaaacaagagcagccccatgaagatccggagcgtaaaggatccctatctaatttaatggacttcgttaagaagactgggatttgcgcttccaaatgggagtggggtactacccataattttttgtataagcatgggggaatacgtgacaaaataatgtcgtcgcgaaagcacctgcacttggtagatgcgggtctcgctatcaataccccgttcccgctcgtgcttccccctacaagggaggtgcatttgattctgtcgtttgacttttccgcaggtgatccctttgagaccatacgtgccaccaccgactactgtagaaggcataagattccttttcctcaggttgaggaagctgagttggatttatggtccaaggcgccagcgagctgttacatcctcaaaggcgagacaggccctgtcgtgatgcacttccccctctttaacatcgatgcctgtggaggagatatagaggcttggtcagatacatacgacactttcaaactagccgatacctacaccctggatgtagtggtgctgttgctagccctggccaaaaagaatgtgcgtgagaataagaaaaagatattgcgcgaactcatgaatgtggcgggatag

SEQ ID NO: 234872 - DNA, 1626 bp, synthetic construct
  misc_feature 1..1626: note = Description of Artificial Sequence: Synthetic coding sequence
  source 1..1626: mol_type = other DNA
atggggtcgtctgaggtatctattatacccggactgcagaaggaggaaaaagccgcagttgagcgacggcgactccatgtcttgaaggctcttaaaaagctgaggatcgaggctgacgaggcacctgtggtggcagtactcgggtccggtggaggcctaagggctcatatcgcgtgcctgggtgtcctgtcggagatgaaggaacaggggcttttggatgcggtgacttatctggccggagtgtcaggttctacgtgggcaatttcatccttgtacacaaatgacggggatatggaggccctggaagccgatctgaaacacaggtttacgcgccaggaatgggacctggcaaagtcactgcagaaaacaatccaggccgctagatccgagaactatagcctcacagatttctgggcttacatggtgatttctaaacaaactagagaattgccagagtcccacctgtctaatatgaaaaaaccagtggaagaggggaccctgccttaccccatctttgcagctatcgataatgaccttcagccttcgtggcaggaggccagagcccctgaaacttggtttgagttcacgccccatcacgcgggattctccgccctgggcgcttttgtgagcattacccacttcggatcaaaattcaagaagggacgcctagtcagaactcatcctgagagggatcttacgttcctgagaggactgtggggaagtgctcttggcaacacggaggtgatcagagaatacattttcgaccagcttcggaatctgacacttaagggcttgtggcggagggccgtcgctaatgccaagtccattgggcacctcattttcgcaaggctgctccgtctccaagagtccagccagggtgaacaccccccacccgaagacgagggcggagagccagagcacacatggttaacagaaatgttagaaaattggactagaactagtctggaaaaacaggaacagccgcatgaagaccccgaacgtaagggtagcctgagcaatctcatggattttgttaagaagaccgggatttgcgctagcaagtgggagtggggcaccacccacaatttcctgtataaacatggtggaattcgcgacaagatcatgtcttctagaaagcatttgcacttggtggatgccggtcttgccatcaacactccattcccgctggtactcccacctactcgggaggtgcatctaatcctgagttttgatttctccgcaggggatccctttgaaacaatacgcgctacgactgattactgtagaagacataagattccattcccccaggtagaagaagccgaactggatctctggagcaaagccccagccagctgctatatcctcaagggcgagaccgggccagttgtgatgcactttccactgttcaatattgacgcttgcgggggagacattgaagcctggagcgatacatacgacacctttaaactcgccgatacctacacactggacgtcgtggttctgttactggccctggccaagaaaaacgtgcgcgaaaacaagaagaaaatactccgcgagctcatgaatgtggcagggctgtattaccctaaagatagtgccagatcatgctgtctggcttag

SEQ ID NO: 234873 - DNA, 2457 bp, synthetic construct
  misc_feature 1..2457: note = Description of Artificial Sequence: Synthetic coding sequence
  source 1..2457: mol_type = other DNA
atggaatccttgagtcccggtggacccccaggtcatccttatcagggagaagcatccacttgttggcagttgaccgtccgagtgctagaagccagaaacctgcgttgggcagatctgttgtctgaggccgacccgtatgtgatactccagctgagcaccgcacccggaatgaagttcaagactaagacattgacagatacatcgcaccccgtgtggaacgaggcctttcggtttcttattcagagccaggttaagaacgtgttagaactctcaatctatgacgaggactctgtgacagaagatgacatttgttttaaagtgctgtatgacatctcagaggtgctgccaggaaagttactgagaaaaactttcagccaaagcccacaaggggaagaggaactggacgtggagtttctaatggaagagacttccgatcgtccagagaatctgattactaataaggtgatagttgcacgggagctgtcctgtctggacgtgcacctcgactcaacaggatctacggctgtggtggctgatcaggataagctggagctggagctggtgcttaagggctcatatgaagatacacaaacctcattccttggaacagctagcgcctttcgatttcattacatggctgcacttgagacagagctgagcggccgattgcggtctagcaggagcaatggatggaatggggacaattctgctggctacctcactgttcccctacggcctctgacaattggcaaggaggtgacaatggacgtccccgctcccaacgctccaggggtgagattgcagcttaaggccgagggttgtcccgaggagctggccgtccacctaggcttcaatctctgcgccgaggagcaggcatttctttccaggagaaagcaggttgttgcaaaggcactgaaacaggctcttcagctggaccgagacctccaggaggacgaagtcccagtagtgggcataatggccacagggggaggggcacgggctatgacttctctctacggccatctcctggctcttcagaaactgggcttactggactgcgtgacctatttctctgggatctccggtagtacttggacgatggcccatctttacggcgacccagagtggtcccagcgggatttagaggggccaattcgctacgcccgagaacaccttgctaaatccaaactggaagtgttttcgcctgaacggctcgcaagctataggcgggagctggaactacgcgctgagcagggtcacccaaccaccttcgtggacctgtgggccctcgtgctggaatctatgctccatggacaagtcatggaccagaaactgtctggacagcgcgcagccctcgaacggggtcagaatcccctgcccctgtacctgtcactgaatgtgaaggaaaataacttagagacactcgattttaaagagtgggtggagtttagcccttatgaagttgggttcctgaaatacggcgcttttgtgccgcctgagttattcggttccgaattctttatgggaagactaatgcgacggatccccgagcctagaatatgcttcctggaggctatttggagcaacattttctcactgaacctcttagatgcctggtacgatttgacctcctctggcgaaagctggaaacagcacatcaaagacaagacgcgaagcctggagaaggagccccttacaacttcggggacgtctagcaggttggaggcctcctggttacagcccggtacagccttagcacaggccttcaaaggctttctgacaggaaggcctcttcatcagaggtctcctaatttcctgcagggacttcagcttcatcaagattattgttctcacaaggatttttctacctgggctgattatcaactagactcgatgccgagccagctgacaccaaaggagcccaggctgtgtcttgtggacgctgcttattttatcaatacttcctccccatccatgttcagacccggtaggaggctggacctgatattgtcattcgactactcattatctgctccattcgaagccctgcagcagactgaactgtattgccgggctagagggctgccctttcccagagtagagcccagtccccaggaccaacatcagcctcgtgaatgccatctctttagtgaccccgcttgtccagaggcacctattctcctgcatttccctttggtcaatgctagcttcaaggaccatagcgcccctggcgtgcaacggtcccccgcagagctgcagggcggacaggtggacttgaccggcgcaacttgcccttataccttaagcaacatgacgtataaagaggaagatttcgagagattgctgaggttgagcgactacaacgttcagacttctcagggcgcaattctccaggcattacgcaccgctctgaagcaccgcacgttagaggccaggcctccccgagctcagacctag

SEQ ID NO: 234874 - DNA, 1326 bp, synthetic construct
  misc_feature 1..1326: note = Description of Artificial Sequence: Synthetic coding sequence
  source 1..1326: mol_type = other DNA
atggtccctccgaagctgcacgttctcttttgtttatgcggatgcctcgctgtagtctacccttttgactggcagtacataaacccagtggcgcatatgaaatcaagcgcctgggtgaacaagatacaggtgttaatggcagcggcatccttcggccagacaaagatccccagaggaaatgggccttactctgttggctgtacggatctgatgtttgaccataccaataagggaacctttcttagactttactacccctcccaggataatgataggctggacaccttatggattcctaacaaagagtacttctggggcctatccaagtttctcggcactcactggctgatggggaacatcctgcgtctcttgttcggctctatgactaccccagctaattggaacagtcctctgcggcctggtgagaaataccccctcgtggtcttctcccacggccttggagcctttcgaaccctctattcagccattggaattgatttagcctcccacgggtttattgtagcagccgtcgaacatagagatcgctcagcatcagcaacctactattttaaagatcaaagtgctgctgaaataggcgacaagagttggctatatttgagaaccctgaagcaggaggaagaaacccatatacgcaacgaacaagtacgacagcgcgcaaaggagtgcagtcaagccctgagccttattttggatatcgaccacggcaaacctgtgaaaaacgccctcgatctgaagtttgacatggaacaactgaaagactcaatcgacagagaaaagattgctgttattgggcacagttttgggggtgccacggtgatccaaacactcagcgaggatcagcggtttcggtgtggtattgccttggatgcctggatgttccccctcggggacgaggtctatagcagaatacctcagcccctgttttttatcaacagcgagtattttcaataccccgcaaacattatcaagatgaagaagtgttactcgcccgataaggaaaggaaaatgatcaccatccggggaagcgtgcaccagaacttcgccgactttacattcgccaccggcaagattatcggccacatgttaaagctgaagggtgacattgactcaaatgtggcaatagacttgagtaacaaagcttccttagccttcctgcagaaacaccttggcctgcataaggattttgaccagtgggactgtttgatagagggcgacgatgagaatctgataccgggtaccaacataaataccactaaccaacacattatgttacagaatagcagcggaattgaaaaatacaactag

SEQ ID NO: 234875 - DNA, 1326 bp, synthetic construct
  misc_feature 1..1326: note = Description of Artificial Sequence: Synthetic coding sequence
  source 1..1326: mol_type = other DNA
atggtgcccccaaagctacacgtgctgttctgcctgtgtggatgccttgcagtggtgtatccttttgactggcagtatatcaatcccgtggcccacatgaagtcctccgcctgggttaacaaaatacaggtcctcatggctgcagccagcttcggacagacaaaaatcccccgaggtaatggcccatattctgtcggttgtacagacctcatgtttgatcataccaataaggggacatttctgcgactgtactacccatcacaagacaatgatagactagacaccctgtggatcccaaataaggagtacttttggggtttgtctaaatttttagggacacattggctgatgggcaacatcctgaggctgctctttggaagcatgaccaccccagcaaattggaattcaccgctgcgtccaggtgagaaataccccttagtagtgtttagtcatggactgggcgctttcaggaccctctatagtgccatcggaatcgacttggcctctcatggtttcattgtggcagctgtggagcatcgcgataggtcagctagtgccacatactatttcaaagaccagagcgctgccgaaatcggtgacaagtcatggctttacctaagaaccctgaagcaggaggaggaaacccatattaggaacgagcaagtgaggcagagagcaaaagagtgtagccaggctctgtccctgatcctggacatcgaccatggtaaaccagtcaaaaatgccctggatctcaaatttgatatggagcagttgaaagattccattgacagagagaagatcgcagtgatcgggcacagttttggcggagctaccgttatccagactctgagtgaggaccagcgttttaggtgcggaatagcgcttgacgcgtggatgttccctctgggcgatgaggtctacagcaggattccacagccgctatttttcattaactccgagtatttccagtatccggctaacataattaaaatgaaaaagtgttactccccagacaaagaaagaaaaatgatcacaataagaggatctgtgcaccaaaacttcgctgacttcacgtttgccaccggcaaaatcattggccacatgctgaaacttaagggcgatatcgactcaaacgtggccatcgatctatcgaacaaagcttctctcgcctttctgcaaaaacacctgggcttgcacaaagattttgaccagtgggattgcttaatcgaaggggacgatgagaacctcatccccggaacaaatatcaatacaactaatcaacatataatgctgcagaattcaagcggaatcgaaaaatacaactag

SEQ ID NO: 234876 - DNA, 660 bp, synthetic construct
  misc_feature 1..660: note = Description of Artificial Sequence: Synthetic coding sequence
  source 1..660: mol_type = other DNA
atggcggctgccagttttggacaaactaagataccacggggaaacggcccatatagcgtgggatgtacagatctgatgttcgatcacaccaacaaagggacctttctaaggctgtactacccatcccaggataatgataggttggatactttatggatccctaacaaagaatatttctggggactgagcaagtttctgggtactcattggttgatggggaatatccttagactactctttggctcaatgacaacccccgcaaactggaattcccccctgcgcccaggcgaaaaatatccgttggtggtgttcagtcatggtctgggagccttccgaactctctactctgccatcgggattgacctggccagccatgggttcatcgtcgccgctgtcgaacatcgggacagaagtgcttcagcgacatactattttaaagaccaaagtgccgcagagattggcgataaatcatggctatatcttaggacacttaagcaggaagaggaaactcacatccggaacgagcaggtgcgccagagagctaaagaatgtagtcaggctctcagcttgatcttggacatcgaccacggcaaacccgtgaaaaacgcactggatctcaaattcgatatggagcagctgaaggtgagttacaaaaagtag

SEQ ID NO: 234877 - DNA, 414 bp, synthetic construct
  misc_feature 1..414: note = Description of Artificial Sequence: Synthetic coding sequence
  source 1..414: mol_type = other DNA
atgacgacccctgccaactggaatagcccactacgccctggcgaaaaatatcctctggtcgtcttctcacacgggctcggagccttcaggacactatacagcgctataggcatcgacctggccagccatggatttattgtagctgcagtggaacatcgcgataggagcgctagcgctacgtattacttcaaagaccaaagtgctgctgagattggtgataagtcatggctctacctgaggaccctgaaacaggaggaggagactcatattagaaacgaacaagtgcggcagagagccaaggagtgcagccaggccctgtccctgatcctggacatcgaccacggcaagcctgtgaagaacgctctagacctgaagtttgacatggaacagctgaaagtgtcttacaaaaagtag

SEQ ID NO: 234878 - DNA, 489 bp, synthetic construct
  misc_feature 1..489: note = Description of Artificial Sequence: Synthetic coding sequence
  source 1..489: mol_type = other DNA
atgcgggctcctatcccagaacccaagcctggagacctgatcgagatctttaggccgttttatcgacattgggctatatacgtgggtgacggatacgttgtgcacctcgcaccaccgtcagaggtggcaggcgctggagctgcttctgtgatgtctgccctcacagacaaggcaatcgtgaagaaagaactgctgtatgatgttgcaggtagcgacaaataccaggtcaacaacaaacatgatgataagtactctccgctgccttgtagcaagattatccagcgcgcagaggaactcgtggggcaggaggtgctgtataagttaacgtcagagaactgcgagcacttcgtaaacgagctacggtatggtgtggcgcgtagcgaccaagtccgagacgtgatcattgcggctagcgtggcgggaatggggctcgcggctatgtcactgatcggtgtgatgtttagcagaaacaaaagacagaagcagtag

SEQ ID NO: 234879 - DNA, 489 bp, synthetic construct
  misc_feature 1..489: note = Description of Artificial Sequence: Synthetic coding sequence
  source 1..489: mol_type = other DNA
atgagagcccctatcccggagccgaagcctggtgatctgatcgagatttttcgacccttctatagacattgggccatttatgttggggacggctatgtggtccacctggctccaccatctgaagtcgcaggcgcaggggctgcatccgtcatgagcgctctcactgacaaagctatagttaaaaaggaactgctgtacgacgtcgccggtagcgataagtatcaggtgaataataagcacgacgataagtatagccctttgccgtgctccaaaattatacagcgagccgaagagctggtaggacaggaagtgctgtataagttgacgtccgagaattgcgagcacttcgtgaatgaactccggtacggggtcgcacggtccgatcaggttcgggacgtgattattgcagcttccgtggctggaatggggcttgccgcaatgagcctgattggcgtgatgttctcccgcaacaagcgtcagaaacagtag

SEQ ID NO: 234880 - DNA, 4377 bp, synthetic construct
  misc_feature 1..4377: note = Description of Artificial Sequence: Synthetic coding sequence
  source 1..4377: mol_type = other DNA
atgggtttaagacctggaatcttcctcctcgaattactgctactacttggacagggcacaccacaaattcacacctcccctcgcaaaagtacactggagggacagctttggcccgaaacacttaagaattctcccttcccttgcaatccgaacaagctaggcgtgaacatgccatctaagtcagtacatagtctcaagccgtccgatatcaaatttgtcgccgctattggaaatctggaaattccgccagacccaggcaccggtgacctggaaaagcaggactggaccgaacgaccacagcaggtctgcatgggggtgatgacagtactttctgacattatccgttactttagcccgtcggtgccgatgcccgtatgtcacacaggaaaacgcgtgattccccacgatggcgcagaagatctttggatccaagcacaagaactggtgagaaatatgaaggagaacctccaactcgattttcagttcgactggaaacttattaatgtcttcttctctaatgcatcccaatgctacctctgcccatccgcacagcaaaacggcctcgccgctggcggtgtcgacgaactgatgggagtgcttgattatttgcagcaggaagttcccagggccttcgtgaacctggtggatctcagcgaggtggcggaggtgtcacgccagtatcatggtacgtggctgtcaccagcaccggaaccttgcaactgttctgaagaaacaactcgtctggcaaaggtggtgatgcagtggagctaccaggaagcctggaacagccttctagcgtcgagcagatattcagagcaggaaagctttactgttgtgtttcaacctttcttctacgaaaccacccccagtctccacagcgaagacccaagactgcaggattcaaccactctggcgtggcatctgtggaacaggatgatggaacccgctggtgagaaggacgaacctctctcggttaagcacggtaggccgatgaaatgcccttcccaggagtccccctacctgttctcctaccgcaactccaactacttgacccgcttgcaaaagccacaggataaacttgaggttcgggagggcgcagagatccgatgtccggacaaagaccctagcgacacggtgcccaccagtgttcacagactgaagcctgctgacattaacgtgattggcgctctcggggattcattgaccgcaggtaacggggctgggtccaccccaggcaatgtgctggatgtactgacacagtatcggggactgtcctggagcgtggggggagacgagaacatcggcacagtaactaccctggccaacatactgcgcgaatttaatccgtccttgaagggctttagcgttggtaccggtaaggaaacttccccaaatgcatttctcaatcaagcggtggcgggtggaagagccgaggacctgccagtccaggccaggcgcctggttgatctgatgaagaatgacacgagaattcactttcaagaagattggaagattatcacactctttatcggcggaaacgatctctgtgatttttgcaacgatctggtgcactactcaccacagaactttaccgataatatcggtaaggcccttgacattctgcatgccgaggtgcccagagccttcgtcaatctggtgaccgtgctggagatcgtcaatcttcgcgaactgtaccaggaaaagaaagtgtattgtcctagaatgatcctcagatccctgtgtccttgcgtcctgaagttcgacgacaactccactgagttggcgacgttgatcgaatttaacaaaaagtttcaggaaaagactcatcagttgattgaaagtggaaggtatgatacccgtgaggactttacggttgtggttcaacccttttttgagaacgtagacatgcctaagacaagtgaaggactgccggataatagtttttttgccccagactgttttcactttagctccaagtctcattcacgagctgcatcagctctgtggaacaatatgctcgaaccagtgggacagaaaacaacgcgacataaattcgagaacaaaattaacatcacatgcccaaatcaagttcagccattcctgagaacatataagaactcaatgcaggggcatggcacatggctgccttgcagagatcgggctccatccgcgttgcatcctaccagtgtgcacgccctccggccagctgacatccaagtggtggccgcacttggggatagcctgacagctggcaacggcattggatctaaacccgacgacctgcccgacgtcaccacacagtacagaggtctttcctactcagcaggtggggacggttccctggagaatgtcaccactctgccgaatatcctgcgcgagtttaaccggaacttaacaggctatgctgtcgggacaggggatgccaatgacactaacgcttttctaaatcaagctgtgccaggcgcaaaggccgaggacctaatgtcacaggtacagacactcatgcagaagatgaaggatgatcacagagtgaattttcacgaggactggaaagtcataaccgttctaatcggcggttccgacctgtgcgactattgtactgattccaacctgtacagcgctgccaattttgtccaccacctgcggaacgctctcgacgtactccatcgcgaggtgcccagggttctcgttaatttggtggactttcttaatcctacgataatgagacaagttttcctgggtaatccagacaagtgccctgtccagcaggcttctgtgctgtgcaattgtgtactcacgctgcgggagaattcgcaagagctagctagactggaagctttctcacgcgcatacagatccagcatgagggagctggttggtagcggcaggtacgacacgcaggaggacttcagtgtcgtgctgcagccgtttttccagaacattcagctccctgtactggccgacggtttgccggacacctccttctttgcccctgattgcatccatccaaatcagaagttccactcccagctggctagggccctctggaccaacatgctagagccgctggggagcaaaacagaaacactggaccttagggctgagatgcccataacttgcccaacacagaacgaaccttttttgcggacacctagaaattcaaactatacatacccaatcaagcccgcaattgaaaattggggcagtgatttcctttgtacggagtggaaagcttctaatagcgtccccacttccgtgcaccagcttcgacctgccgacatcaaagttgtcgccgctcttggcgattccttgactactgccgtaggggcaaggccaaacaactctagtgatctaccgacgagttggcggggactttcatggtcgatcggtggggatggcaatcttgagacccataccaccctccctaacattctgaaaaagtttaacccataccttttgggtttctccacatccacctgggaaggcaccgccggtctgaacgtggcagccgagggcgctagagccagagatatgccagcccaagcttgggatctcgtagaaaggatgaaaaacagccctgacattaatcttgagaaagattggaagttggtgacccttttcattggcgtgaatgatctgtgccactattgcgaaaacccagaagctcacctagccaccgaatacgtgcagcacatacagcaggctctcgacatacttagcgaggagctgccaagggcattcgtcaacgtcgtcgaagtgatggagctggcaagcttgtaccaagggcaagggggtaagtgtgcgatgctagccgcacagaacaattgcacctgtttgagacactctcagtcaagtctggagaaacaggaattgaagaaggtcaactggaatttacaacacggcattagctcattttcttattggcatcagtacacccaacgggaagactttgccgtggtcgtgcagcctttcttccagaacacactaacccccctgaacgaacgaggcgataccgatctcaccttcttctccgaggactgttttcacttcagcgatagaggccatgccgaaatggccattgccctctggaacaacatgttggaacctgtcgggagaaaaaccaccagcaacaatttcacccactcacgggcaaagctgaagtgcccatcacccgagagcccatacctgtatactctgcggaactctaggttgctacccgaccaggcagaagaagcccctgaagttctgtactgggccgtccctgttgctgcaggtgtggggctggtcgtagggattatcggcacagtggtttggagatgtcgcagaggcggaaggagggaagaccccccaatgagcttgagaaccgtggccctttag

SEQ ID NO: 234881 - DNA, 1467 bp, synthetic construct
  misc_feature 1..1467: note = Description of Artificial Sequence: Synthetic coding sequence
  source 1..1467: mol_type = other DNA
atggaacccgctggggaaaaagatgagccattatctgtcaagcacggaaggcccatgaagtgcccttctcaggagagcccgtatctgttctcttaccgcaattccaactatctaacccggctccaaaaacctcaggacaaactggaagtgagggaaggtgcggagataaggtgccccgataaagatccatctgataccgttcccaccagcgtgcacagactgaaacccgctgacatcaatgtaattggtgccctgggcgactcattaactgcaggcaacggcgcagggagcacgcctggtaatgtcctggacgtgttaacccagtaccgcggtctgagctggagcgttgggggagatgaaaatattggcacggtgactactctagccaacatcctcagagagtttaatccaagtctgaaaggcttctccgtcgggacaggaaaagaaaccagccctaatgcatttcttaaccaagccgtcgccggaggacgagcagaggatctgcctgttcaagcacgcagactcgtcgacctcatgaagaatgatacgagaattcactttcaagaggattggaagattataaccctgtttatcgggggtaacgatctttgtgacttctgcaacgatctggtccattactcaccccagaatttcaccgataacataggcaaggcgttagatatcctccacgccgaggttcccagggcatttgtgaacctggtgactgtcctggaaattgtgaacctacgtgagttataccaagaaaagaaagtctactgtcctcgaatgatcctgcgatcactgtgcccctgtgttctgaagttcgacgataatagtacagaactagctactttgattgagtttaacaaaaagttccaggagaaaactcaccagctgatcgagtccggaagatatgacacacgcgaagattttacagtcgttgtccaacccttttttgagaatgtagacatgcccaagacatccgagggtctgcctgataatagcttttttgctcccgactgctttcacttttccagtaaatctcattctcgagccgcttccgcactgtggaacaacatgctggagccagtagggcagaaaaccacccgacataagttcgagaacaaaatcaatattacctgtcctaatcaggtccagccatttctgaggacatataagaacagcatgcaggggcacggcacgtggctgccttgccgggacagagccccaagcgcgcttcacccaactagtgtccacgcactgcgacccgcagatattcaggttgtggcggcacttggcgacagtcttactgcaggaaacgggattggcagcaagccagatgaccttcccgacgttacgacacaataccgaggcctgtcatacagggaatccaagccgggttttttatctgatagttgggtctccaagtccaacagaaaatgtaccagaaaagcccctaatccgtag

SEQ ID NO: 234882 - DNA, 4344 bp, synthetic construct
  misc_feature 1..4344: note = Description of Artificial Sequence: Synthetic coding sequence
  source 1..4344: mol_type = other DNA
atggggctgcgtccgggaatatttctgcttgagctgctcttgcttctgggtcaaggaacaccacagatccatacaagcccacggaagtctacgctggaagggcagctttggccagaaactttgaagaattcaccattcccttgcaaccccaacaagcttggcgtgaatatgccgtctaagtcggtgcactccctaaagccgagcgatatcaagtttgtggctgccatcggaaatctggaaatcccaccagaccctggtacaggtgacctcgagaaacaggattggaccgaaaggcctcagcaggtgtgcatgggtgtcatgacagtgctgagtgacattatccggtacttctccccctccgtgccgatgcctgtgtgccacactgggaaacgagtcattccgcacgatggggcagaggatctgtggatccaagctcaagagcttgtgcgtaatatgaaggagaacctgcagctggattttcaatttgattggaaattgatcaatgtcttttttagcaacgcctcccaatgttacctgtgtccctcagctcagcaggcgcctagcctctccaccgttcttctgtcacagaacggccttgcggcaggaggggtcgatgagctgatgggagttctggactacctgcaacaagaggtgcctcgggcatttgttaacctggtcgacttatccgaggttgctgaggtgtcaaggcagtatcatggaacctggcttagtcctgccccagaaccttgcaattgttccgaggagacgacaagactggctaaagttgtcatgcagtggtcctatcaggaagcttggaactccctgctggcttcctctcggtattctgagcaggaatcgtttacagtggtgtttcagccttttttctatgagaccacgccctcactgcatagcgaggatcctaggctccaggattcaacgaccctcgcttggcacctttggaataggatgatggagccagcaggagagaaggacgagccactctccgtgaagcatggaagaccgatgaagtgtccttcacaggagtcaccgtacctgtttagctatcgaaattccaactatctaacccgtctccagaaacctcaagataaactcgaagtccgggagggagctgagatccgatgtcccgataaggatccttcagatacagtaccaacctcagtgcatcggttgaagcccgcagacatcaatgtcatcggcgctctcggagactcgttaaccgcaggtaatggcgcaggatctacacctggcaacgtgctcgatgtgcttacacagtacaggggactgagttggtctgttggcggagatgaaaatatcggcacagtgacgacgcttgctaacatactgagagagtttaatccttctctgaagggtttctctgttggcactggcaaagagacttccccaaatgcttttctgaatcaggccgtggctggcggacgggcagaggatcttccagttcaggcaaggcgactagtagacctgatgaagaacgacactaggattcacttccaagaagattggaagatcattactctgtttatcgggggtaacgacctgtgtgatttctgtaacgacttggttccccgtgcattcgtgaatctggtgacagttctcgagatcgtgaatttacgggagttgtatcaggaaaaaaaggtctactgcccacgcatgattctgcggagcctgtgcccatgcgtattgaagtttgatgataattccaccgaactggccacgctcattgaatttaataagaaattccaagagaagacgcaccaactgatcgaatccggacgatatgacacccgggaggatttcactgtggttgtacagcccttcttcgagaatgtcgatatgcccaaaacatctgaaggtctcccggacaacagtttcttcgcacccgattgttttcacttttctagcaaatctcactcacgcgctgcctctgctctatggaacaatatgctcgagccagtcggtcaaaagaccacccggcacaaattcgaaaataagattaacataacttgtccaaatcaggtacagccattcctcaggacgtacaagaacagcatgcaagggcatggaacctggctgccttgccgagacagagcgccttctgcccttcatcccacaagcgtgcacgccttgcgccctgctgatattcaggtggttgctgccctgggcgattccctgaccgctggcaacggcatcggatcaaaaccagacgacctaccagacgtgaccacacagtatcgcggtctgtcatattccgcagggggtgatggttctctggaaaacgtgacaacactgcctaatatccttagggaatttaatcgcaatctgaccggatacgctgtgggaacaggtgatgccaatgacacaaatgccttcctaaaccaggccgtgcccggagccaaagctgaggatcttatgtcacaggtacagaccctgatgcagaaaatgaaggacgatcatcgcgtgaatttccatgaagattggaaagttattaccgtgctaatagggggatcggacctctgtgattattgcactgattctaacctgtattcagcggcaaattttgttcatcatctgcgaaacgccctggacgttctgcacagggaagtccctcgggtactggtgaacctggtagatttcttaaatccaaccatcatgaggcaggtatttcttggaaatcctgataagtgtcctgtgcaacaggctagcgtcctgtgcaattgtgtgctgacactgagggagaactctcaagagctggctcggctggaagccttttcccgcgcatatagaagtagcatgcgagaactggtgggctcgggtcgttatgatactcaagaggacttctctgtggtgctccagccctttttccagaacatacagctgcctgttctggcagatgggcttcctgatacctctttctttgcccctgattgcatacacccaaatcagaagttccactctcagctggcccgagccctgtggactaacatgctggagcctctgggttcaaaaactgaaacgctggacctacgcgctgagatgcccatcacttgcccgacgcaaaacgagcccttcctgaggactccaaggaacagtaattacacctacccaatcaaacctgccattgaaaattggggaagtgactttttgtgtacggagtggaaggcctccaactctgtgcccaccagtgtacaccagctgcggccagcagacattaaagtggtggcagccctcggagattccctgaccaccgctgtgggcgcacgccctaacaactcatctgatctgcccactagctggcgagggctgtcctggtctatcggcggagatggaaaccttgaaacgcacacgacgttacctaacattcttaaaaagttcaatccttacctgctaggcttcagcacatctacttgggagggcacagctgggctcaacgtcgccgctgagggggcaagggctcgagatatgccggctcaagcatgggatcttgttgaacgaatgaagaatagtccagacataaatcttgaaaaagactggaagctcgtcactcttttcatcggcgtgaatgatctgtgtcattactgcgaaaacccagaggctcatctcgctaccgagtatgtgcaacatatccagcaggccttagatattctgagtgaggaacttccaagggccttcgttaacgtggtcgaagtaatggagctagcatctctctaccaaggccagggtgggaagtgcgctatgctcgctgctcagaacaattgcacgtgcctgaggcatagccagagctcactggaaaagcaggagttgaaaaaggttaactggaacttgcagcacggcatctcctcattttcatattggcatcagtacactcagcgggaggattttgccgttgtggtgcagccttttttccagaacactctgaccccattgaatgagcgaggcgacaccgacctcaccttcttttctgaggactgttttcacttctctgaccggggtcatgctgagatggctattgcactgtggaataacatgctagagcctgtggggcgtaagaccacttccaacaatttcactcactcacgcgctaaactcaagtgtccatcccccgagagtccctacctgtataccctaaggaactcgaggcttcttccggaccaagccgaagaagcccctgaggtgctgtattgggctgtgccggtggccgctggcgtcggcctagtcgtaggcatcataggcaccgtggtgtggcggtgtcgtcgaggtggcaggcgtgaggaccctcccatgagcttacgcactgtggccctctag

SEQ ID NO: 234883 - DNA, 1272 bp, synthetic construct
  misc_feature 1..1272: note = Description of Artificial Sequence: Synthetic coding sequence
  source 1..1272: mol_type = other DNA
atgcccatcacctgccctacgcagaacgagcctttccttaggacgccgaggaactcaaactacacctatccaattaagcccgctatcgagaattggggaagtgatttcctctgcacagaatggaaagcaagcaattccgtgccgacatccgtgcaccagctgcgcccagctgatattaaggtggtcgccgcactgggtgatagcctcaccacagccgtgggcgctcggccaaataactctagcgacctgcccacaagctggcggggtctctcttggagcatcggcggtgatggcaatctggaaactcacacaactcttccaaatatacttaaaaaattcaatccctatctgctcggattttccactagcacatgggaaggcacagccggtctgaacgtagctgccgagggggcaagagcccgagatatgcctgcacaggcgtgggatctggtcgagagaatgaagaattctcctgatatcaatttggaaaaagattggaagctagtaacattattcatcggtgtgaatgacctgtgccactactgtgagaacccagaagcccacctcgctaccgagtatgtgcaacatatccagcaggccctggacattctatctgaagaactgcctagggcattcgtgaatgtggtagaggtaatggaacttgcctctctgtaccagggacagggcggaaagtgtgccatgctcgccgcacagaacaattgcacttgtctcaggcacagccagtcatccttagaaaagcaagagctcaaaaaagtcaactggaacttgcagcacgggatcagtagtttctcctactggcatcagtacactcagagagaggattttgctgtggtggtccaacccttctttcagaacaccctgactccactgaatgaacggggagacacggacctgacattcttttctgaggactgttttcacttctccgacagggggcatgctgaaatggcgatcgctctatggaacaacatgctggagccagtgggcaggaaaaccacttccaataatttcacacattcaagggctaaattgaagtgtcctagtccggaatcaccatacctctacaccctccggaatagtcgcctcctgccagaccaggccgaggaagctcccgaagtgctctattgggctgtgcctgtggctgccggtgtcgggctagtggtgggaattatcggtacagtcgtctggagatgccgaaggggcggtcgcagagaggatcccccaatgtcactgcggaccgtggcactctag

SEQ ID NO: 234884 - DNA, 3504 bp, synthetic construct
  misc_feature 1..3504: note = Description of Artificial Sequence: Synthetic coding sequence
  source 1..3504: mol_type = other DNA
atggcgggtgctcagcctggcgtgcacgcattacagctggagccacccacagtggtcgagacacttcgccgaggtagcaagtttatcaagtgggatgaagaaaaactgatgacagtagtctctggcccagaccctgtgaacacggtgtttctaaactttatggccgtccaagatgataccgctaaagtttggtcagaagaactgtttaaactggctatgaatatactagcccagaacgcctcccgcaatacatttctgagaaaagcttatacgaagctgaaattacaggtcaaccaagacggtcggatccccgtgaaaaacatactcaaaatgttttctgctgacaagaagcgagttgaaacagctttagagtcttgtgggctgaagttcaataggagcgagagtatccgcccagacgaattcagtctggagatttttgagagattcttaaacaaactctgcttacggccagatatcgataaaatcttactggaaattggtgctaagggaaagccctacttaactctggaacaactcatggactttataaatcagaaacagcgggaccctcgcctgaacgaagtcctttatccccctcttcgaccgagtcaggcacggctgctcatcgagaagtacgaaccgaaccaacagtttttggagcgtgatcagatgagcatggagggctttagcagatatctcggcggtgaggaaaacggcatcctgccccttgaagccctggatttgtctacagatatgacccaacctctgtctgcatattttatcaactcttctcacaacacgtaccttacggcaggtcaactggctgggacttcttccgtggagatgtatcgacaagccttactgtggggttgtcggtgtgttgagctggacgtctggaaaggacgtccgcctgaagaagaaccgttcattacgcacggtttcacaatgaccaccgaggtcccacttagggacgtgctggaggctatcgcggagacagcatttaaaaccagtccttaccctgtgattctatcctttgagaaccacgtggactcagcaaagcagcaggctaagatggcagagtactgtcgttctattttcggagacgcattactaattgagcccctggataagtaccccttggctcctggagttccactgccttccccccaagatctgatgggacggatactggtcaagaataagaagcgccatcgtccatccgctggagggcctgattctgccggacggaaacggcctttggaacaaagcaactcggcgttgtctgaaagttctgccgctaccgaaccgtcaagtccccagctaggctcaccaagttccgatagttgcccaggtctgtcaaatggagaagaagtgggtcttgagaaacctagtctggagccacaaaaaagtctaggcgacgaaggactgaaccgtggcccttacgttctgggcccagcagatagagaagatgaagaagaggacgaggaagaggaagagcaaactgatccaaaaaaaccaacgaccgatgaaggaaccgccagtagcgaggtgaacgccactgaggaaatgagtacgctcgtgaattacattgagccagtcaagtttaaatccttcgaagctgcacgcaagcgcaataagtgttttgagatgagctcttttgtcgagacgaaggcgatggaacaactgacaaagtctcctatggaattcgtcgagtacaataagcagcagctatccagaatttatcccaaaggcacaagagttgattccagcaactatatgccccagctgttttggaacgtcgggtgccagttggtagctcttaactttcaaactcttgacgtggcgatgcagttgaacgcaggagtgttcgagtataatggcagatcagggtacctgctgaagccggaatttatgcgacgtccggacaagtccttcgaccccttcacagaggtgatcgtcgacggcattgtggctaacgctctgagagtgaaagtgatcagtggccagttcctgtcagacagaaaagtcggcatctacgtagaggtcgacatgttcgggcttccagttgatactcggaggaagtatcgtacccgcacttcacaggggaactccttcaatccggtttgggatgaagagccgtttgacttccccaaggtcgtgctccctactcttgcgagcctgaggattgccgcttttgaagaagggggtaagtttgtggggcatcgaatcctccccgttagtgctattaggtcaggttaccattacgtctgcctccgcaatgaggcaaaccagcctctgtgcctgcctgcccttctgatctacaccgaagccagtgattacatacctgacgatcatcaggattatgcagaggcgttaatcaatcccattaagcatgttagcctgatggaccagagagcacgtcaactggcggctctgattggtgaatccgaggctcaggcagggcaggaaacgtgtcaggacacccagtctcagcagctagggagtcaacctagcagcaaccccacccctagccctctcgacgcctctccccgtcggccacccggacctacgacctcacctgcttcaacaagcttgagttccccaggccagcgagacgacctcattgcatccatcttaagcgaagttgctcctacccccttagacgaactacgtggccacaaggcccttgttaaactgaggagtcgacaggagcgggacctgcgcgagctgcgtaaaaaacatcagcggaaggcagtgactttgacaaggcggctgttggacggactcgctcaggctcaagccgaaggtcggtgtagacttcgcccaggagcgctaggaggagccgctgatgttgaggataccaaggaaggcgaagatgaagccaaaaggtatcaagaatttcaaaatcggcaggtgcagtccctgttagagctccgcgaggcccaggtggatgccgaggctcagcggaggctcgaacacctgcggcaggccttgcagaggctgagagaggtggttcttgatgcaaatacaacgcagtttaaacgcctgaaagaaatgaacgaacgagagaagaaagagctgcagaagatactcgaccgaaagcggcacaattccatatcggaggctaagatgagggacaagcacaaaaaggaggctgagctgactgaaataaacaggaggcacattacagagtccgtcaactcaattcgaagattggaggaagctcagaagcagcgccatgatcgactcgtcgcaggtcaacagcaggtgctgcagcaattggccgaggaagagccaaagctgctggcccagctggcccaggaatgccaagagcagcgagcaaggctaccccaggagattcggaggtcgctcctgggagaaatgccagaggggttaggagatggacctttggtcgcatgtgctagtaatggacatgctcccggatcgagtggccacctcagcggggcagacagcgagagccaggaagagaacactcagttatag

SEQ ID NO: 234885 - DNA, 3651 bp, synthetic construct
  misc_feature 1..3651: note = Description of Artificial Sequence: Synthetic coding sequence
  source 1..3651: mol_type = other DNA
atggcaggggcacagcccggagtgcacgcccttcagttgaagccagtgtgtgtgagcgattctctcaaaaaggggacaaaattcgtcaagtgggacgacgattccacgattgtgacccctatcatcctgcgcaccgatcctcagggcttttttttctactggacagatcagaacaaggagacagagcttttggatctctcactcgtgaaagatgctaggtgcggaagacatgccaaagctcccaaagatcccaagctgcgtgagctactcgacgtcggcaatattggacgcctcgaacagcgaatgatcaccgtggtgtacggtcccgatctggttaacatttcccacttaaatctcgtggcctttcaggaagaagtggcaaaagaatggactaatgaagttttctccctggccacaaacctcctggcccagaacatgtccagggatgcattcttagagaaagcatatacaaaactgaagctacaggtgacgcccgagggacgcatcccccttaaaaatatttaccgcctgttttcggctgatcgcaagagagtcgagaccgctttggaagcttgcagtctgccatctagccgcaatgactccattcctcaggaagacttcacaccagaagtctatagagtattcctgaacaacctctgtccacggcctgagatagacaacattttcagtgagtttggtgccaagagcaagccctacctgaccgttgatcaaatgatggacttcatcaacctcaaacagcgcgacccgcgactgaacgaaattctgtatcctcccctgaagcaggaacaagtgcaggttctaatcgagaagtacgaacccaataactctctcgccagaaaggggcagatctcagtcgacgggtttatgaggtaccttagcggtgaggagaatggagtcgtgtcaccggaaaagttggacctgaacgaagacatgtctcagccactcagccactacttcatcaattccagtcacaatacctacttgacggccggacagctggcaggcaatagcagcgtagagatgtatcgccaggtgctgctttcaggttgccgttgcgtcgaattggattgttggaaggggaggacagctgaggaggagcccgtgattacgcacggttttaccatgactaccgagatttcgtttaaagaggtcattgaggccatcgcagagtgcgctttcaagacatccccatttccaatactcttgtcatttgagaaccacgtggacagccccaaacagcaggcaaaaatggccgaatattgccgcctgatttttggggacgctctgctcatggagcccctcgagaagtatccacttgaaagcggggttccacttccctcccccatggacttaatgtataaaatcctggtaaaaaataagaaaaaaagccacaagtcaagcgaaggctccgggaaaaagaaacttagcgagcaggccagtaatacctactcagactcatcttccatgttcgaacccagctcacccggtgccggtgaagcggatactgagtctgatgacgacgacgatgatgatgactgtaaaaagagttcaatggacgagggaactgcaggaagtgaggccatggctaccgaggagatgtccaacctggtgaactacatccagccagttaaattcgagtctttcgagattagcaagaagcgcaacaagtcctttgagatgagctcgttcgtcgaaacaaaggggttggaacagttgacgaaaagcccagtggaattcgtggaatacaataaaatgcagctttcacgtatttaccctaaaggcaccagagtggactcatcaaactatatgcctcaactgttctggaatgctgggtgtcagatggtcgcgctgaactttcagactatggatcttgctatgcaaattaacatgggcatgtacgagtacaacggaaagagcggttatcggttaaaacccgagtttatgagacggcctgacaaacattttgatccttttacagaaggaatcgtggacgggatcgtggccaataccctgagcgttaaaataattagtggacagttcctgtcggataaaaaggtcggaacttacgtagaggtcgacatgttcggcttgcccgtcgacaccaggagaaaagccttcaagacaaaaaccagtcagggaaacgccgtgaatcccgtttgggaggaggagcctatcgtatttaagaaagtggtactgcctacactcgcctgtctgagaatcgcagtttacgaagaggggggtaagttcatcggccaccgcatactgcccgtacaagccattcggccaggataccactacatttgcttgcgtaacgagaggaatcagccgctgaccctccctgctgtattcgtttacatcgaagtcaaggattatgtccccgatacctacgccgacgtgattgaagccctcagtaatccgattcgatacgtaaatctgatggagcaaagagcgaaacaactggcagcactgacattggaagatgaggaagaggtgaagaaagaggctgaccccggtgagacaccctccgaagccccttctgaagctcggacaacaccggcagagaatggggttaaccacaccaccacgctgacacccaaacccccttctcaggcacttcactctcagcccgctcctggcagcgttaaggcccctgctaagaccgaggatctaatccagtccgttctcacagaggtggaggcccagacaatcgaagaactaaaacaacagaagtccttcgtcaaactgcagaaaaaacactataaggaaatgaaagacctggtcaagcgacatcataaaaagacaaccgaccttatcaaggagcataccaccaagtacaacgagatacagaacgactacctgcgtagaagagccgctctcgaaaagtcagcaaagaaggactcaaagaagaagtcggaaccttccagccccgatcatggtagttctaccattgagcaggatctggcagcattggacgcagaaatgacccagaaactgatagatctgaaagacaagcagcagcagcagctgctgaacctccgccaggaacagtattactcggagaaatatcaaaagcgcgagcacattaagctcctcatacagaagcttacagatgttgcagaagagtgtcagaacaaccaactgaagaagttaaaggagatctgcgagaaggagaaaaaagagttaaagaaaaagatggataaaaaacgccaagaaaagattaccgaggcgaagagtaaggacaagtcccagatggaagaggaaaaaaccgaaatgattaggtcatatatccaggaggtggtgcagtatatcaagagactcgaagaagcccagtctaagagacaggaaaaactggtggaaaagcataaggagatccgccagcagattttagatgagaagcccaagttgcaggtggagcttgaacaggagtatcaggataagttcaaaaggcttccactcgaaattctcgagttcgtgcaggaagcaatgaagggaaaaataagtgaagatagcaatcacggctccgcccctctatctttgagctcagacccgggaaaggttaatcacaagacgccgagtagtgaggagttgggcggtgatatccctggcaaggagtttgacactcccctttag

SEQ ID NO: 234886 - DNA, 672 bp, synthetic construct
  misc_feature 1..672: note = Description of Artificial Sequence: Synthetic coding sequence
  source 1..672: mol_type = other DNA
atgcggcgaccagataaacactttgacccctttactgagggcatcgtcgatgggattgtggccaacaccctatccgtgaaaatcatctcaggtcagtttttatccgacaagaaagtggggacatatgtagaggtggatatgtttggcctgcccgttgatacccgtaggaaggctttcaagaccaaaacgtcccaaggaaacgcagttaaccccgtatgggaggaggagccaatagtctttaaaaaagttgtgttgccgaccttggcgtgtcttcggatcgccgtctacgaggaagggggaaagtttatcggccatcgcattctgcccgtgcaagctatacggccaggctaccactatatttgcctccgtaacgaacgcaatcagccgcttacgttgccagctgtattcgtctacatcgaggtgaaagactacgtgccagacacatatgcagatgtgattgaagctctctcaaatcctatccgctacgtgaatctcatggaacagagggccaagcaactagcggcactaaccctggaggatgaggaggaggtaaagaaagaggggggatttctgcatgacgaaattatgaggcttactcgcaatactttagagaaacttatggcccttcccctgacccatgtggtgcctattcaatcgaagatgctgtcttag

SEQ ID NO: 234887 - DNA, 3522 bp, synthetic construct
  misc_feature 1..3522: note = Description of Artificial Sequence: Synthetic coding sequence
  source 1..3522: mol_type = other DNA
atggccggagctcagccaggggtacatgccctgcagttaaagcctgtttgcgtgagcgattctttgaagaaggggaccaagtttgtgaaatgggatgatgacagcaccatcgtgacacctatcattctgagaacggatcctcagggatttttcttttactggacagaccagaacaaggaaaccgaacttctggatctttcgctggtgaaagatgcccgatgcggaaggcatgccaaggctcccaaggatcctaaattgcgcgagctcttagacgtcggcaacatcgggaggttagagcagaggatgatcactgtggtttatggtcccgacctggttaacattagccacctgaatctggtcgcttttcaggaggaagttgcaaaggaatggaccaacgaagtgttttccctcgccaccaacctgctggctcaaaacatgagcagagatgcttttctggaaaaggcctacactaaactcaagctgcaagtaactcctgagggaagaattcccctgaaaaacatttatcgactgttttctgccgaccggaaacgggttgaaactgctttggaagcctgttcactgccctcatcaagaaatgattctatcccacaggaagatttcaccccggaagtctatcgcgtgtttcttaacaatctgtgtcctcggcctgagatcgacaatattttcagtgagtttggcgctaagtccaagccctacctgacagtagatcagatgatggacttcattaatcttaaacagcgggatcccagactgaatgagatcctgtatccacccctgaaacaggaacaggtccaagttctgattgaaaagtatgagccaaataatagcctggccagaaagggccagatctctgtagatggttttatgagatacctatcaggggaggagaacggggtcgtctcaccagaaaagctggatttaaatgaggacatgagccaaccattatctcactattttatcaattccagtcataacacttatctgactgcgggtcagttagccggaaactcttctgtggagatgtatagacaagtcctcctgtcagggtgtcggtgtgtggaactggactgttggaagggaaggaccgccgaggaggagcccgtgatcacacacggcttcacaatgaccaccgagatcagcttcaaagaggtgatcgaagctattgctgaatgcgcttttaagactagcccgtttcccatcttgctcagcttcgagaaccatgtggacagtccgaagcagcaggcaaagatggctgagtactgtagactcatcttcggcgacgcacttttgatggaaccactcgaaaagtacccacttgaaagcggggtgcctctcccctctcctatggatttaatgtacaagatactcgtgaagaacaagaagaaatcccataagagcagtgagggcagcggaaagaagaaactgtcagagcaggcaagcaatacatactcagactcttcctctatgttcgaaccttcatcaccgggtgccggagaggccgacactgaatcagacgacgatgacgatgatgacgattgcaagaaatcaagtatggacgaaggcaccgctggatctgaggccatggcaacagaggaaatgagtaacctggtgaattatattcagcccgtgaaatttgaatcctttgagatcagtaagaaacgtaataaatctttcgagatgtcaagcttcgtggaaactaagggactcgaacagctaaccaaaagccctgtggagttcgtcgagtataataagatgcagctgagccgtatctaccccaaaggcactagggtggacagttccaattacatgccacaacttttttggaatgctgggtgtcagatggtggcccttaatttccagacgatggacctagctatgcaaatcaatatgggtatgtatgagtacaacggcaagtcagggtaccgattaaagccggagttcatgcgcaggcccgacaaacatttcgatccgtttacagagggcattgtcgacggcattgttgctaatacccttagcgttaagattatttctgggcagttcctcagcgacaagaaggtgggtacctacgtagaagtggatatgtttgggctgccagtcgatacaaggaggaaggcctttaagacgaagacctctcaaggcaatgcggttaatcccgtttgggaagaagagcctattgtattcaagaaggtagtgctccccacgctggcttgcctgaggatcgccgtctacgaagagggtggcaaattcatcggccatagaatcctgcccgttcaggcgattcgacctggataccattacatctgtctccgaaacgagagaaatcagcccctcaccctgcccgcagttttcgtctatatcgaagtaaaagattacgttccagacacatacgcagatgtcatcgaggctctcagcaaccctatcagatacgtgaaccttatggagcagagggccaagcagctagcagccctcactttggaggacgaggaggaagtcaagaaagaggccgatcctggggagaccccttctgaagctccttcagaagccaggaccacacccgctgaaaacggagtgaaccacaccaccacacttactccaaagccacctagtcaggccctgcactctcagccagccccaggatccgtgaaggccccagccaagactgaggacttgatccaaagtgtgttaaccgaggttgaagcacagaccattgaggagctgaaacagcagaagtctttcgtcaaattacagaagaaacattacaaggagatgaaggacctggtgaaacgacaccataagaagacgacagacttaattaaggagcacactaccaaatataatgagatacagaatgattacctgagacgcagggcggctttggagaagtcggcaaagaaagactcgaagaagaagagcgagccctccagtcccgaccacggaagttccacaatagagcaggacctcgctgctctcgatgcagagatgactcaaaaattgatcgatttgaaggacaaacagcagcagcaactgttaaatctgcgccaagagcagtattactccgaaaaataccagaaaagggagcacattaaactcttgatccagaagctaactgacgtcgcagaggaatgccagaacaatcagcttaagaagctgaaagaaatctgcgagaaggaaaaaaaggagctgaaaaaaaagatggacaagaaaagacaggagaaaatcacagaggcaaagagtaaggacaaaagtcagatggaggaggaaaaaactgaaatgatccggtcttacattcaggaagtggtacagtacataaaacggctcgaggaagcccagtccaaacgccaggaaaagctggtggagaagcacaaggaaataaggcagcagatcttggatgagaaacccaaaggtgaaggtagtagtagttttctcagcgagacatgccatgaagatccatccgtctcacccaattttacgccgccaaatccgcaggctcttaagtggtag

SEQ ID NO: 234888 - DNA, 3522 bp, synthetic construct
  misc_feature 1..3522: note = Description of Artificial Sequence: Synthetic coding sequence
  source 1..3522: mol_type = other DNA
atggccggagcccagccgggtgtacatgcactccagttgaaaccagtgtgcgtctctgactctctgaaaaaaggaacgaaattcgtcaagtgggacgatgacagtactattgtgacgccaatcattctgagaaccgatccacagggtttcttcttctattggacggatcagaacaaggaaacagagctcctggatctgagtctcgtgaaagacgcacgctgcggacggcatgctaaggcccctaaggatccaaaactccgtgagctgctagacgtgggaaatattggaaggctcgagcagcgtatgattacggttgtgtacggcccagacttggtaaacatctcccatctcaatcttgtcgctttccaggaagaggtcgccaaagaatggacgaatgaggttttctcactggctactaatctattggcccagaacatgagccgggatgcatttctcgaaaaggcttatacaaagctcaaactccaggtgacccctgagggcagaatacccctcaaaaacatctatcggctgttttccgcagatagaaagcgggtggaaacagcccttgaggcttgttcactgccttccagtcgaaatgatagcatccctcaagaggacttcacccccgaggtgtatagggtgtttttaaacaatctgtgcccgaggcccgagattgataatattttttcagagtttggggctaagtccaagccctacttgacggttgaccagatgatggattttatcaacctgaagcagcgtgacccccgtctcaacgaaatcctttatcctccacttaagcaagagcaagttcaggtcctgattgaaaaatatgagccaaacaactctttggccagaaaaggccagatttcagtggatggctttatgcgctatctgtcaggcgaagagaacggagttgtgtctcctgaaaaactggacctcaatgaagatatgagccaacccttatcccattatttcatcaactcctcccacaacacatatctcaccgcaggtcagttagccggtaacagcagcgtggaaatgtataggcaagtacttttatctggctgtcgctgcgtggagctggattgctggaaagggaggaccgcagaggaggaacctgtgattacacatgggtttaccatgaccaccgagatcagcttcaaggaggttatcgaggcgatcgctgaatgcgccttcaaaaccagcccatttccgatcctcctgagctttgaaaaccatgtggactctcctaaacaacaggccaaaatggctgagtactgcagactaatcttcggcgatgcactgctgatggaaccacttgaaaaatatcctctcgaatctggcgttccattacctagccccatggacttgatgtataaaatcctggttaaaaacaagaaaaagagccacaaatcgtcagaaggttccggcaaaaagaagctcagcgaacaggctagtaacacctacagcgactccagttcaatgttcgaaccgtcctctcccggagcgggtgaagcagacacggagtccgacgacgatgatgatgatgatgattgcaagaaatcgtccatggatgagggaacagcaggttcagaggccatggccacagaggagatgtccaaccttgtaaattatatacagcctgtgaagttcgagagctttgagatcagtaagaagcgcaataaaagtttcgaaatgtcttccttcgttgaaactaagggcttagagcagctgaccaagtcacctgtggagttcgttgagtacaacaaaatgcagctctctcggatctatcctaaaggaacccgtgtcgattccagtaactatatgccccagctgttctggaacgccggttgccagatggtggcactcaacttccagacaatggatctggctatgcagattaacatgggtatgtatgaatacaacggcaaatctggctaccgcctgaagcccgaattcatgcgcaggccagacaagcacttcgatcccttcacagagggcatcgtggacgggattgtggctaacacactctcagtcaaaattatctctgggcaattcctgtccgataagaaggttggcacttacgttgaggtcgacatgtttgggcttcccgttgacacaagaagaaaagccttcaaaaccaagacctcccagggtaacgccgtgaacccggtctgggaggaggaaccaattgtcttcaaaaaggtcgtgttgcccaccctggcttgtctcagaatagccgtatatgaagaggggggaaaattcatcggtcatcggatactcccagtgcaggcaattaggccagggtaccattatatctgcctgcggaacgaacgcaaccaaccattgacattaccggcagtgttcgtgtacatcgaagtgaaagactacgtccctgatacttatgctgatgttatcgaagcgctttctaacccgatccggtacgtgaatttgatggagcagcgggcaaaacaactagccgctctgaccctcgaggacgaggaggaagtcaagaaagaagcagaccctggcgagaccccatcagaggccccttccgaggctcgtaccaccccagccgaaaatggcgtgaaccacacaaccactcttacccctaagccaccttcccaggcactgcattcacagccagctcccggatctgtgaaggcaccagcaaaaaccgaggatctgatacagagtgtgttgacagaggtcgaagcccagaccatcgaggaacttaagcagcagaagtcttttgtgaagcttcaaaagaaacactacaaagagatgaaggatcttgttaaacgtcatcacaaaaaaaccactgacctaatcaaggagcataccaccaagtacaacgagatccagaatgactacttgcggagaagggcggcactcgagaagagcgctaagaaggacagcaaaaaaaagagcgagccttcctccccggaccacgggtcgtcaaccatagaacaggacctggctgctctggatgcagaaatgacccaaaagctgatcgacctcaaagataaacagcagcagcaattgctcaacttaagacaggagcagtactattctgaaaaataccaaaaacgggagcatataaaactccttatccagaagctgactgacgtcgcagaggagtgccagaataatcaactgaaaaagctcaaagagatttgcgaaaaggagaaaaaggagttgaaaaagaaaatggataagaaaagacaagaaaagatcaccgaggccaaatctaaagacaagtctcaaatggaggaggaaaaaacagagatgattcgcagttacatccaagaggtcgtgcagtatattaagagattggaggaggcccagagcaaacgccaagagaagctggtagaaaagcataaggagattcgccagcagatcttggacgagaagccgaaaggtgaaggatcgagcagctttctgtcagagacttgtcatgaagatccatcagttagtcccaatttcacaccccctaaccctcaggccctgaagtggtag

SEQ ID NO: 234889 - DNA, 699 bp, synthetic construct
  misc_feature 1..699: note = Description of Artificial Sequence: Synthetic coding sequence
  source 1..699: mol_type = other DNA
gcaggagcccagccaggtgtgcacgcccttcagttgaagcctgtgtgcgttagcgattctcttaaaaaaggaaccaagttcgtcaagtgggacgacgatagtaccattgttacccctatcatcctccgcaccgacccccaagggttcttcttctattggaccgaccagaataaggaaactgagctacttgatctcagtctggtgaaagatgctagatgcgggaggcacgcgaaggcccctaaggatccgaaactccgggagctattagacgtgggcaatattgggaggctggagcagaggatgattaccgttgtatatggcccagatctggtaaacatctcacacctgaatttggtagcattccaggaagaggtggccaaagagtggactaacgaggtgttttctctcgcgactaatcttttagcacaaaatatgagtcgtgacgcgttcctcgagaaggcttatacaaagctaaaacttcaagtaaccccagaagggaggattcctctaaaaaatatctatagactgttcagtgccgataggaaacgtgtcgaaactgcactcgaggcatgtagcctgccatcttcgagagtggagaaggccaatgaggctgccaaatcagagcagtcctgcggtaaagcccctccaaaacactttcatctgcacttcattaaacagaataagatgttagaaccctag

SEQ ID NO: 234890 - DNA, 93 bp, synthetic construct
  misc_feature 1..93: note = Description of Artificial Sequence: Synthetic coding sequence
  source 1..93: mol_type = other DNA
gaggaagcgcagagcaagcgccaggaaaaactcgtcgaaaaacacaaagagatccggcagcagatactggacgaaaaacccaaagtcccgtag

SEQ ID NO: 234891 - DNA, 591 bp, synthetic construct
  misc_feature 1..591: note = Description of Artificial Sequence: Synthetic coding sequence
  source 1..591: mol_type = other DNA
attatctccggtcagttcctctctgataaaaaggtgggaacgtatgtcgaggtcgatatgttcggcctcccagtggacacccgtaggaaagcttttaaaacgaagacatcacaaggaaatgcggtcaaccctgtctgggaagaggagcccatcgtcttcaagaaggtggtccttcccactctggcttgcctacgcatcgcagtgtacgaggaaggcggaaagttcattggtcatcgcattctgcctgttcaggccatccggccaggttaccattacatatgcctcaggaatgagcggaatcagccgttaacgctgccagcagttttcgtttatatcgaggttaaagattacgttccagatacttacgctgatgtaatcgaagctttaagcaatcccattcgttatgtgaatctgatggaacagcgtgcaaaacagctggctgctctaacactggaggacgaggaagaagtgaagaaagaggggggattcctgcacgacgagatcatgcggttgacaagaaacaccctggagaaactcatggccctgcctcttacccatgtggtaccaattcagtccaagatgctttcatag

SEQ ID NO: 234892 - DNA, 3411 bp, synthetic construct
  misc_feature 1..3411: note = Description of Artificial Sequence: Synthetic coding sequence
  source 1..3411: mol_type = other DNA
acccaggatccaaaacttcgggagcttctagatgtgggaaacattggacgcctggagcagagaatgatcaccgttgtatacggacctgacttggtaaacatttcacaccttaacctcgttgccttccaggaagaagttgcaaaggagtggactaacgaggtattttccctcgccacaaacctgcttgcccagaacatgtcacgcgatgccttcctcgaaaaggcctataccaagctcaaactccaggtgactcctgagggcaggattcccctcaagaatatctaccgtctattttctgcggataggaaaagggtggaaaccgcactggaagcttgcagtctgcccagctccaggaacgactccatccctcaggaggactttacacccgaggtgtatagagtgtttctgaacaatctctgccccaggccagagattgacaacatcttttctgagtttggcgcaaagtcaaagccctatctgacagtcgatcagatgatggattttatcaatctcaaacaaagagatcctagactgaacgagattctgtatccgcctctaaagcaagagcaagtgcaagtgctgattgaaaaatatgagcccaacaactctctggccaggaaaggacagatctccgtggacgggttcatgagatatctatccggcgaggaaaatggtgtggtttctccagagaagctggacctgaatgaagatatgtcccaaccattaagccactactttatcaacagctcacataacacgtacttgacggccggacagttggctgggaactcatcagtggagatgtaccgccaagtgctattgagcggttgtcgctgcgtggagctggattgctggaagggtagaaccgctgaggaagagcctgtgattacacatggcttcaccatgaccacagaaatcagctttaaggaggtgattgaggcgatagccgagtgcgcattcaagacttcccccttcccgatcctattgagcttcgaaaaccacgtggattcacccaagcagcaagcgaagatggctgagtactgccgactgattttcggagatgctttactcatggagcctctggaaaagtatcctctggagtcaggggtgccattgccttcgcccatggacctgatgtacaaaatccttgtgaaaaacaagaaaaaatcccacaaatcatctgaaggcagcggtaagaagaaactgagtgaacaagcctctaacacatacagtgactcatcaagcatgtttgaacctagctctcccggagccggtgaggccgacacggaatcagacgacgacgatgacgatgatgactgtaagaaaagctcgatggatgaaggaaccgccggttcggaagcaatggcaacagaggagatgagcaatctggtgaattacatccagccggtgaagtttgagtcctttgaaatcagtaagaagcgcaacaagagcttcgagatgagcagcttcgtggagacaaagggcttagaacagctgaccaagtctccggtcgagtttgtggagtataacaagatgcagctgtcgcgcatatatccaaaaggcacccgcgtggactcctcaaattacatgccacagctattttggaacgcaggctgtcaaatggtcgctttgaatttccaaactatggatctcgccatgcagatcaatatggggatgtacgagtacaacggcaagagcggctatagattaaaaccggagtttatgcgtaggcctgacaagcatttcgatcctttcactgaggggattgttgatggaatagtggccaatacattgagtgtgaaaataattagtggacaattcctgtcggataagaaagtcggcacctacgtcgaggtcgatatgtttggcctgcctgttgataccaggcgcaaggctttcaaaaccaagaccagtcagggcaacgccgtcaatccggtgtgggaggaagagcctattgtctttaagaaggtggtgctgccaacactggcttgtctgcgcatcgccgtctatgaggagggaggcaaatttatcggacatcgcattcttcccgttcaggctatcaggccgggatatcattacatctgtctgcgaaacgaaagaaaccaacccctcacactccccgctgtgttcgtttatatcgaggtgaaggattatgtacccgatacctacgcagacgtgatagaagccctgtcgaaccccattcgatatgtcaatctcatggaacagcgcgctaagcaattagcagccctgaccctggaggatgaagaagaggtgaagaaagaagcagatccgggtgaaaccccatcagaagccccttctgaggcgaggaccacccccgctgagaacggggtgaaccacaccactactctcaccccaaagcctccatcacaagcactgcattcccagcccgctcctggttccgtgaaggctcctgctaaaacagaggatttgatccagtccgttcttacggaagtcgaagcccagactatagaagaactgaagcaacaaaaaagctttgtgaagctgcagaagaaacattacaaagaaatgaaggacctggtcaagagacaccacaaaaaaacaacggacctcattaaggagcatactacaaagtataatgagatccagaacgactatcttcgcagacgcgcagcgctcgagaagagcgccaagaaagattccaagaaaaagagcgaaccatcttcccctgatcacggctcttctacgattgaacaagacctggctgcgctagatgctgagatgacacagaagttaatcgacttaaaggataagcagcaacaacagcttcttaatttgcggcaagagcagtattattcagagaagtaccagaaacgggagcacatcaaactgctaatccagaagctgaccgatgtcgccgaggagtgtcaaaataaccagctcaagaaactgaaagagatctgcgagaaagagaagaaggaattgaaaaagaagatggataaaaagaggcaggaaaaaatcactgaagctaagtccaaggacaaatcccagatggaggaggagaagacagaaatgatcagatcttacatacaggaggtggttcagtatatcaaaaggctcgaagaggcgcaatccaagcggcaggaaaagctcgttgagaaacacaaggaaattaggcaacagattttagatgaaaaacctaagttgcaggttgagttagagcaggagtatcaggacaagtttaagagacttcctcttgaaatactagagtttgtgcaggaagctatgaaggggaaaatttcggaggattcaaaccatggatccgctccactctctctgtctagcgatcccggaaaagtgaaccacaaaacacccagctcggaggaactgggtggtgacatcccgggaaaagagttcgacactcccctctag

SEQ ID NO: 234893 - DNA, 3282 bp, synthetic construct
  misc_feature 1..3282: note = Description of Artificial Sequence: Synthetic coding sequence
  source 1..3282: mol_type = other DNA
acacaggaccctaagcttagagaattgctggatgtgggaaatataggacggttggagcagagaatgattacagttgtatatgggcctgatctcgtaaatatttctcacctcaacttagtcgcattccaggaagaggtggccaaagagtggacaaatgaggtgttctcattggccacaaatctcctggctcagaacatgtccagggatgcttttctagagaaggcctatactaaactgaaattgcaggtgactcccgagggcaggattcctttgaaaaatatctataggctgttcagcgccgacagaaagcgagtagagactgccctagaagcctgttcactgcccagctctcgtaacgactctattccacaggaggattttacccctgaagtgtaccgtgtgtttcttaataacctgtgtcctaggcccgagatcgacaatatcttctcagagttcggcgcaaagagcaagccgtatctgacagtcgaccagatgatggacttcatcaacctgaagcagagagatcccaggttgaatgaaatcctctacccgcctctgaagcaagaacaggtgcaagtcctgattgagaagtatgaaccaaataattcactggccaggaaaggccagatcagtgtggatggtttcatgaggtacctcagcggggaggaaaatggcgttgtgtcccctgagaaactggatttgaacgaggatatgtcccagcctctgtctcactattttattaactcctcgcataacacctaccttactgcagggcagttagccggaaactcctctgtagaaatgtatagacaagttctgctctccggttgcaggtgcgtggagctggattgttggaagggacgcacagccgaagaggagccagttataacccatgggtttactatgacaaccgaaatatctttcaaggaagtaatcgaagcaattgctgaatgtgctttcaaaacgagcccatttcccatcctgctctcttttgaaaatcacgtcgacagccctaaacagcaagccaagatggccgaatattgtaggttaatctttggcgacgcacttttgatggagccacttgagaagtatcccctggagtcaggcgtgccgttgccctctcccatggatctcatgtataaaatccttgtgaagaacaaaaagaagtcccataagagtagcgaaggaagcgggaagaagaaactctcggaacaggcctctaatacgtacagcgactcttcctccatgttcgagccaagttcacccggtgctggcgaagctgataccgagtccgacgacgatgacgatgatgacgattgtaagaaatcatcgatggacgaagggactgccggatctgaggcaatggccaccgaggaaatgtccaacctggtgaattatatacaaccggtaaagtttgagtccttcgagatctctaagaagaggaataaaagttttgaaatgtccagttttgtagagaccaaaggactagagcagctgactaagtctcctgtggaattcgtagaatacaataagatgcaacttagcagaatttatcccaagggaacgagggtggattcctctaactatatgccccagctcttctggaatgccggatgtcaaatggtcgccttaaattttcagaccatggacctggcaatgcagatcaatatgggcatgtacgagtacaacggaaagagcgggtaccgcctgaagcctgagtttatgagacggccagataagcattttgacccctttactgaggggattgtcgacggcatcgttgccaacacactgtctgtcaaaattatctccggtcaattcctgtccgataagaaggtggggacttatgtggaggtggatatgtttggcctgccggtcgacacaaggcggaaggcttttaagactaaaaccagtcaggggaacgctgtaaatcctgtttgggaggaagagccaattgtgtttaaaaaagtcgtgctgccaaccctggcctgtttacggattgcagtgtacgaggagggcggaaagtttattggccaccgcatcctacccgtccaagccattcggcctgggtatcactatatatgtcttcgaaacgagcgtaatcaaccgctgaccctccctgcagtatttgtgtacatcgaagtcaaggactatgtgcctgacacttatgctgacgtgatcgaagcactgagcaaccctatcaggtacgtgaatctaatggagcagcgcgctaaacaactagccgcattaacattggaggacgaggaagaggtcaagaaggaagcggaccctggtgaaactccgtccgaagctccttccgaagccagaacgacccccgctgagaatggggtaaaccacaccacaacactgacccctaaaccaccttcccaggccctgcacagtcagccagccccagggtccgtcaaggcacccgctaaaacagaggatctgatccaatccgtgctgacagaggtggaggcgcagaccatcgaggagctgaagcagcagaagagcttcgttaaactacaaaagaagcactataaggagatgaaggatttggtgaagcggcatcataagaaaactacggacctcatcaaggagcatactaccaagtacaatgagatccagaatgattatctgcgcagaagggcagccctagaaaaatctgctaaaaaagactctaagaagaagagcgagccttcctctcctgatcatggatcaagcaccattgagcaggacctcgccgcactggacgccgaaatgacccagaagctcatcgacttaaaggataagcagcagcaacagctgctcaatttacggcaagagcagtattattcagagaagtatcagaagcgggagcacatcaaactcctcattcagaaactcaccgacgtggcggaagaatgtcagaataaccagcttaaaaagctaaaggaaatttgcgagaaagagaaaaaggagctaaagaaaaagatggacaagaaacgacaggaaaagattacggaggcaaagtccaaggataaaagtcaaatggaagaagaaaagacagaaatgataaggtcctatatccaggaggttgtgcagtacattaagaggctggaagaggcacaatcaaagaggcaggagaagctggttgaaaaacataaggagattcgccaacagattcttgacgaaaagccgaagggtgaaggtagtagcagcttcttgtctgagacgtgtcacgaggacccctccgtcagtcccaacttcactccccctaatcctcaagccctgaagtggtag

SEQ ID NO: 234894 - DNA, 3558 bp, synthetic construct
  misc_feature 1..3558: note = Description of Artificial Sequence: Synthetic coding sequence
  source 1..3558: mol_type = other DNA
atgtctctactaaatcctgttctgctgccgccaaaggtgaaagcttacctatctcagggggaacgcttcattaaatgggatgacgagaccacggtcgccagcccggtaatcctgagggtggatcctaagggttactatttgtactggacatatcagagcaaagagatggaatttctggatattacaagtataagagatacccgattcggcaaattcgctaagatgccgaagtcccagaagctacgagacgtctttaacatggacttcccagataatagctttctgttgaagacattgacagtggtgtccggacccgacatggttgacctaacgttccacaactttgtgtcttataaggagaatgtaggcaaagcttgggcagaggatgtgttggcccttgtgaagcaccctctaaccgccaacgctagcaggtccacctttctggacaagattttggtgaagctgaaaatgcagctcaactcggaggggaagatccccgtgaagaatttttttcaaatgttccccgcagacagaaaacgggttgaggcagccctaagtgcgtgtcacctgccaaaaggcaaaaatgacgcgataaacccggaggactttccggagcctgtgtataaaagctttctcatgtctctatgcccaagaccagagatcgacgaaatctttacctcttatcacgctaaggcaaaaccatatatgaccaaggaacatttgacgaaatttattaatcagaagcagagggattccagactgaattcccttctgttcccacccgctagaccagaccaggtccagggcctgattgacaaatacgagccatccggtattaatgcacaacgcggacaactgtcccccgaaggcatggtatggtttctttgcggcccagagaacagcgtgcttgctcaggacaaactcctcctccatcacgacatgacccagcctctaaatcactattttataaattcttcacacaacacatacttgaccgcgggtcagtttagcggactgtcctctgcagagatgtaccgacaagtgctcctttccgggtgcaggtgtgtggagctcgattgctggaaaggcaaacccccagacgaagagccaatcatcactcacggattcaccatgactactgacattttctttaaagaggcaatcgaagcgattgccgagagcgcatttaagacatccccttacccaatcattctcagcttcgaaaaccacgtagactcccccaggcagcaggcgaagatggccgagtactgtcgcacgatcttcggcgacatgctgctgactgagcctctggagaagttccccctcaagccgggtgttccattgcctagtcccgaagaccttagaggcaaaatcctcattaaaaacaagaaaaaccagtttagcggcccaaccagttcttcaaaagacacaggcggagaagcagaaggctctagcccccctagcgccccagcaggagaaggaactgtgtgggcaggagaagaggggaccgagctggaggaggaggaggttgaggaagaggaggaagaggagtcaggcaatctggatgaagaggaaattaagaaaatgcagtccgacgagggcacagcgggactggaggtgaccgcctatgaggagatgtccagccttgtgaattacattcagccgaccaagtttgtgagtttcgaatttagtgcacaaaaaaacagaagctacgtcatttcttcatttactgagttaaaggcctacgatctgcttagcaaagccagcgtgcaattcgtagattacaacaaacggcaaatgagtcggatatatccaaaagggacgaggatggactcgtcaaattacatgccacagatgttctggaacgcaggttgtcagatggtggccctgaacttccaaacaatggatctgcccatgcagcagaacatggcagtattcgagttcaatgggcaatctggctatctcctcaagcacgagttcatgcgcaggcctgacaaacagttcaaccctttctcagtggatagaatcgacgttgtggtggcaacgactctatcaatcaccgtcatctctggccagttcctttctgagaggtccgtgaggacatatgtagaggtggagctgttcggtctcccgggtgacccaaagagacggtataggacaaagctcagccctagcactaattccatcaaccctgtatggaaagaggagccgtttgtcttcgaaaagatcctgatgcctgagttagcgagccttcgcgtcgctgtgatggaggaaggcaacaagtttctggggcaccggatcatacctattaacgccctgaactcagggtatcatcatctgtgtctacactcagagagcaacatgccgctgaccatgcccgcactgtttatttttctggagatgaaagattacatcccgggtgcgtgggccgacctgacagtcgctctggccaatcctataaagtttttctccgcgcacgatacgaagagtgtcaagttaaaggaagcgatggggggtcttcctgaaaagccttttcccctggcatcacctgtggcctcacaagtgaacggcgctttagcccctactagcaacggcagccccgcagctcgcgctggcgctcgggaggaagccatgaaggaggcagcggagccacgaacagcaagcctcgaggaactgagggaactaaagggagtcgtaaaactacagcgtcggcatgaaaaagaattgagggagcttgagcggagaggcgctcggaggtgggaggagctactccagaggggcgctgcacagctggcggagttagggccacctggggtcggcggtgtgggcgcttgtaagttaggtccagggaagggctctagaaagaagagatctctgcctcgggaggaaagcgcaggagcagcgcctggggaggggccagagggcgtcgatgggagggtgcgagaattaaaagacaggcttgaactggagctgctccggcaaggggaggaacaatacgaatgtgtgttgaagagaaaggagcagcacgtcgccgaacagatctccaagatgatggagcttgcaagggaaaaacaggccgcagaactgaaggccctgaaagaaacatcagagaacgatacgaaggaaatgaagaagaagcttgagaccaaacggctcgaacggatacagggtatgacaaaggtaacgacagacaaaatggcccaggaaagactgaaacgcgagataaacaactcccacattcaggaagtcgtacaggttataaagcaaatgaccgagaacctcgaacgacatcaggagaagctggaggagaagcaggcagcctgcctggaacaaataagagagatggagaagcagttccagaaggaggccctcgctgagtatgaggctagaatgaagggactggaagccgaagtgaaagaaagtgtgcgcgcatgtctgcgaacatgtttcccaagcgaagccaaggacaagccagagcgggcttgcgagtgtcctcccgaattatgcgaacaagatccgctgattgcgaaggcagacgcacaggagtccaggctgtag

SEQ ID NO: 234895 - DNA, 3546 bp, synthetic construct
  misc_feature 1..3546: note = Description of Artificial Sequence: Synthetic coding sequence
  source 1..3546: mol_type = other DNA
atgagcctcctcaaccctgtgttacttccacccaaggtgaaagcttatttgtctcagggggagagatttatcaagtgggacgatgagactacagtagcctcccctgtgatcctccgcgtcgaccctaaaggctattacctctattggacgtaccagtcaaaagaaatggagtttcttgatataactagcatcagagacactcgattcgggaagtttgcaaagatgccaaagtctcaaaaactgcgggatgtgttcaatatggactttccagataactcttttttgctcaagacacttaccgtagttagcggtcccgatatggtcgatctgacatttcataatttcgtgagctacaaagagaatgtcgggaaagcttgggctgaagatgttctggcccttgttaagcacccactcacggcaaatgcttctagaagcacatttttggacaaaatattggtgaagttgaaaatgcagcttaattctgaagggaaaatcccagtgaaaaatttcttccagatgtttcctgcagaccgcaagcgggtggaagccgcattgtctgcatgtcacctgcccaaaggaaaaaacgacgctattaatcccgaggacttcccggagcccgtctataagagcttcctcatgagcttgtgcccacggccagagattgacgagatctttacaagctatcacgctaaagccaagccctatatgacaaaagaacatctgacgaagttcattaaccagaagcagcgggattcacgtctaaactcccttctgttccctccagcgaggcccgaccaagtccagggcctgattgataaatacgaaccttctggtataaatgctcagcgcggacagttatcacccgaggggatggtctggttcctgtgcggaccagaaaacagcgtcctcgctcaggacaagctgttgctgcaccacgatatgacgcagccgctgaatcactacttcataaactctagtcacaatacttacctcaccgccggtcagttttccggcctgtcgagcgccgaaatgtatcggcaagtgctactgtctggctgtcgatgcgtagaactggattgctggaaaggtaagccacccgacgaagaaccaattattacccacggcttcacaatgactaccgacatttttttcaaggaggctatagaggccatcgcagagtcagcctttaagacatccccgtatccaatcatcctatccttcgaaaaccacgtggattctccaaggcagcaagccaagatggccgagtattgtaggactatttttggagatatgcttctcactgagcccctggaaaaattcccccttaagccaggtgtgcctctgcctagcccggaggacctgagaggcaaaatcctgatcaagaataagaagaaccaatttagcggtccaaccagctcctcaaaagatacaggtggcgaggccgaggggagctctcccccatctgccccagcggtatgggccggtgaggaaggaaccgagctcgaagaagaagaggtggaggaggaggaggaagaggaaagcggcaatctggatgaagaggaaattaagaaaatgcagagtgacgaaggcaccgccggtctcgaggtgacagcttatgaagagatgtcctccctcgtgaactacatacaacccacaaaattcgtctcatttgaattctccgcccagaagaacagatcctacgtgatctcaagttttacagaacttaaagcctacgaccttttatccaaggcctcggtgcagttcgtagattacaataagcggcagatgagccggatttatccaaaaggaacaagaatggattcttccaattacatgccccaaatgttttggaacgccggttgtcagatggtagcacttaattttcagacaatggaccttcctatgcagcagaatatggcggtgttcgaattcaatgggcagagcggatacttgttaaagcacgaattcatgcggaggccagataagcagtttaacccattcagcgtagacagaatagacgtagtcgttgctactaccttgtccatcaccgtaatctctggacagttcttgagtgaacgttccgttcgaacatatgtagaggtggaactgtttgggttgccgggtgatccaaaacgaagatataggacaaagctgtccccttctaccaatagtattaaccccgtgtggaaagaggagcctttcgtcttcgagaagattttaatgccggaactcgctagcctgagagttgccgttatggaggagggcaataagttcttgggacaccggatcattccaattaacgccctgaacagcggataccaccatctgtgtctacattcagagtctaacatgccactgaccatgcccgcactgtttatcttcctcgaaatgaaggattatatacctggggcttgggccgacctgactgtggctcttgcaaatcccatcaaattcttctccgcgcacgatactaaatccgtgaagctgaaggaggccatgggaggattgccagaaaagcctttcccactagccagcccagtagcttctcaagttaacggagcacttgctcctacatctaacgggagccccgctgctcgggcaggcgctagggaggaagcgatgaaggaagccgcagagcccagaaccgcatctctcgaagaactgagagagttaaaaggggtggtgaaactccaaagacgccacgagaaagaacttcgggaactggaaaggagaggggctagacgttgggaggagctcctacagagaggtgcggctcagctcgctgaattgggtccacccggagtgggaggtgtaggcgcttgtaagctagggccaggtaaagggtcccgaaagaagcgatctctccccagagaagagagtgccggagcggctcccggtgagggccctgaaggggtcgacggtagagtgcgcgaactgaaggatcgtcttgagcttgagctcctgaggcagggtgaggagcagtacgaatgtgtgctgaagagaaaagagcagcacgtggcggagcagataagcaaaatgatggaacttgctcgagaaaagcaagctgccgagttaaaagccctgaaagaaacgtctgagaatgacaccaaggagatgaagaaaaaactggagaccaagcgcctggaacggatccagggaatgactaaagttaccaccgacaaaatggctcaagagcggctgaagcgcgagataaacaatagccacattcaggaggtcgtgcaggttattaagcagatgaccgaaaatttagaacgccaccaggagaagctggaagagaagcaggccgcttgtctggaacaaatcagggagatggagaagcagttccagaaggaggcattggctgagtacgaggctcgtatgaagggacttgaggcagaagtgaaagagtctgtcagagcctgccttaggacttgcttccccagtgaggccaaggataagcctgagcgcgcttgtgagtgccccccagagctgtgcgagcaggaccccctgatagcaaaagccgatgcacaagaatcacggttgtag

SEQ ID NO: 234896 - DNA, 3705 bp, synthetic construct
  misc_feature 1..3705: note = Description of Artificial Sequence: Synthetic coding sequence
  source 1..3705: mol_type = other DNA
atggccggagctcagccaggtgtccatgctctccaactggaaccccctaccgttgtagagaccctgagaaggggatccaagttcatcaagtgggatgaggagacctcgtcgcgcaatcttgtgacattacgtgtcgacccaaacggtttcttcctgtattggacgggaccgaacatggaggttgataccctggatatcagttccatccgagacactcggacaggcaggtacgcaaggctacctaaagaccctaagatccgggaggtgctaggcttcggcggaccagatgcacgacttgaggagaagctcatgacagtcgtgtccggccctgatcctgtgaatactgtgtttttaaactttatggcggtgcaggatgacactgccaaggtgtggagcgaggagctattcaagttggctatgaacattctggcccaaaatgcttccagaaacacatttctgcggaaagcttacacaaaactgaagctacaggtcaatcaagacggcagaatccccgtgaagaatattttgaaaatgttcagcgcagataagaaacgagtggagacagccctcgaaagctgcgggctcaaattcaatagaagcgagagcattagaccagacgaattctccttggaaatttttgaacgcttcctgaacaaattatgcttacggcctgacatcgataagatcttactcgagattggtgccaagggtaagccctatctcactctcgaacagttgatggattttatcaaccagaagcaacgcgatcccagactcaacgaagtgctgtaccctcctctgcgcccttctcaggcacggctactcatcgagaaatatgaacctaaccaacagttccttgagagggaccagatgtcgatggagggtttttcccggtatttggggggagaggagaatggaattctgcctctcgaggcactggatctctctactgacatgacccagccgctatcagcttacttcataaattctagtcataatacatacttgacggccggacagctggccggaaccagcagcgttgaaatgtaccgacaagcgctgctctgggggtgcagatgcgttgaactagatgtgtggaagggtagacctccggaagaagagccttttatcactcacgggtttaccatgacgacagaggtcccgctgcgtgatgtgctggaggcaattgcagaaactgcctttaaaacctctccctatcccgttattctctccttcgagaaccacgtggacagcgcaaaacagcaggcaaagatggcggaatactgcagatccatttttggtgatgcacttcttatagaaccattggataaatatcccctggcaccaggggtccccctgccctcgccacaggacctcatgggaaggatcctggttaaaaacaaaaagcgacatcggccatctgctgggggtcccgactcagccggtaggaagagaccacttgagcaaagcaatagcgcgctttcggaaagctcagcggctacggagccaagttcccctcaactgggttctccaagctcagatagctgtccaggactgagtaatggggaggaagttgggctggagaaaccgagtttggagccccagaagagcttgggtgacgagggattaaacagaggaccatacgtcctaggacctgctgatcgcgaagatgaggaggaggatgaggaggaagaagagcagaccgaccctaaaaaacccaccaccgatgagggtacagctagctctgaagttaacgctaccgaagagatgagcaccctggtgaactatatagagcccgtaaagttcaagtccttcgaagccgctcgcaagcgcaataagtgttttgaaatgagctccttcgtggagactaaggccatggaacagttgactaagtctccgatggagtttgtggagtataataaacagcagctgtcccgaatctacccaaagggaacaagagtagactcatcgaattatatgccgcaactgttctggaacgtgggctgtcagttagtggcactgaacttccagacactggacgtggcgatgcagcttaacgccggagtcttcgaatataatgggaggtcaggctatctgctgaaacccgaatttatgcgcaggccagacaagagctttgatcccttcactgaggtcatagtggatggcatcgtagccaacgcgctccgggtgaaagtgataagtggccaattcctgtctgatcgcaaggtaggaatctacgttgaggtggacatgttcgggctgcccgtcgacaccaggcgcaaatatcggactcggacatcccaaggtaacagctttaacccagtctgggacgaagagcccttcgatttccccaaagtggtgctgcctactctcgctagcctaaggatagcagcttttgaagagggtggtaagtttgtgggccatagaatcctgcccgtcagcgctatccggagcggctatcactacgtctgtttaagaaacgaggcgaatcagcccctgtgcctgccagcactcctcatctataccgaagctagcgattacatccccgacgaccaccaggattatgccgaagccctaatcaatcccattaagcacgtgtctttgatggatcagcgagcaaggcagctcgccgctttgatcggagagtccgaagcacaagcgggacaggagacctgccaagacactcaatcccagcagctcggcagccagccgagctctaatcccacccccagtcctctggacgcaagtccacgcagacctcctggtccaactacgagccccgcatctacgagcctgtcaagtcccggacagagggacgatcttatcgcttcaatactctctgaagtcgccccaacaccacttgatgagctccgcggtcacaaggcgctcgtgaaactccggagtcggcaagaacgggatctgagggaactgaggaagaagcaccagaggaaggctgtgaccctcacaagaagactgcttgacggcctagcacaagctcaggctgagggtagatgtcggctgcgacctggcgctctcgggggagcagccgatgtcgaggatactaaagaaggagaagacgaagccaagaggtaccaggaatttcagaacagacaggtccagtcgcttctcgagctccgtgaggcccaggtggacgcagaggctcaaaggagactggagcatcttaggcaagcattgcagcggctcagggaagttgtgctcgatgctaacaccacccagtttaaaagactgaaggaaatgaacgaaagagaaaagaaagaactgcagaagattctcgatcgcaagaggcacaattcaattagcgaggccaagatgagggacaaacacaaaaaagaagctgagttaaccgagatcaataggagacatatcacagagagtgtcaactctatccgccgactcgaggaggcccagaaacagcgccacgacagactagttgcaggccagcaacaggtgctccaacagctcgccgaagaggagccaaaactgctggcacagttagcccaggagtgccaggagcagcgggctcgactgccacaggagattcggaggagccttctgggcgaaatgccagaaggccttggcgatggaccactcgttgcgtgcgcctctaatgggcatgctcccggatcgtccggccatctttccggagccgacagcgagagccaagaggaaaatacccaattatag

SEQ ID NO: 234897 - DNA, 3705 bp, synthetic construct
  misc_feature 1..3705: note = Description of Artificial Sequence: Synthetic coding sequence
  source 1..3705: mol_type = other DNA
atggccggagctcagccgggtgttcacgccctgcagcttgaaccaccgactgtcgttgagacactccggagaggcagtaagttcatcaagtgggacgaggaaacctcatcgaggaatttagtcacccttagggtggatcccaatggatttttcttgtattggacgggtcccaatatggaagtcgacacactcgacataagctccattcgagacacgcgcaccggccgttatgcacggcttcccaaggacccaaaaatcagggaagtgctgggattcgggggtcccgatgccagactggaggagaaattaatgaccgtggtcagtggccctgaccccgtcaatactgttttcctgaacttcatggccgtccaggacgacaccgctaaggtctggagtgaagaacttttcaagttggcaatgaacatcttagcacaaaatgctagcagaaacacgttcctaagaaaagcatacacaaagctcaagctacaggtaaaccaggacggtaggatccccgttaaaaatatactcaaaatgttcagtgcggacaagaagcgagtggagactgctctggagagttgtggcttgaagttcaaccggtctgagtcgatccgccctgacgaattctccctggagatattcgagagattcttgaataaactgtgtctgagaccagatatagacaagatcctacttgagatcggcgcaaagggaaagccttatttaaccctagagcaacttatggacttcattaaccagaagcaaagagatcccagattaaatgaagtgctgtatccacctctccgtccctcccaggctcgactgctgatagagaagtatgaacctaaccagcaatttctggagcgggatcaaatgtctatggagggattttctcggtatctgggaggcgaagagaatggaatactgccgttagaagcactcgacctttctacagatatgacgcagccattgtccgcttatttcattaacagttcgcacaatacgtacttaactgccggacaacttgccggtacatccagcgtggaaatgtacaggcaggctttactgtgggggtgtcgttgcgtggagcttgacgtgtggaaaggcagaccgccagaagaggagccatttattacacatggctttacgatgactactgaggttcctctgagggatgtcctggaggccatcgccgaaactgcgtttaaaacaagtccataccctgtgatactcagttttgagaaccatgtggactccgcaaagcagcaggcaaaaatggccgagtattgccggagcatctttggagacgccttgctcatagagccactggataagtaccctcttgctcccggtgtgcctttgccgagtccccaggatctgatgggccgaattcttgtcaagaacaaaaagcgacaccgccctagcgctggcggtcctgattctgctggcagaaaacggcctctggaacagagtaattccgcgctgagcgagtcctctgccgcaacagagccaagtagccctcagctgggctccccatcaagtgacagctgccctggcctgagcaacggagaggaagtcggcctggaaaagccctcactggagcctcagaaatctctcggtgacgaaggtctgaaccggggaccgtatgtgctgggaccagcagatagggaagacgaagaggaggacgaagaggaggaagaacagaccgacccaaaaaaacctacaacagacgagggcacagctagctccgaggtgaacgctaccgaagaaatgtctacacttgtgaactatatcgagccagtgaagttcaaatctttcgaggcggctcgtaagcggaacaagtgctttgagatgagcagttttgtggaaacaaaggctatggagcagctgaccaaatcgccaatggaatttgtggaatataataaacagcaattatcgcgtatataccctaaaggaacccgggtggattccagcaactacatgcctcagcttttctggaacgttggatgccagctcgttgcactcaactttcagactctggatgtcgccatgcagctgaacgctggagtcttcgagtacaacggtaggtcaggctatctcctgaagccagaatttatgcgacgccctgataaaagtttcgacccattcacggaagtgatcgtggatgggatagtcgcaaacgccttacgcgtgaaggtaatcagtggacagttcctgtcagaccgtaaggttgggatatacgtggaggtggacatgtttggtcttcctgtcgatactaggagaaaatatcgaactagaacctctcagggcaattcattcaaccccgtctgggacgaagagccgtttgatttccccaaagttgtcctcccaacgctggctagcctcaggattgcagcattcgaagagggcggtaaatttgtgggccatcgaatccttcctgtttcagctattcgcagcgggtaccactatgtatgtctgcgcaatgaagccaatcagccactgtgtctacctgccttgttaatctatacagaggcaagtgactacattccagatgatcaccaggactatgctgaagccctgattaatccgattaaacacgttagtttgatggatcagagggcacggcaactcgccgcactgatcggcgaatccgaggcccaggcgggacaggagacatgccaggacactcagagccagcaacttgggtcccagcccagctcaaatccaactccctcacccctggatgcctccccacgcaggccaccaggcccaacgacctcccccgcttccaccagcctttcatcacccggacagagagacgaccttatagcatccatactgtccgaggtcgcaccgactcccctggacgaactgaggggacacaaagcattggtcaaactgcgctcacgccaggaacgggacctgcgcgaactgaggaagaagcaccagagaaaagcagtgacgttgacgagacgcttgcttgacggcttagcgcaagctcaggccgagggcagatgtaggctccggccaggcgcactgggcggagccgctgatgtggaggatacaaaagagggggaggatgaggccaaacggtatcaagaattccagaatcgccaggtccagtctctactcgagttgagagaagcccaggtcgacgcagaggcgcagcgacgtttagagcatctgcgtcaggccctgcagcgactaagggaagtggttctggatgcaaacacaactcagttcaaacggttgaaggaaatgaacgagcgggagaaaaaggaattgcagaagattttagatcgcaaaaggcacaattccatcagcgaagcgaagatgcgagacaaacacaaaaaagaggccgaactgacagaaatcaatagaagacacatcacagaatcagtcaatagcataagaaggcttgaggaggcacagaaacagcggcacgaccgtctggtcgctggacagcaacaggtcttgcagcagctggccgaagaggaaccaaagctactcgcacaactggcccaagagtgccaagagcagcgcgcacgccttcctcaagagatccggaggagtcttcttggggaaatgccagaaggtctgggagatggccctctcgtggcatgtgcgtctaatggccatgccccaggatccagcgggcatctttccggcgctgacagcgagtcacaggaagaaaatacccaactgtag

SEQ ID NO: 234898 - DNA, 3528 bp, synthetic construct
  misc_feature 1..3528: note = Description of Artificial Sequence: Synthetic coding sequence
  source 1..3528: mol_type = other DNA
atggcaaagccatacgaatttaactggcagaaagaggtgccaagcttccttcaagaaggcgcagtgttcgatcgctacgaagaggagtccttcgtgttcgaaccaaactgtctgtttaaagtggacgagtttggctttttcttgacctggcgaagcgagggaaaggaagggcaggtactggagtgctccctgataaattcaatacgaagcggcgcaatccctaaagacccaaagattttagctgccctggaagccgtcggcaaaagtgaaaatgacctcgagggcaggattgtgtgcgtctgctccgggactgacctggttaatattagtttcacgtacatggtggctgaaaacccagaagtaaccaagcaatgggttgaggggcttaggagtatcatacacaattttcgggctaacaatgtaagtcccatgacctgtttaaaaaagcactggatgaagctcgcattcatgacgaatactaatgggaagatacccgtaagatcaattacccggacgttcgcatccggaaagacagaaaaggtaatttttcaggcccttaaggagctggggttgccatctgggaaaaacgatgagatcgagcccacagccttctcttatgagaagttttacgagcttactcagaagatatgtcccagaaccgacatcgaggatcttttcaaaaaaataaacggtgacaagacagattacctgactgtggatcaattggtaagtttcttaaacgaacatcaacgtgatccacgattaaacgaaatactgttccccttttatgacgccaaaagggcaatgcagatcattgaaatgtacgagccagatgaggaccttaaaaagaaaggactcatttccagtgatggcttctgtcggtatcttatgtccgatgagaacgctcccgtttttctggacagactggagttgtatcaggagatggaccaccctttggcgcattactttatttcgtccagtcacaatacatacctcacaggtcgccaatttggcggaaagtcttccgtcgagatgtacagacaggtccttcttgcaggatgccggtgcgtggagctggactgctgggacggcaaaggagaagaccaagagccgatcatcacacacggcaaggcaatgtgtacggatatcttgttcaaggatgtcatccaggcaatcaaagagactgcattcgttacctccgaatatcccgtcatcctgtcattcgagaaccattgttcaaagtaccagcagtacaaaatgtcaaagtattgtgaagatctgttcggggatctcctcttaaagcaggctctggaatcccacccgctggagcctggacgggctctgccctcccccaacgacctgaagcgcaaaatacttatcaaaaacaagcggctcaagcctgaagtggagaaaaagcagctggaggccttgcgctcaatgatggaagctggcgaaagcgccagccccgctaatatccttgaggacgataacgaggaggaaatagagtcagcagatcaagaggaagaggcacacccagaattcaagttcgggaatgagctgagtgcagatgacttaggacataaagaggccgtcgccaatagtgtgaaaaagggactcgtcaccgtagaagatgagcaggcctggatggcatcatataagtacgtgggggctactacaaacattcatccctatttgagcactatgatcaactatgcccagcccgttaagttccagggatttcacgtggctgaggagagaaacatccactacaacatgtcaagttttaatgagtccgtgggtctcggctacctaaagacgcacgctatcgagtttgtcaattataataagaggcagatgtcaaggatttacccgaagggaggacgcgtagacagctctaattatatgccccagatattctggaacgccggatgtcagatggtctcgctgaattaccaaacacctgaccttgcaatgcagctgaatcaggggaagtttgagtacaatgggtcctgtggctatttgctcaaaccagacttcatgcgcagacctgaccgcacattcgatcctttttcagaaacccccgtggatggggtgatagccgctacctgtagcgtgcaggtgatttccggccaatttttaagcgacaagaagattggcacctatgtggaggtcgacatgtacggactgcccactgataccatccgaaaagaatttcggacaaggatggtgatgaacaacggtttgaatcctgtgtataatgaggagtcattcgtttttagaaaggtgatcctcccagaccttgcagtgctacgtatcgccgtgtatgacgataataacaaactgatcggccagcggatactccccctcgacggactccaggcaggttacagacacattagcctgaggaatgaagggaacaagccgctgagtcttccaacaattttctgtaacattgttttaaagacttacgtgcccgacggattcggggatattgtggatgctctgtcggatcctaaaaagtttctttccattacggagaaacgggcagaccagatgcgggctatgggaattgagacgagcgacatcgcggacgtgccttccgatacttcaaaaaatgataagaaggggaaggctaacaccgctaaagcaaatgtaacaccacagtcttccagtgaactgcgacctaccacaactgcggctctggcctcaggagttgaggccaaaaaaggcatagagctcatcccccaggtgcgtatcgaggatctgaagcagatgaaagcctatctcaagcacctgaagaagcagcagaaagagctcaacagtttgaagaaaaaacacgctaaagagcatagtacaatgcagaaactgcactgcactcaggtggacaagattgtggcccagtacgataaagaaaaatctacacacgagaagatactcgaaaaagcaatgaaaaagaaggggggaagcaactgccttgagatgaaaaaggaaaccgaaatcaaaattcagactctcacttctgaccacaaatctaaagtaaaagagatcgtggcccagcataccaaagaatggagtgaaatgattaatacccattctgcagaggagcaagaaattcgcgaccttcacctgtctcagcagtgcgagctcctcaagaagctgctgataaacgcacacgaacaacagacccagcagctgaaactcagccacgatagagagtcaaaggaaatgcgggctcaccaagctaagatctcaatggagaattctaaggccatttcacaggacaaaagcataaagaacaaagctgagcgagagaggagggtgcgggagctgaacagttccaatacaaagaagtttttggaggaacgcaaacgccttgccatgaaacagtccaaagaaatggatcaacttaaaaaggttcagctcgagcatctggaatttctggagaagcagaacgaacaggctaaggagatgcaacaaatggttaaactggaagccgaaatggatcgccgacctgctacggttgtttag

SEQ ID NO: 234899 - DNA, 3585 bp, synthetic construct
  misc_feature 1..3585: note = Description of Artificial Sequence: Synthetic coding sequence
  source 1..3585: mol_type = other DNA
atggccaagccttatgagttcaactggcagaaagaggtgccttcttttcttcaggagggtgccgtgtttgacagatatgaggaggagagcttcgtcttcgagccaaattgtctctttaaggttgacgaatttggcttttttctcacttggcggtctgaaggcaaagaaggacaggtcctggagtgtagcctcattaactccatacgctctggtgctatcccaaaggatcctaagattcttgccgcattggaggccgtggggaagtctgagaatgatttggaggggagaattgtttgcgtctgctcaggtacagatctcgtcaacatttcgtttacctacatggtggctgaaaatccagaggtaacgaagcagtgggttgaaggtctgaggagtataatccataattttagagcgaataatgtcagtcctatgacctgcctaaaaaaacattggatgaagctcgccttcatgaccaacactaacggcaagattcctgtgcggtccatcaccagaactttcgcctctggaaaaactgaaaaagtgatctttcaggcactcaaagagctaggattacctagcggaaaaaatgatgagatcgagcctaccgccttttcctatgagaaattttacgagctcactcagaaaatctgtcctaggaccgacattgaagatctgtttaagaagattaacggcgacaagaccgactatctgaccgtggaccagcttgtttcattcttgaatgagcaccagagagaccccaggcttaatgagatacttttccctttctatgacgcaaaaagggcgatgcaaattatcgaaatgtatgagccagatgaagacctcaagaaaaaaggcctgatttcatccgacgggttttgcaggtatttgatgtctgatgagaacgcccctgtgtttctcgaccgactcgagttatatcaggaaatggatcacccactggcacattactttatttcgtcaagtcacaacacatacctgacaggcaggcagtttggcggaaaaagctccgtggaaatgtatagacaggttcttctcgcaggttgccggtgcgtggaactcgactgctgggatgggaagggcgaggatcaggaaccaattatcacccatggtaaagccatgtgtaccgacattctttttaaggatgttattcaggctataaaagaaactgctttcgtgactagtgagtatcctgtaatcttgtcttttgagaatcactgctccaaatatcaacagtacaagatgagcaagtattgcgaagatctgttcggtgatctcctgctgaaacaggctctggaaagtcatcccctggagcctggcagagccctgccttctcctaacgacttaaaacgcaaaattcttatcaaaaataagcggcttaaacctgaagtcgaaaaaaagcagctggaggctctcaggagtatgatggaggccggtgagtccgcctcccccgctaacatcctggaggatgacaacgaagaggaaattgaatctgctgaccaagaggaggaagctcacccagaatttaagttcggcaacgagctgtccgccgatgacctgggccacaaggaagccgtagctaattctgttaaaaaaggccttgtgaccgtcgaagatgagcaggcatggatggcatcatacaagtatgtgggtgcaactacaaatatacacccttacctgtctacaatgattaactatgctcaacccgtgaaattccaaggctttcatgtcgccgaggaacgcaatatacactataacatgtcctcatttaacgagtccgttggcctgggctatttgaagacacatgccatagagttcgtcaactacaataaacgacagatgagcagaatttatcccaagggaggcagagtggacagctcaaattacatgcctcagattttctggaacgctgggtgtcaaatggtcagtctgaattaccagactccagatcttgcaatgcagctgaatcaggggaagtttgaatacaacggtagttgcggttatctgctcaaaccggactttatgagacggccagatcgcactttcgaccctttttccgaaactccagtggatggcgtgattgccgcaacctgttcagtgcaggtgatctctggacagtttctgtcggacaaaaagataggaacctatgtggaagtagatatgtacggactacccaccgacactatcagaaaggagttccgaacccgaatggtgatgaacaacggcttgaacccagtgtataatgaggaaagcttcgtgtttagaaaagtgattctccctgatcttgcagtccttagaatcgctgtctacgacgataacaataaattgatcggacagcggattctacctctcgacgggctgcaggctgggtatcggcatatcagtctgcgaaatgaagggaacaagccgctctcgctaccaacgattttttgtaacattgtgctgaaaacttacgtcccagatggctttggtgacatagtggatgccctatccgaccctaaaaaattcctgtctatcactgagaagcgcgctgaccaaatgcgggctatgggaatagagaccagcgacattgctgacgttccctcagatacatctaaaaatgataagaagggcaaagccaacactgcgaaggcaaacgtcaccccccagtcaagctccgagctgcgcccaacaactaccgcagcactggcttctggagtcgaagctaagaaaggtatcgagctcatcccacaggtgcgcattgaggatctgaaacagatgaaggcttacttgaagcatcttaagaagcagcagaaggagctcaattcactgaagaaaaagcacgccaaagaacatagtaccatgcagaaattgcactgtacacaggtggacaaaatagtggcccagtacgacaaggaaaagtcgacacatgaaaaaatcctggagaaggctatgaaaaagaaagggggatccaactgtctggagatgaagaaggaaaccgaaatcaaaatacagacgctcacctccgaccacaaatcaaaggttaaagagatcgtggctcagcatacaaaagaatggtctgaaatgattaacactcattccgccgaagagcaagaaattcgggatctgcatctatcacaacagtgcgaactgctgaagaaactgctaatcaacgctcacgagcaacaaacacagcagcttaaattatcccatgatcgggaatccaaagagatgcgggctcaccaggccaaaatatctatggagaactctaaagctattagccaggacaaaagcatcaagaacaaagctgagagggagaggagggtccgggagcttaactcttcaaataccaaaaaattcctggaggaaagaaaacggcttgcaatgaaacagagtaaagaaatggaccagctgaaaaaagtgcagctggaacatctggagttcttggagaagcaaaatgaacaactgctaaagtcctgtcatgccgttagtcagacccagggagaaggggacgctgccgacggcgaaatcggcagtcgagatggcccacaaacttctaactcctccatgaaactgcaaaatgctaattag

SEQ ID NO: 234900 - DNA, 3564 bp, synthetic construct
  misc_feature 1..3564: note = Description of Artificial Sequence: Synthetic coding sequence
  source 1..3564: mol_type = other DNA
atggccaagccttatgagtttaactggcagaaagaggtgccgtctttcctccaggagggggcagtgttcgatcgatatgaagaggagtccttcgtgttcgagcctaattgtctcttcaaagtggacgaattcggattcttcctaacctggaggagcgaaggaaaagagggtcaagtactggaatgcagtctcatcaattcaatccgatcaggagccatccccaaagatcccaagattttggccgcactagaggctgtcggtaagagtgagaacgacctggagggcagaatcgtctgcgtatgcagtggcaccgacctggtgaatatatccttcacgtatatggtcgcagagaacccagaagttacaaagcagtgggttgaaggcctcagaagtattatacataacttccgtgccaacaacgtgagccctatgacgtgtctcaagaagcactggatgaagctcgccttcatgacaaataccaatggaaagataccagtgcgctcgattactcgcacctttgccagtggtaaaacagaaaaagtaatcttccaggctctgaaggagttggggctgccctctgggaagaacgacgagatcgagccaaccgcattctcatacgagaagttttacgagctcacccagaaaatctgccctcgcactgacattgaggatctcttcaagaaaattaacggagacaaaactgattatcttaccgtcgatcaacttgtttccttcctgaatgagcaccaacgggaccctcgcctgaacgaaattctgttcccattctatgacgctaagcgcgcaatgcagataatcgagatgtatgagcccgatgaggatctcaaaaaaaagggcctgatcagctctgacggtttttgtcggtacctaatgtccgatgaaaatgcaccagttttcctcgatcggctcgaactctaccaggagatggaccaccccctggctcattattttatcagttcaagtcacaatacgtacttgacagggagacagttcgggggaaagagcagcgtagagatgtaccgccaggtcctgctggctggttgccgctgcgtagagctagactgctgggacggaaagggcgaagaccaagaacccatcatcacccacgggaaagcaatgtgcactgatatcctgttcaaggatgtgattcaggccatcaaagagaccgcttttgttacctcagaatacccagtcatcttgagctttgagaatcattgttcaaagtaccagcagtataaaatgtccaagtattgtgaggatttgttcggggacctattgcttaaacaggccctagagtcccatcccttggaacccggtcgggctttgccctctccaaatgacttaaagagaaagatcctgattaaaaataaacgactgaaacctgaggtcgagaagaaacagctcgaggctctgaggagtatgatggaagcaggcgaatccgcttcccctgctaacatcttagaggacgacaacgaagaggaaattgaatctgcagatcaagaggaggaagctcatccagagttcaaattcggcaacgaactgtccgccgatgacctgggtcacaaggaggccgtggctaactccgtaaagaaggccagtgatgatctggagcatgaaaacaacaagaaaggtctggtgactgtggaggatgaacaggcctggatggcttcctacaaatatgtgggggcaaccactaatattcatccatacctcagcactatgattaattacgcccagcccgtgaagtttcagggtttccatgtggccgaagagcgtaatattcactataatatgtcaagcttcaatgaatcagtggggttggggtacctcaaaacacacgcaattgaatttgtcaattataacaagcgacaaatgagccgcatctatcccaaaggagggagggtggactcatctaactacatgcctcaaatcttttggaacgctggatgtcaaatggttagcctgaattatcagactccagatcttgcgatgcagctgaaccagggaaagtttgaatacaacggatcctgtgggtatctgctgaaaccagacttcatgagaagaccagatagaacgttcgaccccttcagtgagacaccagtggatggagtcatcgctgcaacttgctccgtgcaagtgattagtggccagtttctgagcgacaagaaaatcgggacatacgtcgaagtggatatgtatggcctccctacagacacgatacgcaaggagttcagaactcgaatggtcatgaacaacggattgaatccagtttataacgaggagagctttgtgttccgcaaagtgatcctgcctgatttggctgttctgagaatcgctgtatatgatgataataataagcttatcggtcaaagaatcctccctctggacggcctgcaggccggttaccggcatatctctcttaggaatgaaggtaataagcccctctctttgcccactatcttctgcaatattgtgctcaagacctatgtgccagatggattcggagatatcgtcgacgcgctgagcgatccaaagaagtttctcagcataaccgaaaaaagagctgaccagatgagggccatgggtattgaaacctctgacattgccgacgtaccctcagatacctccaaaaatgataaaaaggggaaggcgaacacggctaaggccaacgtcacaccacaatcgagttccgagctcaggcctaccacaacggccgctcttgcctccggtgtcgaagccaagaagggcatagaactgattccgcaggtacggatcgaagacctgaagcagatgaaggcgtacttaaaacacctcaaaaaacaacagaaagaactgaactccctgaaaaagaagcacgctaaagaacattccaccatgcaaaagctccactgcacccaggtggacaagattgtggctcagtacgataaggagaagagcacacatgagaaaatccttgagaaggcgatgaaaaaaaaaggcggatctaactgtctcgaaatgaagaaagaaacagaaattaagattcagactctgacgagcgaccataaatccaaggtgaaagagatagttgcccagcacacaaaggagtggtcagagatgattaatacgcacagcgcagaggagcaggagatcagggacctgcatttatcccagcaatgcgaactgctgaaaaagctgttgattaacgctcatgagcagcagactcagcagctcaagctaagtcacgatcgggaaagcaaggagatgcgtgctcatcaggccaagattagtatggaaaatagtaaagcaataagtcaggataagtctatcaaaaataaggccgaaagagagcggagggtgcgagaactcaatagcagtaatactaaaaagttcctggaagagagaaagagattggccatgaagcagtcaaaagagatggaccagctgaaaaaagttcaattagagcacttggagtttttggaaaaacagaatgagcaggcaaaggagatgcagcagatggtcaagctggaagcggaaatggaccgcagacccgctaccgtggtctag

SEQ ID NO: 234901 - DNA, 3528 bp, synthetic construct
  misc_feature 1..3528: note = Description of Artificial Sequence: Synthetic coding sequence
  source 1..3528: mol_type = other DNA
atggccaagccctacgagtttaattggcagaaagaggtgccttcttttctccaggagggtgccgtgtttgaccgctatgaagaggaatcttttgtgttcgaacctaactgcctatttaaggtggatgagttcggattctttctcacatggaggtccgagggaaaggaaggccaggtcctggaatgcagcctgatcaattcaatcagatcaggtgctatccctaaggacccaaaaatcctcgcggctctggaggcagtggggaagagcgaaaatgatctggagggaagaattgtctgtgtgtgcagcggcacagatctcgtcaacatatcctttacatacatggtggcagaaaatcctgaagtgactaagcaatgggtggagggccttaggtccattattcataattttagggcgaacaacgtctctcctatgacttgtcttaaaaaacattggatgaaacttgccttcatgaccaatacaaacgggaaaattccagttagatccatcaccaggacttttgcttccggtaagaccgagaaagtgatttttcaggctctgaaagaacttggactgcccagcggtaagaatgacgaaatcgagccaacagctttcagttatgaaaagttctacgaactgacacagaaaatctgtcctcggaccgacatcgaggatctgtttaagaaaatcaacggcgataagaccgattacctgacagtcgatcaactggtgtcattcttgaacgagcaccagagggatccacgactcaatgagattctatttccattctacgacgccaaaagggccatgcaaattattgaaatgtacgaaccagacgaagatctgaaaaaaaagggactgattagcagcgacgggttttgcagatatctgatgtcagatgaaaacgctcccgtgttcttagacagattggagctttaccaagagatggaccacccactggctcactacttcatctccagcagtcataatacctacctgacagggcgacagtttggcggaaagtcctcagtggagatgtaccggcaggtactcctggctggctgcagatgtgtcgaactcgattgttgggatggaaagggggaggatcaggaaccaatcataacacacggcaaggctatgtgtactgatatcctattcaaggacgtcattcaggcaataaaggaaacagctttcgtgacctcagaatatccagtaatactttcttttgagaaccattgttcaaagtaccagcagtataaaatgtctaaatattgtgaagacctctttggcgacttgctgctaaaacaggccctcgagtcacacccactggaacccggtcgggcactaccttctcccaatgatctcaaaaggaaaatcctgatcaagaataaaagactaaagcctgaagttgagaagaagcagctcgaagccttgcggtccatgatggaagccggtgagtcagcctctccggctaatatcctggaggatgataacgaagaagagatcgaatccgcagatcaagaggaggaagcccatcctgaatttaagttcgggaacgagctaagtgctgacgacctggggcacaaagaagccgtcgcaaactctgtgaagaagggcctggttacagtggaggatgagcaggcttggatggcctcttacaagtatgttggcgctaccacaaatattcatccttacctatccaccatgattaattacgcccagcctgtgaagtttcaaggctttcacgtggccgaggaacggaacatccattataatatgtcctcatttaacgaatcagtggggctaggctacttaaaaacacatgcaatcgagtttgttaattacaacaaaaggcagatgtcccggatctatcccaaaggcggtagagtggactccagcaactatatgcctcaaatcttttggaatgcaggatgtcagatggtatcactgaactaccagaccccggacctggcgatgcaactaaatcagggaaaatttgagtataatgggtcctgtggatatcttctgaagccagattttatgcggaggcccgaccggactttcgatcccttttcggaaactccggtggacggggtcatagccgcaacgtgtagtgtgcaggtcatttccggccagtttctgagcgataaaaagatagggacgtatgtagaggtggatatgtacggcctgcccacagacaccatcaggaaagaattccggactcgcatggtgatgaacaacgggctcaatcctgtatataacgaagagtcattcgtgtttcgtaaggtcattctacccgacttggctgtattgcgcatcgcggtgtacgatgacaataacaagctcattggacagcggattctgccgcttgacggactgcaggctggataccgtcacatctccttacgtaacgaggggaataagcctctgtcccttcctaccatcttctgcaacattgtactgaagacctacgttccagacggtttcggtgacattgtggacgcgctgagcgatcccaagaaattcctctccattaccgagaagagggctgatcagatgcgcgctatgggcatcgaaacctcagatattgcagatgtgccatccgataccagcaaaaacgataagaaggggaaggctaatacagcgaaagccaacgtgaccccacagagttcaagtgagcttcggccaaccaccaccgcagcgctagctagtggagtggaagccaaaaaaggcatagaacttattccacaggtacgcattgaggacctgaaacagatgaaggcttacttaaagcacctcaaaaagcagcagaaggagctgaattctcttaagaagaagcacgccaaagaacactccactatgcaaaaactgcattgtactcaggtggataaaattgtggcccagtatgacaaagaaaagtccacccatgagaagattcttgagaaagccatgaaaaagaaaggcggatcaaattgcctcgagatgaagaaagagacagaaatcaagatacagacattgacctcagaccacaagtctaaggttaaagagatcgtggcgcagcacacgaaggaatggagcgaaatgatcaatacccacagtgccgaagaacaggagattagggatcttcatctcagtcagcaatgcgaacttctcaagaagttgctcattaacgctcacgaacagcagactcagcagctcaaactcagtcacgacagagaaagcaaggagatgcgggcacaccaggccaagattagtatggagaattccaaagcaatctctcaggataagagcataaagaacaaagccgagagagagcgcagagtgagggaactgaattcttctaatactaagaagtttttggaagaacgaaagcgcctggctatgaaacagagtaaggagatggatcagctgaagaaagtgcagcttgaacatttagagtttttggagaagcagaatgagcaggcaaaagaaatgcagcagatggtgaagttggaagccgagatggacagacgacccgcaaccgtggtgtag

SEQ ID NO: 234902 - DNA, 3585 bp, synthetic construct
  misc_feature 1..3585: note = Description of Artificial Sequence: Synthetic coding sequence
  source 1..3585: mol_type = other DNA
atggcgaaaccttatgagttcaactggcaaaaggaggtcccgtcttttcttcaggaaggagcagtgtttgatcggtatgaagaagaatctttcgtgtttgaacctaactgcctcttcaaagtggatgaatttgggttctttctgacttggcggagcgagggaaaggaggggcaggtgctggagtgctccctgataaattctattcgcagcggtgcaattcctaaggaccctaaaattctggccgctctggaggctgtcggaaagtcagagaatgatctggaggggaggattgtgtgcgtgtgcagtggaacggacctggtaaacatcagttttacatatatggtggcagagaaccccgaggttacaaagcagtgggttgaaggtctgcgatccataatccataactttcgcgctaacaatgtgagccccatgacatgtttgaagaagcattggatgaaactcgcgttcatgaccaacactaacgggaaaattcctgttcgcagtatcacgaggactttcgcctccggaaagaccgaaaaagtgatcttccaagccctgaaggagcttggactgcccagcgggaaaaatgacgagatcgagcctaccgccttttcttacgaaaagttctatgagcttactcagaagatctgccccaggacagatattgaagacctctttaaaaagatcaatggcgataaaaccgactacctcacagtggatcagctcgtgagctttctcaacgagcatcagcgggaccctaggctaaacgaaatactgtttcccttttatgacgccaagagagccatgcaaataatcgaaatgtatgagccagacgaggacctgaagaagaaggggcttatttccagtgacggtttttgcaggtacctcatgtcagatgagaatgctccggttttcctggacaggctcgagttataccaagagatggatcacccactcgcacattacttcatctcttcttcacacaacacgtaccttacaggacggcaattcgggggtaaatcttcagttgagatgtacaggcaggtgctgcttgctggatgcagatgcgtagaactggactgctgggatgggaagggtgaggatcaggaaccgattattacacatgggaaagccatgtgcactgacattctcttcaaggatgtgatccaggcaattaaagaaaccgcattcgttacaagcgagtatcccgtgatactgtcgttcgaaaaccactgcagtaaataccagcagtacaaaatgagtaagtactgcgaggacttgtttggcgatctcttacttaagcaagctttggagtcgcatccactggagcctggaagagccttaccctctcctaatgatctcaaaaggaagattctgattaaaaacaagagactgaaacccgaagtagaaaaaaagcagcttgaagccctgcggtccatgatggaagccggagagagcgcaagcccagcgaatatcttggaggatgataatgaggaagagattgaaagcgctgaccaggaagaggaggctcaccctgaattcaagtttggaaatgaactgagcgccgatgacttgggtcacaaggaagccgtcgcgaactctgtaaagaagggcttagttacagtggaagacgagcaggcatggatggcctcatacaaatacgtgggggcaactactaatatccatccctatttatctactatgattaattatgcacaaccggtgaaattccagggcttccatgttgccgaagaacggaatatccactacaatatgtcttcctttaatgaaagcgtgggcctgggctaccttaagacccacgcgattgagttcgtcaactataacaaacggcagatgtctaggatctacccaaagggcggacgagtggacagctccaactacatgccccagatcttttggaatgcaggatgtcagatggtaagcctgaactaccagaccccagacctggctatgcagctgaatcagggcaagtttgaatataacggatcctgcggatacctactgaaaccagatttcatgcgcaggcccgatcgaacattcgacccattctcagagacccccgtcgatggggtgattgccgctacatgttctgttcaggtcatctcgggccagttccttagtgacaagaagatcgggacgtatgtcgaggtggacatgtatggactcccaaccgatacaatacggaaggagttccgcacaagaatggttatgaacaacggactcaatcccgtttacaatgaagagagctttgttttcagaaaagtcattcttccagatttagctgtgttgcggatagccgtgtatgatgataataacaagctaattgggcaacgcattttacccctggacggccttcaggctggttatcgccacatttccctgcggaacgaggggaacaagcccttaagcttgcctacgatcttttgtaatatcgtccttaagacatacgtccccgatggcttcggggacattgtagacgctctctcggaccccaaaaaattcctctcgataaccgagaagcgcgcagatcaaatgagagcaatgggaatcgagacatcagatatagccgatgttcctagcgacacaagtaaaaacgacaagaaggggaaggccaatacggccaaggccaatgttaccccgcagtcttcctctgagcttcgaccaacgaccacagctgcccttgcctctggggtggaagccaagaagggtattgagttgataccacaggttcggattgaagatctcaaacaaatgaaggcctacctgaagcacctgaaaaagcaacagaaggagttgaattccttgaagaaaaaacatgccaaggagcattccactatgcagaagctgcattgcactcaggtcgacaagatagttgcccagtatgataaggaaaagtccacccatgagaagatcttggaaaaggcgatgaaaaaaaaaggcggttccaactgtctggagatgaaaaaagaaaccgagatcaaaattcagacactgacatcagaccataaaagcaaggtgaaggagattgttgcccagcacactaaagagtggtccgaaatgataaacacacacagcgccgaagagcaggagatacgtgaccttcatctgagccagcaatgcgagttgctcaagaagcttcttataaacgcccacgagcagcagactcaacagctgaagttgtcgcatgatcgagagagtaaggagatgagagcacatcaggccaaaatcagcatggaaaacagtaaggccatctcccaggataaatctatcaaaaacaaggcggaacgagaaagacgcgtgagggaactgaacagctcaaataccaagaaatttctagaggagaggaagagactggcgatgaaacagtcgaaggagatggaccagcttaaaaaggtccaactagagcatttagagtttctcgaaaagcagaacgaacagctgctgaagtcctgccatgccgtgagccagacccagggtgagggagatgctgcagacggggagataggttcgcgagatgggcctcagacctctaattccagtatgaagttacagaatgctaattag

SEQ ID NO: 234903 - DNA, 342 bp, synthetic construct
  misc_feature 1..342: note = Description of Artificial Sequence: Synthetic coding sequence
  source 1..342: mol_type = other DNA
atggccaagccctatgagtttaattggcagaaggaagtgccaagctttctacaagagggagctgtcttcgacagatatgaagaggaatccttcgttttcgagccaaattgcctatttaaagtggacgaattcggtttcttcctgacatggcggtcagaagggaaagagggccaggttctggaatgctctcttataaactccatccggtcaggggcaattcccaaggacccaaaaattctggccgcactagaagctgtgggcaagtctgaaaatgacctggaaggccgtattgtctgtgtctgttctggaactgatctagttaacatttccttcacgtattag

SEQ ID NO: 234904 - DNA, 3072 bp, synthetic construct
  misc_feature 1..3072: note = Description of Artificial Sequence: Synthetic coding sequence
  source 1..3072: mol_type = other DNA
cctgtacgatcgatcactagaacttttgcttcagggaaaacggagaaagttatctttcaggcgttgaaggagttggggctcccctccgggaagaatgacgaaattgaaccaactgctttctcttatgagaagttttatgagctcacacagaaaatatgccctagaacagacatcgaggacctgtttaagaagattaacggggacaaaactgattatctgaccgtcgaccagctggtcagctttcttaacgaacaccagcgagacccccgtctcaatgaaattctcttccccttctatgatgctaagagagccatgcagattattgaaatgtacgaacccgatgaagatttgaaaaagaaagggctcatatcttctgacggattctgtcgttatttaatgagtgatgagaacgcgcctgtcttcctcgacagacttgagctgtaccaggagatggatcaccctttagcccactacttcatttcatcttctcacaatacctacctgaccggacggcagttcggcggaaagagcagcgtagagatgtatcgccaggtgctactggcgggatgccggtgcgtcgaattggattgctgggacggcaagggtgaggatcaagaaccaatcattacacacggcaaggcgatgtgcactgatattttgttcaaggatgttatccaggccatcaaggagacggccttcgtgacctccgagtatcccgtgatcttgtccttcgagaaccactgtagcaaataccagcagtataaaatgagtaaatattgcgaagacctgtttggggatttgctgctcaaacaagctcttgaaagccatccattagaaccaggtagagcgctcccatcccccaacgatctcaaacgaaagattctaatcaagaataaaaggttgaagccagaggttgaaaagaaacagctggaagcattaaggagtatgatggaggccggagagtctgccagcccagcgaatatactcgaggacgacaatgaagaagagattgagagtgccgaccaggaggaagaggctcatcccgagttcaagttcgggaacgagctttccgcggatgaccttggccataaggaagctgtggccaactccgtgaagaaagccagcgacgatctggagcacgaaaataacaagaaagggctggtgaccgtcgaggatgagcaggcttggatggcgagctacaagtatgtcggtgcaacaacgaacatccacccttatctgtccactatgattaactacgctcagcccgtgaaattccagggctttcatgtcgcagaggagagaaacatccactataacatgtctagcttcaatgaaagtgtcgggttaggatacttaaagactcatgccatcgagttcgtaaactacaataaaagacaaatgtcaaggatataccccaagggcggtcgggttgatagcagcaactacatgccacagattttttggaacgctggctgtcagatggtctccctgaactaccagacacctgatctcgccatgcaattaaaccagggaaagttcgaatacaatgggagttgcggctatctgctgaagcccgattttatgcgacgtccggatcggacatttgatcctttttcagaaacgcctgtcgacggagttatcgcagctacatgttccgtacaggtgatttcaggccagttccttagcgataagaagattggtacatacgtggaagtcgatatgtacgggttgcctactgacaccattcgtaaggaattcaggacaagaatggttatgaataatggactgaaccctgtgtataacgaagagagcttcgtgttccgaaaggtgatacttcctgatttggcagtcctgcgaatagcagtatacgatgataacaacaagctcatcgggcagaggattctgcccttggatggcctgcaggctgggtacaggcacatctcacttcggaatgaaggaaacaagcctttgtcactcccaaccattttctgcaacatcgttcttaaaacttatgtacccgacggctttggggacattgttgacgcactgagcgaccctaaaaagttcctgtccatcactgaaaaaagagctgatcaaatgcgcgcaatggggatagaaacaagtgacattgcagatgtgccctccgacaccagcaagaatgacaaaaagggcaaagccaataccgctaaggccaatgtgactccgcagtcttccagcgagctccggccaaccacaaccgcagcactcgcctccggggttgaggccaaaaagggcatagaactcatacctcaagtgagaattgaggacctcaaacagatgaaggcgtacctgaagcatctcaaaaaacaacagaaggaactgaattcattgaaaaagaagcatgccaaagaacattcaaccatgcagaagctgcactgcacccaggtggataagatcgtggcgcagtatgacaaggagaaaagtacacacgagaagatattagagaaggccatgaaaaagaagggcggatcaaattgcctagaaatgaagaaggagacggaaataaagatacagactctaacgtccgaccacaaaagtaaggttaaggaaattgtggcccagcatacaaaggagtggtctgagatgatcaacactcactctgcagaggaacaagagattcgtgatcttcacctgtcacaacagtgcgaacttttgaaaaagttgttgatcaacgcccacgaacagcagacacagcagttgaaactgtctcacgaccgagaatcaaaggagatgcgggctcatcaggccaaaatttccatggaaaactcgaaagctatttctcaagataaatcaatcaaaaacaaagcagaaagggaacggcgtgttagagagttaaactcatccaataccaagaagttcttggaggaacggaagcgtcttgcgatgaaacagagtaaggaaatggatcaactcaaaaaggtacagctagagcatctggagttccttgagaagcagaacgaacaggctaaagaaatgcagcagatggttaagctcgaggctgagatggatcggcgaccggctactgtagtctag

SEQ ID NO: 234905 - DNA, 183 bp, synthetic construct
  misc_feature 1..183: note = Description of Artificial Sequence: Synthetic coding sequence
  source 1..183: mol_type = other DNA
atggccaaaccatatgaatttaactggcagaaggaagttccaagttttctccaggagggtgccgtgttcgacagatatgaggaagagagcttcgtctttgaaccaaattgcttgtttaaggtcgatgagttcggattctttctgacctggcgatcagaaggcaaggaagggcaagttctttag

SEQ ID NO: 234906 - DNA, 246 bp, synthetic construct
  misc_feature 1..246: note = Description of Artificial Sequence: Synthetic coding sequence
  source 1..246: mol_type = other DNA
atggcaaagccctatgaattcaattggcaaaaggaggtgccttcatttcttcaagagggagccgtgtttgacaggtacgaggaggaatccttcgtgttcgagccaaattgtctatttaaagtggatgagtttggcttcttccttacctggcggagcgaggggaaagagggtcaggtgctcgagtgttccctcatcaattccattagatccggtgccataccaaaagaccctaagatactggcctag

SEQ ID NO: 234907 - DNA, 333 bp, synthetic construct
  misc_feature 1..333: note = Description of Artificial Sequence: Synthetic coding sequence
  source 1..333: mol_type = other DNA
atggcaaaaccttatgaatttaactggcagaaggaggtgcctagctttttacaggaaggggctgtgttcgacaggtacgaggaagagagcttcgtcttcgaacccaactgtctcttcaaagtggacgaattcggctttttcctgacatggagatcagagggtaaggaagggcaagtcctagagtgcagcctgatcaactcaattcggagcggcgctataccgaaggatcccaaaatactggccgctcttgaagccgtcggtaagagcgagaacgatctcgaaggaaggatcgtttgcgtgtgctcagggacagaccttgtgaacatctcttag

SEQ ID NO: 234908 - DNA, 2271 bp, synthetic construct
  misc_feature 1..2271: note = Description of Artificial Sequence: Synthetic coding sequence
  source 1..2271: mol_type = other DNA
atggattcggggagggacttcctgacactacatggtctacaagatgacgaggacttgcaggcgcttctcaagggttcacagctgctaaaagtcaagtctagctcctggaggcgagaacgcttctacaagttgcaggaggactgtaagactatttggcaagaatcacggaaagtgatgaggacaccagagtctcagttgttttcaatcgaggacatacaggaagtgcggatggggcacagaacggaggggcttgagaagttcgccagggacgtccccgaagacaggtgtttctcaatcgtatttaaggaccagcgtaataccctggaccttatagccccatcgccagcagatgcacagcattgggtgctgggactccataaaatcattcatcatagcggcagcatggaccagagacagaaacttcaacactggatccactcctgtctccgcaaagcggataaaaataaggataacaaaatgagttttaaggaactgcaaaactttctgaaggaactgaatatccaagtggacgattcgtacgctaggaaaatctttcgggagtgcgaccactcacagacagattcactggaggatgaagaaattgaagccttctacaagatgctgactcagcgcgtggagatcgacaggaccttcgcagaggctgccggatcaggcgaaaccctgtctgtggatcagctcgtgacttttctgcaacatcagcagagagaggaggccgcaggtcccgcactggccctctctctcatcgaaaggtatgagccctctgagaccgctaaggcccaacgacaaatgactaaagacgggtttctcatgtacctgttgtcagcagatgggtcggcgttttcactggcccaccggagggtttaccaagacatggggcagcctttaagccactacctggtgagctcatcccacaacacgtacttactggaggaccagctggctggcccttcatctacggaagcatacatccgggcactctgcaagggctgtaggtgtctggagcttgactgctgggatgggcctaatcaggagccaataatataccacggctacacctttacctcgaagattctgttctgtgatgtgctccgggcaatccgggattatgcatttaaggcttccccataccccgttatactgtccttggaaaatcattgcacgttggagcagcagagggtaatggcacgccatctgcacgcaatccttgggccaatgctcctaaacaggccgttggatggagtcacaaactccctgccgtcccccgagcagctgaaaggaaagatcttgttgaagggtaagaagctggggggactactcccccctggaggcgagggaggccctgaggccaccgtggtctcagacgaggacgaagctgccgagatggaggatgaggcggtacggagtcgtgtgcagcacaagcctaaggaggataagttaaggctcgctcaggagctaagcgatatggtaatttattgtaagagcgtgcatttcggagggttctcatcccccggaacgccagggcaggccttctatgagatggcttctttcagcgagaacagagcactcaggctcctgcaagaaagtggaaacggtttcgtgcggcacaatgttggccacctgtctcgaatatacccagctggctggagaacagattcatccaactactccccggtggagatgtggaatggcggatgtcaaattgtggcgctgaacttccagactccaggacccgagatggacgtgtaccaaggtaggttccaggataatggcgcatgcggatatgttttaaagcctgctttcctgcgagatcccaacggaactttcaatccccgagcactcgcacagggcccttggtgggcaagaaagaggctcaatataagggtgatctcgggccaacagcttcccaaggtgaataagaataagaacagcatcgtggaccctaaggtcaccgtcgaaatccacggtgtatcgcgggacgttgcttcccgacagactgctgtcattacaaataatggattcaatccttggtgggacacagagtttgcctttgaggtggttgttcctgaccttgcgctgatccgatttcttgtggaggattatgacgcaagttctaagaatgacttcattggtcagagtactattccacttaatagtttgaagcagggttacaggcatgtccatctgatgtctaagaacggcgaccagcatccttccgctacactctttgtgaagatctcacttcaggattag

SEQ ID NO: 234909 - DNA, 2334 bp, synthetic construct
  misc_feature 1..2334: note = Description of Artificial Sequence: Synthetic coding sequence
  source 1..2334: mol_type = other DNA
atgcagtgtctggggatacgtagtaggtctagatctagggagctctatctgcaggagagatccctgaaagtcgccgctttaaatggtcggaggctgggactgcaagacgatgaagacctgcaggctttgctcaaagggagtcaactgctgaaggtaaagtcttcctcatggcggcgtgaacgcttctacaaattgcaggaggactgcaagaccatttggcaggaaagccggaaggttatgcggaccccagagagccaactgttctcaattgaggatatacaggaggtgaggatgggacacagaaccgaaggactcgagaaatttgccagagacgttcccgaagacagatgcttcagcatagtcttcaaagaccaacgcaatacattagatttaatcgccccttctccggcagacgcccagcattgggtgctgggattacacaaaattattcaccacagcgggagcatggaccaaaggcagaaactgcagcactggatccacagttgtcttagaaaagcagacaaaaataaggacaataagatgtcctttaaggaactgcaaaatttcctgaaagagttgaatatccaggtcgatgactcatacgccagaaagatattcagggagtgtgaccattctcaaacggacagcctagaggatgaagagatagaggcattctacaagatgctgacacaaagagttgagatagacaggacattcgccgaggctgccggatccggtgagaccctctcagtagatcagcttgtaactttcctgcaacatcagcagcgcgaggaggcagccggtccggctctggctttaagcctgatcgaacgttacgaaccatcagaaaccgctaaagcccagaggcagatgaccaaagacggatttctcatgtatctgctcagcgccgatggctccgcattttcactggcccaccgccgtgtctatcaggacatgggccaacctctcagtcattacctggtaagctcatcccataacacttatctgctcgaggatcagctggccggaccctccagtacagaagcttacatcagagcactgtgcaagggttgcaggtgtctggagctggactgttgggatggcccaaaccaggagcctataatttaccacggttatacttttacgtcaaaaatccttttttgcgatgtccttcgcgcaattcgggattacgcctttaaagcatctccctatccagtgatcctctccttggagaatcactgcaccctggaacagcagcgggtgatggcccgtcatttacacgctattttaggtcccatgctcctaaaccgccctctcgatggcgtaaccaatagtttgccatctccagagcagctgaagggaaagatcctcctgaaaggcaagaagttgggaggccttttaccacccggaggcgagggcggacctgaggccacagtggtttccgacgaggacgaagccgcagagatggaagatgaagccgtacggagtcgagtgcagcacaaacctaaggaggataaactgcggctcgcacaggagctttccgacatggtcatatactgcaaatctgtacatttcgggggtttttcttcaccaggaacgccagggcaggcattttatgaaatggcttccttctccgaaaatcgtgcactgagactcttgcaggaatctggaaatgggtttgtgaggcataatgttggccacttgagcagaatctaccctgcaggatggagaacagactcatctaattattctcctgtggagatgtggaatggaggatgtcagatcgtagcactcaacttccaaacacccggtcccgagatggatgtttatcagggcaggtttcaggacaacggcgcatgtgggtatgttttaaaaccagcctttctgcgcgacccgaatggcaccttcaatcccagagccctggcccaagggccttggtgggccagaaaacgcctcaatatccgagtgatctctgggcagcagctgcctaaagtcaacaagaataagaattcgatcgtggatccgaaggtgactgtcgaaatccacggagtgagtagggacgtggcaagcagacagaccgcggtgattaccaacaacggatttaacccatggtgggatacagagttcgccttcgaagtggttgtccctgacctggccctaatccggttcctggtagaagactacgacgcgtcctctaagaatgatttcattggacagtctaccatccctctaaacagtctgaagcagggctaccggcacgtacacctcatgagcaaaaacggcgatcagcacccctccgccacgctgtttgttaagatctccttgcaggattag

SEQ ID NO: 234910 - DNA, 6909 bp, synthetic construct
  misc_feature 1..6909: note = Description of Artificial Sequence: Synthetic coding sequence
  source 1..6909: mol_type = other DNA
atgactagtgaggaaatgacggcatcagttcttataccagtgacccagagaaaggttgtttcagctcagtctgctgcagatgaatccagcgagaaagtgtctgacatcaatatatcgaaagcacatacagtgcgacggtccggggaaactagtcataccatcagtcagctaaacaagcttaaggaggagccttctgggtctaacctccccaaaatcctatccatcgcgagggaaaagattgtctccgacgagaacagcaatgaaaagtgttgggagaaaattatgccagactcagccaagaatctgaacattaattgcaataacattctgcggaaccaccagcacggacttccacagcggcagttctacgaaatgtacaacagcgtggctgaagaagacctctgcctggagactggaatccccagtcccctcgaacgcaaagtgtttccaggtattcagctggagctggatcgcccttcaatgggtatttcccccttaggaaaccagagcgtgattatcgagacagggagagcacaccctgactcacggcgagccgttttccatttccactatgaggtggatcgaagaatgtccgatactttttgcacactcagcgagaacttgatactggacgactgcgggaactgcgtccccctgcccggtggcgaagaaaagcagaagaagaattatgtggcctatacctgtaagctgatggaactggcaaagaactgtgacaataaaaacgaacagcttcagtgcgaccattgcgatacactgaatgataaatacttttgttttgagggctcttgtgagaaggttgacatggtatatagtggcgattctttctgccgaaaggattttacagattcacaggctgccaaaacttttctttctcactttgaggatttccccgataattgtgatgatgtcgaggaggatgcctttaaatctaaaaaggaaaggtccactttgctcgttcgacggttttgtaaaaacgaccgtgaagtcaagaagtctgtctatacgggcactcgcgctatagtccggacattaccgagtggccacatagggttaacggcatggagttacatcgaccagaaaagaaacggcccactgctgccgtgtgggcgtgtgatggagcccccatcaaccgtcgaaatccgccaggacggcagccagcgattatccgaagcccaatggtaccccatctacaatgccgtgcgaagggaagaaactgagaacaccgtgggaagcttgttacactttctgactaagctgcccgcatctgagacagcacacgggaggatttctgtgggcccatgcctgaagcaatgcgtgcgcgacacagtatgtgagtatagagcgacacttcaaagaactagtatctcacaatatattacaggttctttgttagaagccactacttccctcggagccagatcaggcctgctttctacttttggcggaagcacaggaaggatgatgctgaaggaacgccagcccggtccgagtgtggctaattcaaacgctttgccctctagcagtgctggcattagcaaagagctgatcgatctgcagcccctgatccaatttcccgaagaggtcgcatctatactgatggagcaggaacaaactatttaccgcagagtgctcccagtggactatctgtgtttccttactcgggatctggggacaccagagtgccaatctagcctgccttgcttgaaggcttcaatctcagcatctatcctgacaacccagaacggagagcataatgcgttagaagatctggtcatgcgatttaatgaagtgtcgagttgggtcacctggctgatactgacagccggttcaatggaggagaagagagaagtttttagctatttggtacatgtggccaagtgctgctggaacatggggaactacaatgccgtgatggaattcctggctggcctcaggagccgtaaggtcctcaagatgtggcaattcatggaccagtctgacatcgagacgatgcggtctctgaaagacgctatggcacagcatgagagctcctgcgaatataggaaagtggtaacacgggctctccacatacccggatgtaaggtggtgcccttttgtggagtttttttgaaggagctgtgcgaggtgctagatggcgcatcaggtctcatgaagctgtgtcccaggtacaatagtcaagaagagacactcgaattcgttgccgattattcagggcaggataatttcttacagagggtgggccaaaacggcctaaagaacagtgagaaggagagcacagttaactccattttccaggtaatccgtagctgtaatcgtagcctggagacggacgaagaggactcaccatctgaagggaattccagtaggaaatcctccctgaaagacaaaagccgctggcagtttattattggggatctgctggattccgataacgacattttcgagcaatcaaaagaatacgacagtcacggcagcgaagattcccagaaagccttcgatcacggcaccgagctaattccctggtatgtgctatcgattcaggccgatgtgcaccagtttttgctgcagggcgctactgttattcattatgaccaagacactcacctgtctgccagatgcttcctgcagctacagcctgataatagcactctcacctgggtaaaacccaccactgcaagccctgcaagtagcaaagctaaactgggtgtccttaataatactgccgaacccggaaagtttccactcctggggaatgccggattaagctctctgactgaaggtgttttagacctgtttgccgtgaaggcagtgtacatgggacacccaggcatcgatattcataccgtgtgcgtgcaaaacaagctgggctccatgtttctgagtgagacaggtgtgactctgctgtatggccttcagactactgacaatcgtttgttgcatttcgtcgcacccaaacatacagccaaaatgctctttagtggattactcgagctcacaagagcagttagaaagatgcgaaagtttccagaccaacggcagcagtggctgcggaagcaatatgtgtcactctatcaggaagacggcaggtatgagggccctactcttgcccacgccgttgagctattcggagggaggaggtggagcgcgagaaacccatcaccaggcacctccgctaagaatgccgagaaacctaacatgcagaggaacaatactctgggaatcagtaccactaaaaagaaaaagaagattttgatgagaggagaatcgggagaagttacagatgacgaaatggccacacgcaaagccaagatgcacaaggagtgtcgcagccggagcggtagcgatccccaggacattaatgaacaggaagagtctgaggtaaatgctattgccaacccccctaacccgctgccaagtcgtcgggctcattccctgacgacggctgggagtcccaatctagctgccggtacaagcagcccaattcgacccgtttcgtctccggtactgagtagctccaacaaaagtccctccagcgcttggagctcctcctcctggcacggacgcatcaaaggtgggatgaaaggatttcaatctttcatggtgtctgactcgaacatgtcctttgtggagttcgtagagctttttaagtccttttccgtgcgttcacggaaggatctcaaagatctgttcgatgtttacgccgtcccctgtaataggagtggatcagagagcgcccctctgtatactaatctgactatcgacgaaaacacatcagatctgcagccagacctggacctgcttacaagaaacgtaagcgatctaggcctgttcatcaagtccaagcagcagctctccgacaaccagcgccagatcagcgatgctatcgctgccgcatctatcgtgacgaatgggaccggcatagagtctacctcactgggaatctttggcgtgggtatcctgcagctcaatgacttcctagtgaattgccagggggaacattgtacctacgatgagattctctccatcattcagaagttcgagccatcaatcagtatgtgtcatcaggggctcatgagcttcgagggcttcgccagatttttgatggacaaagagaactttgccagtaaaaacgacgaaagccaagaaaatattaaagagctgcagctccctttgtcctactactacattgagtcaagtcacaatacatacctcacaggtcatcaactgaaaggggaatcatccgtggagctctacagccaggtgctgctgcaaggctgccgctcagtcgaactggattgctgggacggagacgacggcatgccgatcatttatcatggtcacaccctgaccacaaagattcccttcaaggaggttgttgaggcaattgatcgcagtgctttcatcaacagcgacttaccgatcattattagcatcgagaaccattgtagcctccctcagcaacgcaagatggcagaaatatttaagacagtgttcggggagaagctggtaacgaagtttctttttgagacagatttcagtgacgatcccatgctgcccagtcccgatcagttgcgcaagaaggtcctgctcaagaataaaaaactcaaagctcaccagactccagtagacattctgaaacaaaaagctcaccaactcgcctctatgcaagtccaggcgtataacggcggaaatgcaaacccgaggcctgccaacaacgaggaggaggaggacgaagaagatgaatacgactacgactacgagtctctgtccgacgacaacattctggaagacagacccgaaaataagtcctgtaatgacaagctccaatttgaatacaacgaggagatccctaagcgaatcaaaaaggcggataactctgcctgtaataaaggcaaggtttatgatatggagttgggggaagaattctatttggaccagaacaagaaagaaagccgccagatcgccccagaattaagcgatttggtgatttactgtcaagccgtcaaattccctggcttgagcacccttaacgcctctggcagtagccgagggaaggagcggaaatctaggaaatctatattcggcaataaccctggtcggatgagtcccggagagacagcctcctttaacaagacctctggcaagtcttcttgtgaaggtattcggcaaacgtgggaagagtcctcaagcccattgaacccaacaaccagccttagcgctatcattcgaacgccgaaatgctaccatatatcatcactgaatgaaaacgccgcaaaacggctgtgccgcaggtactcacagaagctgacacagcacaccgcatgtcagctcctccgtacctatccagccgcaacaaggattgactccagcaacccaaatccactcatgttttggctccacggcattcagctggtcgccctgaattatcaaaccgacgacctccccctccatttgaatgcagccatgttcgaggccaatgggggttgtggctacgtgctgaagccccctgtcctatgggacaagaactgccctatgtaccagaagttttctcccctggaaagggatctggactccatggatcccgcagtttattccctaaccattgtcagcgggcagaacgtgtgcccttcaaattctatgggctctccctgcattgaagtggacgtgctcgggatgcctctggactcatgccatttccgcaccaagcccattcataggaacaccttaaaccctatgtggaatgaacagtttcttttccacgtgcactttgaagatcttgtgttcctgcggttcgccgtagtcgaaaataactcaagcgcagttactgcccagagaatcatccctctgaaggcactgaagagagggtataggcatctgcaactgcggaacctgcacaatgaggttctggagatttcttcgttgttcatcaactcaaggcgaatggaggagaactccagcgggaacaccatgtctgccagctccatgttcaacaccgaagagagaaaatgtctgcagacccacagggtgacagtccacggagtgcccggacctgagccatttaccgtgttcaccattaatggcggaactaaggccaagcaattgttgcaacagatattgaccaacgaacaagatatcaagccagtcactacagattacttcctcatggaggagaagtatttcataagtaaggagaaaaatgagtgtcggaagcagccatttcaaagggctataggtccagaagaggagattatgcaaattttgtcctcctggttccccgaggaagggtatatgggacggatagtccttaagacccagcaggagaacctcgaagaaaaaaatatagtgcaggatgacaaagaggtcatcctgtccagtgaggaggagagttttttcgttcaggtgcatgatgtgtcccctgagcagccacgaaccgtgataaaagcccctcgggtgagcactgctcaagacgttatccagcagacactgtgcaaggccaagtactcatattcaatactgtccaatcctaacccgtccgattatgtgcttttggaggaagtcgtcaaagatacaacgaacaagaaaaccacgactcccaagtcttctcagcgggtcctgctggaccaggaatgtgtgttccaagctcagtcgaagtggaagggcgctggaaagttcatcctcaagctcaaggagcaagtgcaggcatctcgggaagataagaagaaagggatcagctttgcttcggagctcaagaagcttacaaaatcaactaaacaacctagaggcctgacttctccatcccagctgctcacatctgagtccatccagaccaaggaggagaagccagtggggggtttgtctagctctgataccatggattaccgacagtac

SEQ ID NO: 234911 - DNA, 5985 bp, synthetic construct
  misc_feature 1..5985: note = Description of Artificial Sequence: Synthetic coding sequence
  source 1..5985: mol_type = other DNA
atggtgagcgaaggctctgctgccggacgtgactttgcaggcatggaagaagtgaggcaactccatgtgaggttctgtaaaggtattaaaatatggcaccaggcctggtttctgtgctctctgctggggagagagcctcaagagcgggaggccggttgccagttgtggctttgtacactgtccgctgtgctgaaggtggggtggctgttccccctgagtgaggttcccaattttacccttctcaaagatgggtgcggctgctggaggctgaaggaagatcaaatttacaatgcagtgcggagggaagagactgagaatacggtgggaagtttgctgcatttccttaccaaactcccagcaagtgagaccgcgcacggcaggatatcagtcgggccttgtctgaagcagtgcgtcagagatacggtatgcgagtatagagcgacacttcagcgcacatcgatcagccaatacattacaggcagtctgctggaggcaacaacttcgttgggagctaggtccgggctgctgtcgacttttggaggctctaccggcaggatgatgttaaaggagagacagcctggacccagtgtggcgaacagcaatgccctcccaagtagctctgccggtatcagtaaggaactgatcgacttgcagccactcatccagtttccggaagaagtcgctagtatactgatggagcaagaacagacaatttatcggagggtccttccagtggactacctctgtttcttaacccgcgacttagggacacctgagtgccagagctctcttccctgcctgaaggcctcaatctccgccagcattctcactacacagaacggggagcataacgccctggaagacctagtcatgcggtttaacgaggtcagcagctgggtgacatggctcatcctcaccgcaggatccatggaggaaaaacgcgaagtattcagttacctggtacacgtcgcgaagtgttgttggaacatgggcaattacaatgcagtgatggagttcttggccggtttgcgctcaaggaaagttctgaagatgtggcaattcatggatcagtctgatatcgagacaatgagaagtcttaaagatgccatggctcagcacgaaagtagctgtgagtaccggaaggtcgtgacacgcgctttgcatattccaggctgcaaagtggtgcctttctgtggagtatttcttaaggagctttgtgaagtgttggatggcgcttctggccttatgaagctctgtcctagatataactcccaggaggagacacttgaattcgtcgcggattacagcggccaagacaacttcctgcagcgggtgggtcagaacggacttaaaaatagcgaaaaggaatctactgtgaatagcatctttcaggtcatccgcagctgcaaccggtcccttgagaccgacgaggaggattccccctccgagggcaactcctccaggaagagtagcctgaaagacaagagcagatggcagtttattattggggatcttctggactccgataatgatattttcgaacagagtaaagagtacgacagccacggctctgaggacagccagaaggcgttcgatcacgggactgagctaattccatggtacgtgctgagcatccaggctgatgtacaccagttcttactgcagggagcaactgttattcactatgaccaggatacccacctgagcgcgagatgctttcttcagctgcagccggataacagtactctgacgtgggtaaaacctaccacagcatcccccgcttcttctaaggcaaagctaggcgtacttaataacaccgcagagccaggaaagttcccgctcctggggaatgccggattgtcctcacttacagagggggtactggacttatttgccgtgaaggcagtctatatgggccaccctgggattgacatccacactgtctgcgttcagaataaattgggctcaatgtttttgtccgagacaggtgtgacactgctttatggattacaaacaactgataatagactgctgcacttcgtggcacccaaacacaccgccaagatgctgttctccggcctgttggaactaacgcgggcagtacgcaagatgcggaagtttcccgatcagcgtcagcagtggcttaggaaacagtacgtctccctgtatcaggaggacggcaggtatgagggtccaaccctggcccacgctgtagagcttttcgggggacgtagatggtcagccaggaacccaagcccgggaacaagtgcaaagaacgcggagaaacccaacatgcagcgaaataacaccctcggtatttcgactacaaagaaaaagaaaaagattctgatgagaggggagagcggggaggtaactgacgacgaaatggccactcggaaagctaagatgcataaagaatgcaggtcccggtcggggagtgacccacaggacattaatgaacaggaggagtcagaggtgaatgcgatcgccaacccaccaaatcccctgcccagccggcgtgcacactccttaacaaccgctggctctcctaacctagccgcaggcacctctagccctatcagacctgtgtcctcacctgtccttagctctagcaataagagtccctcatccgcttggagcagctccagctggcacggtcggatcaagggaggcatgaagggattccagtccttcatggtgtcggattccaatatgagtttcgtcgagttcgtggagttgtttaagtctttctcggtgaggtctcggaaagatctgaaggatctcttcgatgtctatgcagtgccctgcaacagaagcggctccgagtctgctcctctctacacaaatctgactatcgatgaaaatacttccgacttgcaacctgatttggacctgctgacgagaaacgtttcagacctaggcctctttatcaagagcaagcagcaactctcagataaccagcgccagatctcagacgctattgctgccgcatcaatcgtcactaatggaactggtatcgagtccacatctctggggatattcggggtcgggatccttcagcttaacgattttctggtcaactgccaaggtgaacactgcacctacgacgaaatactgtccataatccagaagttcgaaccttcaataagcatgtgtcaccaaggactgatgtcatttgaggggttcgccagattcctgatggacaaagagaattttgcttcaaagaatgatgaaagccaggagaacataaaagaacttcaactgcccctgtcctactactatattgagagctcacacaatacatatctcaccgggcatcagctcaagggtgagtcttccgtcgaattgtattcacaggtgctgcttcagggatgtcgctcagtggaattagattgctgggacggcgatgatggcatgcctatcatctaccacggccatactttgactactaagatcccctttaaagaggtggttgaggcaatcgaccgctcagcatttattaactccgacctgccaataatcatttccatcgagaatcattgctcacttccgcagcagcggaaaatggccgaaatattcaagaccgtattcggtgagaagctggttaccaagttcttatttgaaacagatttctccgatgatcccatgcttccttcacccgatcagttaagaaagaaagtgttgcttaaaaacaaaaagttaaaagcccaccagacgccagttgacatactgaaacagaaggcacatcagctcgccagcatgcaagtccaggcttacaacgggggaaatgcaaacccgagaccagctaataacgaagaggaggaagacgaggaagatgagtacgattatgattacgagagccttagcgatgacaatattctggaggatcgtccagagaacaagtcttgtaacgataagctacagttcgagtataacgaggaaattccaaagcggataaagaaagctgataattctgcctgtaataagggcaaggtctacgacatggaactcggggaagagttttaccttgaccagaacaagaaagagagccgtcaaatcgccccagaattgtctgacctggtcatctattgccaggcagtcaaatttcccggtttatccacactgaatgcatcgggcagcagtcggggaaaggaacggaagtctagaaagagtatattcggaaacaatccgggtcgaatgtcccccggtgagacagccagtttcaataaaaccagtggcaaatcaagttgcgaggggattcggcagacgtgggaggagtcttcttcaccgctcaaccctactactagcttatctgccatcattagaactcccaagtgttaccacattagctctcttaacgaaaacgccgcaaagaggctctgccgtcgttacagtcagaagttaacccagcacactgcttgccaactgctgcggacatatcctgcagcgacgcggatcgatagttcaaaccctaaccccttaatgttctggttgcacggcattcaactcgtggctttgaactaccagacggacgacttgccgctgcaccttaacgctgccatgttcgaagcaaacggcggatgcggatacgtacttaagcccccagtcctctgggataagaattgtcctatgtaccaaaagttttcccccctggaacgcgacctggactctatggacccggctgtttactctttaacaatagtgtccggccagaacgtttgcccatcaaacagtatgggaagtccttgcattgaagtggacgtattaggaatgccccttgacagttgtcactttaggaccaagcctattcataggaatacactcaaccctatgtggaacgagcagttcttatttcacgtacacttcgaagatctggtttttcttagatttgccgtggtggaaaataactcctctgcagtgaccgcacagagaatcatccccctgaaggctctgaaacgaggatacagacatttgcaacttagaaacctccataacgaagtgctcgagatctcgagcctgttcattaattccagacggatggaagaaaatagttccggcaacaccatgtctgcctccagcatgtttaataccgaagagcgcaagtgtttgcaaactcacagggtgacggtccatggcgttccaggccctgaaccgttcaccgtgttcactattaatgggggaaccaaagccaagcagctgttacagcagatattaaccaatgagcaggacattaagccagtgaccaccgactactttctgatggaggagaagtatttcatttccaaggagaaaaacgagtgcagaaaacagccattccagcgggctattggccctgaggaggaaatcatgcagatcctgtcttcctggttccctgaagagggctacatggggagaattgtcttgaagacccaacaagagaacctggaggaaaagaatatcgtgcaggatgacaaagaggttatactgtcgtccgaagaggagagctttttcgtgcaggtgcatgacgtcagccccgaacaaccgaggacagtcataaaggcgccaagagttagcactgcccaggatgttattcagcagactctgtgtaaagccaaatattcatacagcatactgagcaatcctaatccgtccgattatgtgctactagaagaagtcgtgaaggacacgaccaataaaaagacaacaacacccaaaagtagtcagcgagtgctgctggatcaggaatgcgtcttccaagctcaatccaagtggaaaggtgctggcaaatttattctgaaattgaaggaacaggtgcaggccagtcgggaggacaagaaaaagggaatctcgttcgcgagtgagctgaagaaactcactaaaagtactaagcaaccccgtggactgacttccccttcccagctgctgacttccgaatccattcaaactaaggaagaaaagcctgtaggcggtctgagtagctctgatacaatggactaccggcaatac

SEQ ID NO: 234912 - DNA, 6938 bp, synthetic construct
  misc_feature 1..6938: note = Description of Artificial Sequence: Synthetic coding sequence
  source 1..6938: mol_type = other DNA
atgactagcgaagagatgaccgccagtgtgctcatccctgttactcagcgaaaggtcgtgagcgcccaatctgccgcagatgagtcttccgaaaaggttagcgatattaacattagcaaggctcacacagtgcggagatcaggggagacgtcccatacaatatctcagttaaacaagttgaaggaagagccgagcggatccaatctgcccaagatcttaagcatcgcgagagaaaagattgtatcagatgagaacagcaacgaaaaatgctgggagaagattatgcccgattctgcaaagaatctgaacatcaactgtaacaatatcctaagaaaccaccagcatgggttacctcagagacagttttacgaaatgtacaactctgtcgccgaagaggacctctgcctcgagactgggatcccgtctcccctagagagaaaagtttttccaggtatccagctggaactggacagaccttcgatggggatttccccacttgggaaccagagcgtgatcatcgaaaccggtcgggctcaccccgattcccggagagcagtttttcattttcactatgaggtggaccgtaggatgagcgatacattttgtacactgtcagagaaccttatcctcgatgactgtggtaattgtgtgcctcttcccggtggcgaagaaaagcaaaagaaaaactacgtcgcctacacctgcaaactgatggaactggcaaaaaactgtgacaataaaaatgaacagctccaatgtgaccactgcgatactttaaacgacaaatatttctgttttgaagggtcttgtgaaaaggttgacatggtctatagcggagactccttctgccgaaaggacttcaccgattctcaggcagccaagaccttcctgtcacattttgaggattttcccgataactgtgatgacgtggaggaggacgcttttaagagcaaaaaagagaggtccaccctcctggtgcgtcgtttttgcaagaacgatcgggaggtcaaaaaatctgtgtacacaggcactcgggctatcgtgcggacgttgccatccggtcacattggtctgactgcatggtcttacatcgaccagaaacgcaacggcccattgctgccgtgcggtcgcgtgatggagcccccatccaccgtcgagatccgtcaggacggcagccagcgactgtcagaggcccaatggtatcccatctacaatgcagtcaggcgcgaggagaccgagaataccgtcggaagcttgctgcattttctgacaaaactacctgcttcagagaccgcccatggacgaatctctgttggcccttgcctgaagcagtgcgtcagagacaccgtttgcgagtaccgtgctaccctgcaacgaacttcgatttctcagtatatcacaggctctttattagaggcaacgacatccttaggcgctagaagcggcctgctcagtacattcgggggaagtactgggagaatgatgctcaaagaacgccagcccggaccctccgttgccaattcgaacgccctccccagctcttcagcgggaatcagcaaagaactgatcgacctccaacccctgatccagttcccagaggaggttgctagcatactgatggaacaggaacagaccatataccggagagttctgccagttgactacctatgtttcctgacaagagatctaggaacaccggaatgccagtcatcacttccatgtttaaaggcgtccatttcagcctctatcctgaccacccagaatggtgaacacaacgccctcgaggacttagtcatgagatttaatgaggtgtctagttgggtgacttggctgatcctaactgccggtagcatggaagagaagagagaggtgttttcttatctcgtccatgttgctaaatgttgctggaacatgggaaattataatgccgtgatggagttccttgccggtttaagatcgaggaaggtcctgaaaatgtggcagtttatggatcaatctgacattgagacaatgaggtctcttaaagacgctatggcccagcacgaaagttcctgtgaatatcggaaggtggtgactcgggctcttcatatcccaggatgcaaggtggttcctttttgtggagtgtttctgaaggagctctgtgaggtgctggacggagctagcgggctgatgaagttgtgtcctcggtacaattcacaggaggaaactttggaattcgtcgccgattactccggccaggacaattttcttcagcgcgtgggccagaatggcctaaaaaatagcgaaaaggagtccacagttaatagcatttttcaggtgataagatcctgcaataggtccctcgagacagacgaagaggacagtcctagcgagggtaacagtagccgaaagtcttccttgaaggacaaatcgcggtggcagttcataataggcgatctcctggactctgacaatgatatcttcgaacaatcaaaagagtatgactctcacggctccgaggattctcagaaggcctttgatcacggcactgagctgattccttggtatgttctgagcattcaagcagatgttcatcagtttctactgcagggtgctaccgtgatccactacgaccaagatactcacctatccgctcggtgtttcctgcagctgcagccagataattctactttgacatgggttaagccgaccacagcaagtcctgcctcctctaaagccaagctcggcgtgctgaacaataccgcggagcccggaaaattccccctgttgggaaacgctggcctgtctagtctgacagaaggcgttttggatctgtttgctgtcaaggccgtgtatatggggcatccaggtattgatatccacacagtgtgtgtgcagaataagctgggctcaatgttccttagcgagaccggagtgactctgctgtacggcttgcagaccactgacaaccgcctgctgcactttgtggctccaaaacataccgctaagatgctgttttccgggctgctggaactgactcgggctgttagaaaaatgcggaagttccctgatcagagacagcagtggctccgcaaacagtatgtctctctgtaccaggaggacgggcgatacgaaggtccaactctggcacacgcggttgagctgttcggcggaaggcgctggtctgcccgaaatccctcccctggtacgagcgcaaaaaacgccgaaaaaccgaacatgcagagaaataacaccctggggatatcgacaactaagaagaagaagaagatcctgatgaggggcgagagcggggaagtgacagacgatgagatggcaacaaggaaggcaaagatgcacaaagagtgcagatcacgaagcggcagtgatccccaggacatcaacgagcaggaagagagcgaagtgaacgctatcgccaaccccccaaaccctcttccttccaggagagctcacagtctgactacagctggctctccaaatttagccgcaggaactagctctcccattagacctgtatcatccccagtcctgtccagctctaacaaatccccgagtagtgcgtggtcatcgtcatcttggcacggcaggatcaaagggggtatgaaagggttccagagcttcatggtgagtgactccaatatgtcctttgttgagttcgttgaactctttaagagcttctcggtaagatcaagaaaggacctgaaggacctatttgacgtttatgccgttccttgcaaccgatctggctcggagtctgccccattgtacactaatctcacaatcgatgaaaacacgtctgatctgcaacccgatctcgacctccttacccgtaacgtatcagatctcgggttgttcatcaagtctaagcaacagctgtcggacaatcagagacagatctccgacgccatcgccgctgcatctatcgtgactaatggtacgggaattgaatctacgtctctgggcatcttcggcgttggcatcctgcagctcaatgactttttagtaaattgccagggtgagcactgtacctacgacgaaatcctctccattatccagaaattcgagccatccatttccatgtgtcaccaaggactgatgagcttcgaaggttttgcacggtttcttatggataaggagaattttgcctctaaaaacgatgagagccaggagaacatcaaagaactgcaactccccctgagctactactatatcgagagcagtcacaacacgtatctgacaggacaccagctgaagggtgagagcagcgtcgaactctatagccaggtattgctccaagggtgccgatcagtcgaattggattgttgggatggcgatgatggaatgcccattatttaccacgggcatacattgacgacaaaaatcccgtttaaagaagtagtggaagccatcgatcgctcggcattcatcaattcagatctccccatcataattagtatcgagaatcactgctctctgccccaacagagaaagatggccgagattttcaaaacagtgttcggcgagaagctggtcaccaagttcctgttcgagactgacttcagcgacgatcctatgcttccttcacctgaccaactccgaaagaaagtgttgttgaaaaataaaaagctgaaggcccatcagactcctgttgacatactcaagcagaaggcacaccagttagcaagcatgcaggtgcaggcctataatggtggaaatgccaatccacgacccgcaaataacgaggaggaagaagacgaggaggatgagtacgattacgattatgaatccctttccgatgacaacatccttgaggaccggccagagaacaaatcctgcaatgacaagctccagttcgagtacaacgaggaaattcctaagaggattaaaaaagcggacaacagcgcctgtaataaaggtaaagtgtatgacatggagctgggcgaggaattttacctggatcaaaacaaaaaggaatccagacagatcgcccctgaactgtcggacctcgtcatttactgccaggcagtaaagtttccaggcctgtccaccctcaatgcttcaggcagctcccgcggaaaggagaggaaatctcgcaagagcatattcgggaacaatcctgggaggatgtcacccggtgaaaccgcatcctttaacaagacgagtggaaaaagctcttgcgaaggcatccgccagacatgggaggaatcctcctctcctctgaatccaaccacctccctgagtgctatcattcgcacccctaagtgttaccatatttcctccctgaacgagaacgccgctaagaggctgtgtcgtagatattcacaaaagctcactcagcatacagcgtgtcaattgcttcgcacctaccctgctgccactcgaatcgatagcagcaatccaaatcctctgatgttctggctgcacggcatacagctagtcgccttaaactatcaaacagatgatctgccactccacctgaacgctgcaatgtttgaggctaatggaggatgtgggtacgttctgaaaccccctgtgctatgggacaagaattgcccaatgtaccagaagttctcccctctggaacgcgacctagacagtatggatcccgcagtgtacagccttactattgtgagcggccaaaacgtttgcccctcaaactcaatgggatctccttgtattgaagtcgacgtgctgggcatgcccctcgattcatgtcacttcagaactaagccgattcacagaaacacactgaacccaatgtggaacgaacagtttctgtttcatgtgcactttgaggacctggttttcctgaggtttgctgtagtcgaaaataacagctctgcggtgaccgctcagcgaataataccgctgaaggccctgaagcggggttacagacaccttcagctgcgaaatctccacaatgaagttctcgagattagttccctatttattaattcccgcaggatggaagaaaattcatccgggaatacaatgagtgcaagctctatgttcaatactgaagaacgtaagtgtctgcaaacccatcgcgttactgtccatggggtaccaggtcccgaaccatttacagtgttcactatcaatggagggacgaaagcaaagcaactgctgcagcagatactcacaaacgaacaggatataaagcccgtgactacagactacttcctaatggaggaaaaatattttatctccaaagaaaagaacgaatgccggaagcagcctttccaacgcgctatcggccctgaagaggagatcatgcaaatcttgtctagctggttccccgaggagggctacatgggaagaatagtgttaaagacccagcaggagaatctcgaagaaaaaaacatcgtgcaggatgacaaagaggtgattcttagttccgaagaggagtcctttttcgtccaggttcacgacgtgtccccagagcagccccgaacagtgatcaaagccccaagggtgtctacggctcaggatgtgattcagcagaccctctgtaaagcaaaatatagctactcaattttaagcaacccaaacccaagtgattacgtgctgcttgaagaggttgtgaaggataccactaataaaaagaccaccacacctaaatcttcccaaagagtgttactggaccaggagtgcgtgtttcaggcgcagagcaaatggaagggcgctgggaagttcatactgaagctgaaagaacaagttcaggcttctagggaggataagaaaaaaggaatcagctttgcctccgagttgaaaaagcttacaaagtctaccaaacaaccaagagggctcaccagccccagccaacttctaactagtgaaagcatccagacgaaagaggagaagcctgtgggcggtctcagctctagcgacaccatggattaccgccaggttaagatcttcaaacaagaagtaaaggagta

SEQ ID NO: 234913 - DNA, 5985 bp, synthetic construct
  misc_feature 1..5985: note = Description of Artificial Sequence: Synthetic coding sequence
  source 1..5985: mol_type = other DNA
atggtctccgaaggcagtgccgcaggtcgtgatttcgccggtatggaggaagtgagacagttgcacgtgcgtttttgcaagggtatcaagatttggcaccaggcatggtttctatgtagtctgctgggcagagagccacaggaacgagaagcaggctgtcagctgtggctgtgcacactgtccgccgtgctcaaggtcggatggctgttcccactttccgaagtgcccaacttcacacttctgaaggacgggtgtggctgttggaggctgaaagaggaccagatatacaacgcagtgagacgcgaagaaacggagaacaccgtgggctctctattacacttcctgaccaaactgcccgcttcagagacggcacacgggagaatcagcgtcggcccatgccttaaacagtgcgttagagacacggtgtgcgaataccgagctactctgcaaaggaccagtatttcccaatacatcaccggctccctgctcgaggcaacgacttccttaggggctcggtcagggctactgagcactttcggagggtcaactgggaggatgatgctcaaagaaaggcagccaggtccttcagtggcgaattctaatgccttgccttcttctagtgccggaatttccaaagagctaatagacctgcagcccctcattcagttcccagaagaggtggcctctatcctgatggagcaagagcagactatctatagacgagtgttgcccgtggattatctttgctttctgacacgggacctcggcacccctgagtgccagtcgtcactgccatgtctgaaggcctccatcagtgcctctattctcactacgcagaacggagaacacaacgcccttgaggatttggtaatgaggtttaacgaggttagctcttgggtgacttggctgatcctgacagcgggaagtatggaggaaaaaagggaggttttcagctaccttgtccatgtggcaaaatgttgctggaacatgggcaactataacgccgtgatggaatttcttgctggcctgcgctccaggaaagttcttaaaatgtggcagttcatggatcagtcggacatcgagactatgcgttccctgaaggatgcaatggctcagcatgaatccagctgtgagtatagaaaggtggttacacgagctttgcacataccaggctgcaaagtagttcccttttgtggggtcttcctcaaagagctgtgtgaagtgctggatggagcctcaggcttaatgaaactgtgcccacgctacaacagccaggaagaaaccctggagttcgttgcagattacagcggacaagataatttcctccagagggtgggccagaacggccttaagaatagcgagaaggagtccacagtgaattctattttccaggtgatcagatcttgtaataggtcactcgagacagatgaagaggatagcccatctgagggaaattcgtcgcgcaagagctcactcaaagacaaaagccgctggcagttcatcatcggcgatctgctggattccgacaatgacatattcgagcagagtaaagaatatgatagccacggtagcgaggacagtcagaaggcattcgaccacggcaccgagttaataccgtggtacgttctttcgattcaggctgacgtccaccaatttctgctacaaggagccaccgttatccactatgatcaggatacccacctaagtgcaagatgctttcttcaacttcagccagataactcaaccctgacatgggtgaaacctacgacagcctcaccagcatcgagcaaggctaaattgggagttctgaacaacaccgccgaacccggaaaatttcccctcttaggaaacgccggactgtcctcgctgacggagggagtcctggacctcttcgccgtgaaggcggtgtatatgggccacccgggaatcgatattcacaccgtatgtgtgcaaaataagctagggtcgatgttcctcagtgagacaggagtgaccttgctgtatggtctgcagacgaccgataaccggctgttacacttcgtggcgccaaaacacacggccaaaatgctcttttcaggcctgctagagttaactcgagcggtaaggaaaatgagaaagtttcctgaccagcgccagcaatggctgcgtaagcaatacgtctcactatatcaggaggacggtagatatgaaggaccgactctcgcccacgcagtggagctgtttggaggacggaggtggagcgccagaaaccccagccccggtacgtcagctaagaacgcggagaaaccaaatatgcaaagaaacaacacactgggaatttctactactaagaaaaagaagaagattctgatgcgcggtgaatccggcgaggtgactgacgatgagatggccactagaaaggcaaaaatgcacaaggaatgcaggtctcgctctggaagtgacccacaggacattaatgaacaagaggagagtgaggtgaatgccatagctaatccacccaacccgctcccctcaaggcgcgcacactctctcacaacagctggctcgcccaatcttgctgccggaacttcatcccccatcaggccagttagcagtcccgtcctaagttcttctaacaagtctccgtcttctgcctggtcttcctcgtcttggcacgggagaattaaaggaggcatgaaggggtttcagtcctttatggtaagcgatagcaacatgtcgttcgtcgaattcgtggaattatttaagtctttctcagtgaggagtagaaaagatctgaaggatttgttcgacgtgtatgcggttccttgtaaccgatctggctctgagagtgccccactgtataccaatttgacaatcgacgagaacacctccgacctccagccggaccttgatctgttgacaaggaacgtgagcgacctgggtctttttatcaaatcgaagcaacagctcagcgataatcagaggcagatctccgatgctatagccgctgcttccattgtaacaaatgggacaggtatcgagagcacatccctcggaattttcggcgttggtatcctccagctcaacgatttcctggtcaattgtcagggggaacactgcacatacgacgagatcctgtccattatccagaagttcgagccttctatatctatgtgtcaccagggactgatgtcctttgagggtttcgcaagattcctgatggacaaagagaacttcgcatccaaaaacgacgagagccaggaaaatataaaagagctacagttgccacttagctactactacattgaatcgtcccacaacacctacctaacaggtcaccagctgaaaggggagtctagcgtggagctttattcccaagtccttctgcaggggtgtcgatcagtagagctagattgctgggatggagatgatggcatgccgatcatataccacggacacactctgactacgaagatcccgtttaaggaagtagtagaggcgatcgacagatctgcttttataaactctgatctccctattatcatatctatcgagaaccactgcagcctaccacagcaacgcaagatggccgaaatctttaagacagttttcggggagaaattagtcacgaaatttttgtttgaaactgatttcagtgatgatcctatgctccccagccctgaccagctgagaaaaaaggtattgctaaagaacaagaagttaaaggcacaccagacaccggtggacatcctcaagcagaaggctcatcagctcgccagcatgcaggtgcaggcatataacggaggcaacgcgaacccaagaccagctaacaacgaggaggaagaagatgaagaggatgagtacgactatgactatgagtccctgtctgatgacaatattttggaagacagaccagaaaacaagagttgtaacgacaagctccagtttgagtacaatgaggagattcccaagcgtattaaaaaagctgacaacagcgcttgtaacaagggtaaagtgtatgatatggaattgggcgaggagttctatctggatcagaacaagaaagagtcacggcagattgcacccgagttaagcgatctggttatctactgccaagcagtaaaattcccagggctgtccactctcaacgccagcggctcaagccgtggcaaggagaggaaatctcgaaaatctatcttcgggaacaacccgggtagaatgagcccaggcgaaacagcttcctttaacaaaactagcggcaagagctcttgcgagggcatccgccagacctgggaggaatctagttcgcccctcaatcctaccacaagtttgtctgctataattagaacccctaaatgctaccatatatccagcctgaatgagaacgcagctaagcggctctgcaggcgatactcccagaagcttactcagcatacagcatgtcagctcctgcggacatatcccgcagccacccgtatcgattcatctaatcccaacccactcatgttttggctgcacgggatccagcttgtggcgctcaactaccaaacagacgacctgccactccacctaaacgcagccatgttcgaggccaacggcggttgcgggtatgtgctaaagccccctgtgctgtgggacaagaattgtccgatgtaccagaaattttcaccacttgagcgagatctcgattcaatggacccagctgtgtactccctgaccatcgtgtccggacagaatgtgtgtcccagcaactctatggggtccccgtgtatcgaagtggatgtcttggggatgcctctagactcgtgccacttccgcaccaagccaatccataggaacaccctcaacccaatgtggaacgagcagtttctgttccacgtccatttcgaagatctggttttccttcggtttgctgtggtcgaaaacaatagctcggccgtcactgctcagaggatcatccccctaaaagccctcaagcgcggttatagacacttacagctccgcaacctgcacaacgaggtattggaaatcagctctcttttcattaactccaggaggatggaagaaaactcatcaggaaacaccatgagcgcttcttcgatgttcaacactgaagaacgcaagtgtctccagactcacagagttactgtacatggggtgcctggcccagagccattcacggtcttcaccataaacgggggaaccaaggctaaacagctcttgcagcagatcctcacaaatgagcaagatattaagcccgtgacaactgattacttcctgatggaggaaaagtacttcatcagtaaggaaaagaatgaatgtcgaaaacagcccttccagcgcgcaattggcccagaagaggagataatgcagatcctatcttcttggttccctgaagaaggctacatgggtcgcatcgtccttaagacccagcaggagaaccttgaggaaaaaaacattgtccaggatgataaggaagtgatcctgtcctccgaagaagagtccttctttgtgcaggtacatgatgtcagtcccgagcagccacgcactgtgattaaagctccacgcgtgtctacggctcaagacgtcattcagcagactttgtgcaaagctaaatactcatacagcatcctctccaaccctaacccgagcgactacgttcttctggaggaagttgtcaaagatactaccaataaaaaaaccacaactcctaaaagttcacaacgtgtcttgctggatcaggagtgcgtctttcaggcacaatctaagtggaaaggggctggaaagttcatcctgaaactcaaggaacaggtgcaggcaagcagggaagataagaagaaaggcataagcttcgctagcgaattaaagaaattaaccaaaagtactaaacagccacgcggtcttacttccccttctcaattgctgacgtcagaaagtatccagacaaaggaggaaaagcccgtggggggtctttcaagcagcgataccatggattatcgacaatat

SEQ ID NO: 234914 - DNA, 4968 bp, synthetic construct
  misc_feature 1..4968: note = Description of Artificial Sequence: Synthetic coding sequence
  source 1..4968: mol_type = other DNA
atgtctgttatgcagagcggaacgcagatgatcaagcttaaacggggtacgaaggggctggtcagattgttctacctagatgagcacagaactcggctacgttggcggccatcacgaaaatctgaaaaagctaaaattcttattgacagcatctataaggtgacggaggggcgtcagtcagaaatatttcaccgtcaggccgaaggcaattttgatccatcgtgttgtttcactatataccacgggaatcatatggagtccctggacctaattacatccaatccagaggaagcacgaacctggatcacgggtttaaagtatttaatggctggcatcagcgatgaggattccttagccaagaggcagcgaactcacgaccagtgggttaagcagactttcgaagaagccgataaaaatggcgacggtcttctgaacatcgaggaaattcaccagttgatgcacaagctaaacgttaacctacccagaaggaaggtccgtcagatgtttcaggaggcagatactgatgagaaccagggaactctgacttttgaagagttctgtgtcttttacaaaatgatgtctttgagacgcgacctgtatctgctccttctgtcttacagcgacaagaaggaccatcttacggtcgaagagctggcccagtttcttaaagtcgagcaaaagatgaataatgtgactacagactactgtctcgacattattaagaagttcgaggtgtcagaggagaacaaggtcaagaatgtactgggtatcgaagggttcaccaacttcatgaggagtccagcctgtgacatatttaacccacttcatcacgaggtataccaagacatggatcaacctctctgcaattactacatcgcttcttcgcacaacacatacctgacgggggaccagctgctaagccagtccaaagttgatatgtacgctcgagtcctccaagaaggttgcaggtgcgttgaggttgactgctgggatgggcctgacggggagccggtggttcaccacggatatactctaaccagtaagattctgtttagagatgtggtggaaacaattaacaagcacgcattcgttaagaatgagtttccagttatactgagtattgaaaaccattgctccatccagcagcagcgcaagatcgcccaatatctgaaagggatcttcggcgacaagttggatctgagctcggtggacacgggagagtgtaagcaactcccatcgccgcagtctctgaaggggaaaatcctggtgaaaggcaagaaattgccttaccaccttggcgacgatgctgaggagggtgaagtttcagatgaggattccgctgatgagattgaggacgagtgcaaattcaaactacattacagcaacggcacgaccgagcaccaagtggagagcttcattcggaagaagctcgaatcattactgaaggaatcacaaatccgtgacaaggaggaccccgactcatttactgtgagagccctcttaaaggctacacatgaaggactgaatgctcacctcaaacagtctccagatgtgaaagagagcggcaaaaaatcccatggcagatctttaatgactaatttcggtaagcacaaaaaaacaactaaatcaaggagcaaatcttattctacagacgacgaggaggatacccagcagtcaacgggtaaggaaggcggtcagctgtaccggctgggacgacggaggaaaaccatgaaattgtgtagggaactgtccgatttagtcgtgtataccaattccgtggctgctcaagacattgtggatgatgggaccacaggaaatgtgctctccttttcagagacaagggctcatcaggtggtgcagcagaagtcagagcagttcatgatctataatcagaagcagctcactaggatttatccttcagcataccggattgatagctctaactttaacccacttccctactggaacgctggatgccagctggtggcgttgaattatcagagcgaagggagaatgatgcaacttaaccgagctaagttcaaggctaatgggaattgcggctacgtgttgaagccccaacagatgtgtaaaggcaccttcaatcccttcagcggcgaccccctgcctgctaatcctaagaagcaacttatactgaaagtgatatccggccaacaactgcctaagccaccagattctatgttcggcgaccgaggtgagattatcgatccattcgtcgaggttgaaattattggactgccagtggactgttgcaaagatcagacacgagtcgtggacgataatggctttaatcctgtctgggaggagaccttgacattcacagtgcatatgcccgagatcgcgcttgtccgctttttagtgtgggaccatgaccccataggcagggactttgtaggacagaggactgttacattctccagtctcgttccagggtatagacatgtgtacttggaaggcttaaccgaggcgtccatctttgtgcacatcacaattaacgagatatacggcaaaaatcgacagttacagggcctgaaaggactgtttaacaagaacccaaggcactctagctcggagaataatagccattatgttaggaagcgctctatcggcgatagaattctgaggaggactgccagtgcacccgctaaggggcgaaagaagtccaagatgggattccaggagatggtggaaattaaggacagtgtgtctgaggccacccgagatcaggacggtgtcctgagacgtactacaaggtccttgcaggcccgacccgtttcaatgcctgtggataggaacctcctaggtgccttgagtctgccagtgagtgagaccgcaaaggacatcgaaggcaaggaaaattcattggctgaagataaggacggaaggagaaaaggcaaagcgtccatcaaggaccctcattttttgaacttcaataaaaaattatcctcctcatcaagcgccctgttacacaaggacaccagccagggcgataccattgtttcgactgcccacatgagcgtaacgggggaacagctgggcatgtcttcgccaagaggtggcagaactacgtccaacgcaaccagcaattgccaagagaatccttgccctagcaagagtttgagccctaagcaacatttggcgcctgaccccgtggtgaacccaacccaggatttgcatggcgtaaagattaaggaaaaaggcaatcctgaagattttgtggaagggaaatctatactcagtggctcagtgttgtcacattctaacctggagataaaaaacctggaggggaatagaggcaagggtagggccgcaacgtcgttctccctgagtgatgtctcgatgctgtgtagtgatattccagatctgcattctactgccattttgcaggagtcggttattagccaccttattgataatgttaccctcaccaacgagaacgaaccaggatcctctatttcggcgctcataggacagttcgatgagaccaataatcaagcactgactgtggtgtcccatttacataacacaagtgtcatgtctggacattgtcctctgccctccctggggttgaagatgcctatcaagcatggcttctgcaaaggtaagtccaagtcctcatttctctgtagctctccagagctgatcgctctgagctcttcggagaccactaagcatgcaaccaacacggtgtacgagacgacatgcacacctatcagcaagaccaagccagatgacgatctttcctccaaagccaagactgcggctctcgagtcaaaccttccgggttccccaaacacctcacgcggttggttgcccaaaagccctactaaaggcgaagactgggagaccctcaaatcttgcagccccgcaagcagtcccgacctgaccttggaggatgtgattgccgatccaaccctctgtttcaattctggggagtcgtctctcgtcgagattgatggggagtccgaaaacttgtccctcaccacctgcgagtatcggagagaaggaaccagccagctggctagtccattaaaactgaagtacaatcaaggagtcgtggaacactttcagcgaggtctccgtaacggatattgcaaggagacattacgcccaagtgtgcccgagatcttcaataatatccaggacgttaaaacacaaagcatttcctacctcgcatatcagggggctggcttcgtgcacaaccatttcagcgattccgacgctaaaatgtttcagacctgtgtgcctcagcagtcatctgcacaggacatgcatgtgcccgtaccaaaacaactcgcacacctgcccctgcccgcattaaagctgcccagcccgtgcaagtctaaaagcctgggtgacctgactagcgaggatattgcatgcaactttgaaagtaaataccagtgtatttccaaatcattcgtgacaacaggcattagagacaagaaaggcgtcaccgtgaagactaaatcactagagcccattgatgctttgacggagcagttgcgcaaattggtgagttttgaccaagaggataattgtcaggtgctctattcgaagcaagacgcgaaccaattacccagggccctggtccggaaattgtccagcagatcacaatcacgagtgcgtaatattgcatcacgcgctaaggaaaaacaggaggcgaacaaacaaaaggtccctaacccaagcaatggtgcgggagtcgtcctgcgtaataagccgagtgccccaactcctgctgtaaatagacacagcacgggatcctatatagccggatacttgaagaataccaagggcggaggattagaaggacggggtattcccgaaggtgcttgcacagcattgcattatggtcatgtcgatcagttttgcagcgataattctgttcttcagacagaacctagctcagacgacaagccggagatatacttcttattgcgcctgtag

SEQ ID NO: 234915 - DNA, 5081 bp, synthetic construct
  misc_feature 1..5081: note = Description of Artificial Sequence: Synthetic coding sequence
  source 1..5081: mol_type = other DNA
atggcagacctggaggtctacaagaatctgtcgcccgagaaggttgagagatgcatgtcagttatgcaatctggaactcaaatgattaaactcaaaaggggtaccaagggccttgtgcggctgttttaccttgatgagcatcgaacaagactcagatggaggccttctagaaagtctgagaaagccaagatcctgattgattcaatttacaaggtcacagaaggacgtcaatcggaaatctttcatcgacaggccgagggcaattttgatccaagctgttgttttacaatttatcacggcaatcacatggaatcattggatcttatcacttcaaacccagaggaagccaggacctggattactggcctaaagtatctcatggctggaatttcagatgaagattccctggctaaacgccagagaacccatgaccagtgggtgaaacagacctttgaagaagcagacaaaaatggcgatggcctcctaaatatcgaagagatccaccagctgatgcacaaactgaatgttaacctgccacggagaaaggttcgccagatgttccaagaggcagacacagacgagaaccagggtactctcacttttgaggagttctgtgtgttctacaaaatgatgtcactacgcagagacctgtacttacttttactttcctactcagataaaaaagatcatctcaccgtggaggaacttgcccaatttctaaaggtagaacagaagatgaacaatgttaccacagactattgtctggatatcatcaagaaattcgaggtgagcgaagagaacaaggtcaaaaacgtcctaggtatcgaagggttcactaacttcatgcgctcacccgcttgcgatatatttaatcctctgcatcacgaggtctaccaggacatggaccaaccattgtgcaactactacatcgcttcctcccataatacttacctcacgggcgaccaactgttgtctcagagtaaggtggatatgtatgcacgcgttttgcaagaaggctgccgttgtgtagaagtggactgttgggacggcccagatggggagcctgtcgtgcatcacggctacaccctgactagcaagattctgtttcgtgacgtagtggagactattaataaacacgcttttgtcaagaacgaattccctgttattctgagcatcgagaatcactgtagtattcaacagcagagaaaaattgcacaatacctgaaggggatcttcggcgacaagctggatctctcttcggtggacacaggcgaatgtaagcagttgccatccccacagagtctaaagggcaagattctggtcaaaggaaagaagctgccttaccacctcggcgatgatgccgaggagggtgaggtttcagatgaggactctgccgacgaaattgaggatgaatgcaagttcaagttgcactactcaaacggtaccaccgaacaccaggttgaaagctttattcggaaaaagctcgaaagtctgttgaaggagtcccaaatcagagataaagaagatccagactccttcactgttagggccctgctaaaagctacgcatgagggcttgaatgcccacctcaaacagagtcctgacgtgaaagagtctggcaaaaaaagccacgggaggagtttgatgactaattttggaaagcacaaaaagaccaccaagagcagaagtaagagttattccaccgatgacgaggaagacactcagcaatctacaggaaaggagggagggcagctgtacaggctcggccgacggaggaaaacaatgaaactgtgccgggagctgagcgatttggtagtatataccaatagcgtggcggctcaggacatcgtcgacgatggcacaaccggtaacgttctgtccttcagtgagacaagagctcaccaggtggtgcaacaaaagtccgagcagtttatgatatataaccagaaacaactcacccggatatatccttccgcctacaggatcgattccagcaacttcaaccccttaccttactggaacgcaggttgccagttagtcgctctgaactaccagtcggaaggaaggatgatgcagctaaatagggctaagttcaaagccaatggcaactgcggctacgtgctaaaacctcagcagatgtgtaaaggtaccttcaacccgttctctggagatcccctgcccgcaaatcctaaaaaacagttaattctgaaagtgatttctggccagcaactgccgaagcctccggacagcatgttcggagatagaggcgaaatcatcgatccattcgttgaggtcgagatcatcggtctgcccgtggattgctgtaaagaccagaccagggtagttgacgacaacggttttaaccccgtctgggaagaaacactaaccttcacagttcacatgccggaaatcgccctagtgagatttctggtctgggaccatgatcccatcggtagagactttgttggacaacgaacggttaccttttcctcactggttccaggatataggcatgtttatctagaagggctcacagaggctagtatttttgtgcatattaccatcaacgagatctatggcaaatggagccctcttattctcaatccaagctacaccatcctgcatttcctgggtgcaactaaaaatcgccagcttcaagggctcaagggcctgtttaataaaaatcctaggcactcgtcatctgaaaacaacagccactatgtacgaaaacgaagcattggggatagaatcctgcgaaggactgccagcgccccagcaaaggggcgaaaaaaatccaagatggggttccaggaaatggtagagatcaaggattctgtatcagaagcaacccgcgaccaagacggagtactgcggcgtaccaccaggagccttcaggcgagaccggtgtcaatgcccgtagacagaaatctgctgggagccctttcactcccagtgagcgaaaccgcgaaagatattgaagggaaagagaattcactagctgaggacaaggacggtcgccgtaaaggcaaagcaagtatcaaggacccgcacttcctgaactttaacaagaagttaagctccagcagctctgcccttttacacaaggatacttcccagggagacaccattgtgagcaccgcccacatgagcgtcacaggggagcagcttggcatgtcatcgcctcggggaggcagaactacgtctaacgccacaagtaattgccaggaaaacccatgtccctccaagtctctgagccctaagcagcatttggcacctgaccccgtggtgaacccaactcaagatctgcacggcgtgaagattaaggagaagggcaatcccgaagactttgtggaggggaagtctatcctgagcggctctgtcctgtctcacagcaatttggagattaagaacttagaggggaacagggggaagggtcgagccgctacatcatttagcctctcagatgtgagtatgctgtgctctgacatcccagaccttcattctactgccatcctgcaggagtccgtcatctcccacctgatagacaatgtgacactgaccaacgaaaacgagccaggaagttccatttctgcgttaattgggcagttcgacgagacgaacaatcaagcgctgaccgtggtgagccacttacataacacatcagtcatgtccggccattgcccactgcccagtttgggccttaaaatgccgatcaagcacggattctgcaaaggaaagtcgaagtcttcattcctctgttcatcaccagaactgatcgcgttgtcgtcttcagaaaccacaaagcatgctaccaacacagtttatgaaaccacttgtacccctattagtaagactaaaccggatgacgacctctcatctaaagctaagactgcggcacttgaatcaaatctgccaggatcaccaaacacctcccgaggctggttacctaagtctcctaccaaaggcgaggattgggagacactgaagagttgttcccccgcttcaagccctgatctgacactcgaggacgtgattgcagacccaacgctgtgtttcaattctggagaatctagtctggtggagatcgatggggagtcagaaaacctttcattgaccacttgtgaataccgcagggaggggacctcacagctggcttcgccactgaaattgaaatacaatcagggcgtggtcgagcatttccagagaggcttgcggaacggatattgtaaggagactcttcggccatctgtcccagagatttttaacaatatccaagacgttaagacacagtcaatctcatatctggcttatcagggagccggttttgtgcataaccacttcagcgacagcgatgcaaaaatgtttcaaacgtgcgtcccccaacagtccagcgcccaggatatgcatgttccagtcccgaagcaacttgcccaccttcccctgcccgctctcaagcttccctcgccttgtaagagcaagagcttgggcgatctcacctctgaggacatcgcctgtaattttgaatcaaaatatcaatgcattagcaagtcattcgtcacaacaggcattcgcgataagaaaggggtaaccgtgaaaaccaagtcacttgaacccatcgacgctttgactgagcaattgaggaaactggtcagtttcgatcaggaagacaactgtcaagtgctttattccaaacaggatgcgaaccaactccctagggcattggtacggaagctgtcgtcccggtcccagagtagagtgcggaatatcgcatcccgcgcaaaggaaaaacaggaagcgaataaacaaaaggtgcctaacccctccaacggcgcaggcgtggtccttcgcaataaacccagtgcacccactccagcggtcaaccgccactctactggctcgtacattgcaggttacctcaagaataccaagggcggaggcctcgagggaaggggtattcctgagggggcttgtaccgcactgcactacggccacgtagatcaattttgctccgataactctgtgctgcagaccgagcctagttccgacgataagcctgagatttacttcttgctgcgcctgta

SEQ ID NO: 234916 - DNA, 4967 bp, synthetic construct
  misc_feature 1..4967: note = Description of Artificial Sequence: Synthetic coding sequence
  source 1..4967: mol_type = other DNA
atgtcggtcatgcagagcgggacgcagatgatcaagttaaagcggggaaccaagggactcgtacggctgttctaccttgacgaacatcggactagactgcgatggcggcctagtcggaaaagtgagaaggcaaaaatcctcatcgatagcatctacaaagtgacagaaggcaggcaatcggaaattttccaccgacaggccgagggtaacttcgacccgagctgctgctttacgatctaccacgggaatcacatggagtcgctggatctcattacctcgaatcctgaggaagctcggacctggatcaccggtttgaaatacctgatggcgggtatatccgacgaagacagcctcgcaaagagacagcgaacgcacgaccagtgggtgaagcagacattcgaggaggctgataagaatggggacggcctcctgaacattgaggaaatacaccaactgatgcataagctgaacgttaacttacctaggagaaaggtgaggcaaatgttccaggaagccgacacggacgaaaaccagggaacacttacgttcgaagaattctgtgtgttttataaaatgatgagtctgcggagggacctgtacttgctgctgctgtcctacagcgacaaaaaagatcacctgaccgtggaggaactcgcccaattcctgaaggtggagcaaaagatgaacaacgtcaccacagattattgccttgacatcatcaaaaaatttgaggtgagtgaagaaaacaaggtgaagaacgtgttgggcatcgagggcttcaccaatttcatgcgatctccagcctgcgacattttcaaccccctgcaccacgaggtgtaccaggatatggatcaacccttgtgcaattactacattgccagtagccataacacatatctgacaggcgatcagctgctctctcagagcaaagtggacatgtacgcgagagtccttcaggaaggatgtagatgcgtcgaagtggactgctgggatggacccgatggcgaacctgtggttcatcacggttacacactgacttcaaaaatcctattcagggacgtggtcgagacaataaataagcatgctttcgtcaagaatgaattccctgtcattcttagcatagaaaatcactgttctatccagcagcagagaaaaattgcgcagtatttgaaaggcattttcggcgacaagctagacctgtcgtccgtggataccggagagtgcaagcaattgcccagcccgcagtccctgaagggcaaaattctggtcaagggcaagaagctgccctatcatttaggtgacgacgcggaggaaggcgaggtgtcagacgaggactctgctgacgagatagaggacgagtgtaaattcaaactacactactctaacggaaccaccgagcatcaggtcgaatcttttatcagaaagaaacttgagtccttgctgaaggagagtcagatcagagacaaagaagacccggattcattcacagtgagagcgttgctcaaagctactcatgagggtctcaacgctcatttgaagcagagcccggacgtcaaggaatcaggaaaaaagagccacgggaggagtcttatgaccaatttcggaaagcacaagaagactaccaagagccgcagcaaaagctattccaccgatgacgaagaggacacccaacagtctacaggaaaggaaggaggccagctgtacaggctgggtcggagacgtaagacgatgaagctttgccgcgaactgtccgatctggtcgtttacacgaacagcgtcgcagctcaggacatcgtagatgatggcactacggggaatgtgctgagcttttccgaaacgcgggcacatcaggtcgttcagcagaaatcagaacaattcatgatttacaatcagaagcagcttacaagaatttaccctagcgcctaccgaattgactcctccaacttcaaccccctaccctactggaacgcaggatgccagctggtcgccctgaactaccagtctgaaggcagaatgatgcaactgaaccgggcaaagttcaaggcaaacggtaactgtggatatgttctgaagcctcagcagatgtgtaagggaacctttaacccattttctggagatcctctcccagccaacccaaaaaagcaattaatattgaaagtgatctccggccagcagttgcctaagccaccggattctatgtttggagatcgaggggagatcattgatccttttgtggaggttgagattatcgggctacccgtggactgttgtaaggatcagactcgcgttgtcgacgataatgggtttaacccggtatgggaagagacactgacttttacagttcacatgcccgagattgctttagtgcggttcctagtgtgggatcacgacccgatcggaagagatttcgtgggccaaagaaccgtgactttctctagtctggttccaggttacagacacgtctatctggaaggcctgactgaagcgagcatctttgttcacatcaccatcaatgagatctacgggaagaacaggcagttacaggggctgaaaggactcttcaacaagaacccgcgacattccagttccgaaaataactcccactatgtgaggaagcggtccattggcgacaggattcttcgaagaaccgctagtgcccctgctaagggccgtaaaaaatccaagatgggtttccaagagatggtggaaataaaggatagtgtatccgaggcaacaagggaccaggacggggttctcagacgtactacacggtccctgcaggctcggcctgtttccatgcctgtcgacagaaatctgttgggggctctctcattacctgtgtcggagacagcgaaggacattgaaggaaaggaaaactccctggcagaggataaagatggacggcgtaagggcaaagcctctattaaggacccacatttccttaatttcaataagaaactgtcttccagttctagcgccctgttgcacaaggacacctcccaaggcgacacaatcgttagtaccgctcacatgtctgtaacaggcgagcaacttggcatgtcctctcctagggggggacggaccacgtcaaacgctaccagtaactgccaggagaacccgtgtccaagtaaaagcctctcacctaagcagcatctggcgccagatccagtcgtgaatcccacccaggacctgcacggtgtcaagatcaaagagaagggtaacccagaggactttgtcgagggcaagagtatccttagtggctccgttctttctcactcaaatctagagatcaagaacctggaaggaaaccgcggtaaaggacgggcagccacgagcttttctctgtccgatgtgtctatgttgtgttctgacattcctgatctgcactccaccgccatcctgcaggagagtgtcatctcacatctgattgataatgttacattaacaaatgaaaatgagcccggtagctctatcagcgcactaatcggtcagtttgacgagacgaacaaccaggcgttaactgtcgtatctcatctccacaacaccagcgtcatgtccggccattgtccgctccccagtctggggcttaagatgcccattaaacacgggttttgcaagggaaagtccaagtcctcgtttctgtgtagcagtcctgaacttattgcactgtcctcctctgagacgaccaagcacgccacaaacactgtatatgaaacaacttgtactcctatctctaagactaagcccgacgacgacctgtcctccaaagctaaaactgccgcattggaaagcaacctacctggtagccccaatacgagccgaggctggctgcctaaaagccccaccaagggcgaggattgggaaacactcaagtcatgtagcccagcatctagtccagacttaacactagaggacgtcattgctgatccaactctttgtttcaattccggggagagcagtctcgtggaaattgatggcgaaagtgaaaacctttcactcactacatgcgaatataggagggaggggaccagccaattagctagccctttgaaactaaaatacaatcagggcgtcgtggagcacttccagcgagggctcagaaatggctattgcaaagagacgctcagacctagtgtaccagagatttttaacaatatccaagacgtcaaaactcagtccataagctacctcgcgtaccaaggagctggttttgtgcataaccactttagcgacagcgatgcaaaaatgttccagacttgtgtccctcaacagtcctccgctcaggacatgcatgtgcctgtaccgaaacagctcgcccacctgcctctgccagctctcaagctcccatctccctgtaagtcaaaatccttaggagaccttactagcgaggatatcgcttgcaacttcgagagcaaatatcaatgtatctcaaaatcatttgtcacaaccggaatccgtgataaaaaaggggtcacggtgaagactaagtcgcttgaaccaatcgatgccctcactgagcagctgcggaaattggtgagttttgaccaggaggacaattgccaggttttgtactcaaaacaggacgcgaaccagctgccaagagccctggtgcggaagttgtcatcccgctctcagtcccgggttcgcaacattgcatcacgggctaaggagaagcaggaggctaacaagcagaaggtgccaaacccgagcaatggggctggcgtggtcctgcggaataaacctagcgcacctacacctgcagttaatcggcacagtacagggtcatatatagcgggttaccttaagaatactaaaggtgggggtctggagggtaggggtatccccgagggcgcttgtactgcactgcactatggtcacgtggatcagttctgctccgacaattctgtcctccagaccgaacccagtagtgatgacaagcctgagatttactttctgcttcggctgta

SEQ ID NO: 234917 - DNA, 3009 bp, synthetic construct
  misc_feature 1..3009: note = Description of Artificial Sequence: Synthetic coding sequence
  source 1..3009: mol_type = other DNA
atggccgacctggaagtatataagaaccttagcccggaaaaagtggaacggtgcatgagcgtgatgcaaagcggaacccaaatgatcaaacttaagcggggtactaagggcctggtcagactgttctatctggacgaacatagaactaggctgaggtggaggccatcccgcaaaagtgaaaaggcaaaaatcctgattgatagcatatataaggttactgagggtcgccaaagcgagatttttcacagacaagctgaaggaaactttgacccgtcgtgctgttttactatttaccacggtaaccatatggagtctctggatctgatcacatccaatcctgaggaagcgaggacatggataaccggcctcaagtatcttatggcaggtatctctgatgaagactcactggccaaaagacagaggacacacgaccaatgggtgaaacaaacgtttgaagaggcagacaagaatggggatggactcctgaacatcgaagagattcaccagctgatgcataagcttaacgtgaacctgccgcgaagaaaggtgcggcaaatgttccaggaagccgacaccgatgagaaccaaggcacacttacttttgaggaattttgtgtgttctataaaatgatgagtctgcggagggatctctacttgctcttgctctcgtatagcgacaaaaaggatcatctcacagtggaagagctggcccagttccttaaggttgagcaaaagatgaacaatgtgaccacagactactgtctggatattattaagaagtttgaagtaagcgaagagaacaaagtgaaaaacgtgctgggaatagaggggtttaccaactttatgcgttcaccagcctgtgacatatttaacccgctgcatcatgaggtgtatcaggacatggaccagcctttgtgcaattactatatcgcatcatctcacaacacttatctgacaggcgaccagctgctgtctcaaagtaaagttgacatgtatgccagagtcttacaggaagggtgtcggtgcgtagaggtcgactgctgggatggacccgatggtgagcctgtggtgcatcatggctacactctgacatcgaagatactttttagggatgtggtggaaaccataaacaaacatgcttttgtgaagaacgaattcccagtcatattgagcatagaaaatcactgctcaattcagcaacagagaaagatcgcccagtacctgaagggaatcttcggcgacaagctggatctgagctccgtggataccggggaatgtaagcagctcccctctccccagtccctcaaagggaagattttggtgaaaggtaaaaaactgccgtatcatctgggagatgatgccgaagagggtgaagtctccgatgaggactcagcggatgagattgaggatgagtgcaagtttaagctgcactatagcaatgggacaaccgaacaccaggtggaatccttcatccggaagaagctcgaaagcttactgaaagagtctcagatacgcgataaagaagaccctgattccttcaccgtacgggctctgctcaaggcgacacatgagggactcaatgcacatctgaaacagagcccggatgtcaaggaaagtggtaaaaagtcccacggaaggagtcttatgacaaattttgggaagcacaagaaaactacaaagtcccggtccaaaagctatagcaccgatgatgaggaggatacacagcagtcaacagggaaggaaggcggacaactgtacaggcttggaaggagacggaaaacgatgaagctgtgcagagaactctcagacctcgtggtgtataccaattcggtggcggcacaagacatcgtggacgatggaactaccggtaacgtgctgtctttcagcgagaccagggctcaccaggtagtacagcagaaaagtgaacagttcatgatctataaccagaaacagcttacccggatttacccgtcagcatacaggatcgatagtagcaacttcaaccctctgccttactggaatgcaggctgccagctcgtcgcactcaattaccaatccgaaggccgaatgatgcagctgaacagagcgaagtttaaagccaacggtaattgcggttacgtccttaaacctcagcagatgtgtaagggaacattcaaccccttctctggggaccctttacccgcaaatcctaagaagcaactgatcctaaaagtgatttcagggcagcaattgcctaaacccccagatagcatgttcggcgacaggggcgaaatcattgacccgttcgtcgaggtcgagatcataggccttccggtggactgttgcaaggaccagacaagggtagtcgatgataatggctttaaccccgtgtgggaagagactctcacattcactgtccacatgcctgagattgctctggtccgcttcttagtctgggaccatgatcctatcgggagggatttcgtcggccagagaactgttaccttcagcagcctcgttccaggctaccgtcacgtgtatcttgaaggactgaccgaagcctctatctttgtgcacataaccatcaacgagatctacggcaaatggtctcccctcattcttaacccgtcctatacaattttgcatttcttgggcgcaaccaaaaatcgacagctgcagggcctgaagggccttttcaataagaatcctcggcattcgtcgtctgagaataatagccactacgtaagaaaaaggagcataggggaccgaattttacggagaaccgccagcgcccctgccaagggtcgtaaaaaaagcaaaatgggctttcaggagatggtagaaatcaaagattccgtttctgaggctacacgggaccaggatggcgtcttacgcagaactacacgatctcttcaggcccgacctgtgtcaatgccggttgatcgtaacctccttggcgcactgtccctccccgtcagtgaaaccgctaaggatattgaaggcaaagaaaacagcttggttcagatatag

SEQ ID NO: 234918 - DNA, 4967 bp, synthetic construct
  misc_feature 1..4967: note = Description of Artificial Sequence: Synthetic coding sequence
  source 1..4967: mol_type = other DNA
atgagcgtgatgcagtctggaacacaaatgattaagttgaaacgaggcacgaagggacttgttaggctgttttacctcgacgagcaccggactaggctgcgatggcgcccatcacgaaagagcgagaaagctaagattctgatcgatagtatttataaggttacagaaggccgacagagtgaaatattccaccgccaggctgaggggaattttgatcctagctgttgtttcactatctatcacggaaatcacatggagtccttggatctgatcacctcaaatcccgaagaggctaggacctggattaccggcctgaaatacctgatggccggaatttctgacgaggattcattagccaaaaggcagaggacccacgatcagtgggttaagcagaccttcgaagaagctgataaaaacggcgacggcctgcttaacattgaagagatccatcagctcatgcataagcttaatgttaacctccctagacggaaggtgaggcagatgttccaggaagcggacaccgacgagaaccagggaaccctgaccttcgaggaattttgcgtgttttacaagatgatgtccctccgtagagacctgtacctgctccttctttcctattcagataagaaagaccacctgacagtagaggagttagcccagtttctgaaagtggagcagaagatgaataacgtgaccactgattattgcctagacatcatcaaaaagtttgaggtgtctgaagaaaacaaggtgaaaaatgttctcgggattgaaggattcacaaacttcatgaggagccctgcttgcgatatcttcaacccactccaccacgaagtgtaccaggatatggatcagcctttatgtaactattacattgcatcatcgcataatacttacctgactggcgatcagctgctctcccagtccaaggttgacatgtacgccagggtgctccaggaaggatgtcgctgcgtggaagtggactgttgggacggccctgatggggagcccgtggtacatcacggatacacgctgacttcaaaaatactttttagggacgtcgtggagacaataaataaacacgccttcgtcaagaatgagttcccagtgatactttctatcgagaaccactgctccatccaacagcagagaaagatcgcccaatatctgaagggcatcttcggtgataagctcgacctgtcgtcagtcgacaccggagaatgtaagcagctcccaagtccccaaagtctgaagggtaagattctggtgaaagggaaaaaactgccctaccacctgggcgacgacgccgaagaaggagaagtttctgatgaggatagtgcagatgagatcgaggatgagtgcaaatttaagctccactatagtaacggcaccacggagcatcaagtagaaagctttatccgaaaaaaattggaaagccttctgaaggagtcccagatacgtgataaagaggaccctgactcttttacagttagggcactgcttaaggccactcatgaaggactgaatgcacacttgaagcagagcccagacgtgaaggagtctggtaaaaaatcacatgggcgttcactgatgacaaacttcggcaagcacaagaagaccacaaaatctaggtcaaaatcttactctaccgatgatgaggaggatacccagcagtccacaggtaaagagggtggccagctgtaccggttggggagacgtcgcaaaaccatgaagctgtgtcgtgagttgtctgacctggtcgtgtataccaactccgtcgcagctcaggatattgtggacgacggaacgacgggaaatgtgctctcattctcggagacccgggcacaccaagtagttcaacaaaaatctgagcagttcatgatctacaaccaaaagcaactgacaaggatttacccatcggcataccggatcgacagttccaacttcaatccattgccctactggaacgcgggatgccaactggtggcacttaattaccaatcagaagggcgaatgatgcagctgaaccgagccaagttcaaggccaatggaaattgcggctacgtgttgaagccccagcagatgtgtaagggcacgtttaaccccttctctggggaccccctgcccgctaaccccaagaaacagcttatcctgaaagtgatttcaggtcagcagctgccaaaacctccggattctatgttcggcgacagaggtgagatcattgatcccttcgtggaggtggaaatcattggactgcccgtggattgctgcaaagaccagacacgagtggtggatgacaacggtttcaaccccgtctgggaagaaacactgacgtttacggtgcacatgcccgagattgcacttgtgagattcctcgtatgggaccacgacccaattggacgggactttgttggccagcgaaccgttacattctcctcattggtgccgggttatcgccatgtttacctcgaggggctaaccgaagcatctatcttcgtgcacatcaccattaatgaaatttacggcaagaatcgccagctgcaaggacttaaaggtctgttcaacaaaaacccccgtcattcttcttctgaaaataactcacactacgtacgcaaacgatcaattggcgatcggatcctgcggcgaactgcttctgcacctgccaagggaaggaagaaatcaaagatgggatttcaggaaatggtggagattaaagacagtgtcagtgaagccactagagatcaggacggtgtgctgcgcagaactactcgatctctgcaggcacgccctgtctccatgccagtggacagaaacctactcggcgcattaagtctccctgtcagcgagaccgccaaggacatcgaaggtaaggagaactccctcgctgaggacaaagacggtaggagaaaggggaaggcctccattaaagacccacacttcctaaattttaataagaagctgtccagttcttcaagtgccctgctgcacaaagatacatcacagggagacaccattgtgagcaccgctcatatgtccgtcacaggggagcagctgggtatgagttcacccagaggcggacggaccacgagcaatgccacgagcaactgtcaagaaaacccctgtccctccaaaagtctctctccgaaacagcacctagcgcctgaccccgtggtaaacccgactcaggatctgcacggggttaagatcaaggaaaagggaaaccccgaggacttcgtggaagggaagtccattctgtcaggctccgttttgtcacatagtaacctggagatcaagaacctggagggtaacagaggtaaaggacgcgctgctacctccttttcgctgtccgatgtctccatgctgtgttccgatatccccgatttacacagcaccgctatcctccaggagagtgttatttcccatttgatagacaatgttactctgaccaatgagaatgagcccggatcttctatctccgccctgattggccaattcgacgagacaaacaaccaggcactgactgtggtgtcgcacctgcataatacctccgtgatgagtggtcactgcccattgccttcactgggcctcaagatgcccattaaacacggcttctgtaaggggaaaagtaaatcctctttcctttgctcatcacctgagctgatagctctttcttctagtgagacgaccaaacacgccactaataccgtttacgaaaccacctgtacgccaatctcaaaaacaaagccggatgacgacctgagctccaaggccaagactgcagccctggaatctaacctgcccggatctccaaatacgtctcgaggttggctcccaaagtctccaaccaagggagaggactgggaaaccctcaagagttgttcgccagcctcaagccccgacctgactctggaggacgtgatcgccgatcccacattatgtttcaattccggtgagagctccctggtggaaattgatggagagtcagagaacctatcgctgaccacgtgtgaataccggcgtgagggcacctcccagctcgcctctcctctgaagctcaaatacaatcagggagtggtggagcactttcagagaggcctacggaatgggtattgtaaagagaccctgagacccagtgtgccggagatcttcaataatatacaggatgtcaaaactcagtcaatcagttatctggcctatcagggggctggcttcgtacataaccacttttccgatagcgacgctaagatgtttcagacctgtgtcccccaacaatcctcagcccaggatatgcatgtgcccgtgcccaagcagttggcacatctgcccctaccagcccttaagctaccttctccatgcaagtcgaaatctttaggggatcttacgtccgaggacattgcatgcaattttgagagcaagtatcagtgtattagcaaatcttttgtgactactggaatacgcgataagaagggggtcacagttaagactaagtcactggagccaatcgatgccctgacagagcagctgagaaaactggtctcgttcgaccaagaagataactgccaggtactgtattccaagcaggacgctaaccaactgccaagggcactggtcagaaaactgtcctcaaggtcacagagccgggtaaggaatattgcttctagagcaaaggagaagcaagaggccaataagcagaaggtgccgaatccaagcaatggtgccggtgttgtgctgagaaataagccttctgcgcctacaccagctgtgaataggcactctaccggcagctacattgcgggatatttgaaaaacactaaaggaggcggtctggaaggtcgcggtataccagagggcgcatgtacggctttacattatggccacgtggaccaattttgtagcgacaattccgttctgcagacagagccctcttcggacgacaagccagagatatatttcctgctaagactgta

SEQ ID NO: 234919 - DNA, 3045 bp, synthetic construct
  misc_feature 1..3045: note = Description of Artificial Sequence: Synthetic coding sequence
  source 1..3045: mol_type = other DNA
atggccgacctggaggtgtacaagaacctatcccccgaaaaagttgagcgatgcatgtcagtgatgcagagcggcactcagatgataaaactcaaacgcggaacaaaaggcctggtccgcctcttctaccttgatgaacatagaactagattgaggtggcgtcccagccggaaatctgaaaaagctaagatcttgatcgacagtatttacaaggtaacagaagggaggcagagtgaaattttccaccggcaggcagagggcaacttcgatccctcatgttgcttcacaatctatcatgggaaccacatggagtctctggacttaatcacctccaaccctgaagaggctaggacttggataactgggttgaagtatttgatggccggtatttctgacgaggacagcttagcgaagaggcagcggacccatgaccagtgggtgaagcaaacctttgaagaagccgacaaaaacggtgatggcctcttaaacattgaggagattcaccagctcatgcataagctgaacgtcaatctccctcgaagaaaggtccgccagatgtttcaggaggccgatacggatgagaaccagggaaccctcaccttcgaagaattctgcgtattctataaaatgatgtccctgagacgcgatctatacttactcctgttgtcctactccgataaaaaggatcaccttacggtggaagagctcgcacagttcctgaaagtggagcagaagatgaacaatgtcactactgattattgtctggatattataaagaaatttgaggtttcagaagagaataaagtgaagaacgtgctgggtatagagggtttcacgaacttcatgcggtcccccgcatgcgatatatttaatcctctgcaccacgaggtttatcaagacatggatcaacctctgtgtaattactacatcgcgagctcccataatacgtatttaactggtgatcagctgctgtctcagagcaaagtcgacatgtatgctcgcgtgttgcaggaggggtgtcgatgtgtggaggtcgattgctgggatggccctgacggcgaaccagtggtgcatcacggctacactttgactagtaagatactgttcagggatgtggtggagacgatcaacaaacatgcgtttgtgaagaatgaattcccggtaatactaagcattgaaaatcactgctcaattcagcagcaacgcaagattgctcagtatttaaaaggtatctttggagacaaacttgacctgtcttcggttgacaccggcgagtgcaaacagttaccttctccccagagtttgaaggggaaaattcttgtgaaaggtaaaaagctgccctaccatctgggtgatgacgccgaagaaggagaggtttcggacgaagactctgccgacgaaatcgaagacgaatgcaagttcaagttacattacagtaatggcacgactgaacaccaggtagaatctttcattcggaaaaagctggagagtcttctgaaagagagtcagattcgggacaaggaggatcctgactccttcactgttagggctcttctgaaggccacccatgaggggctcaatgctcacctgaaacaaagtccagacgtcaaagagagcgggaaaaaatcccatggtagatcgctcatgaccaatttcggaaaacacaagaaaacaacgaagtcacggtctaagagttattcaaccgatgacgaagaagacacacagcagtccactgggaaagaagggggacagctgtatagactgggtagacggaggaagacaatgaaactctgtagagaactttccgatctcgtggtctacaccaattctgtagctgcccaagacattgtagacgatggcaccacgggaaacgtcctatccttcagtgaaacacgtgcccatcaggtcgttcagcaaaagtcagaacagttcatgatatataatcagaagcagctcacccgaatataccccagcgcctacaggatagactcgtcgaattttaatcccctcccctactggaacgcaggttgtcagttagtggcactgaattaccagagtgagggaagaatgatgcagctaaaccgcgcaaagttcaaggccaacggtaattgcggttacgtactgaagccacagcagatgtgtaagggaacctttaatccgttctccggtgatccactccccgcaaaccccaaaaaacaactaatcttaaaggtgatctccggccaacagctgccaaagccccctgattctatgtttggggacagaggggagattatagatccgtttgtcgaagtagagattatcggcctcccagtggactgctgcaaggatcagacacgagtggtggacgataacgggtttaatccagtttgggaggaaaccttaacatttacagtccacatgccagaaatcgccctcgtgcgctttctcgtatgggatcacgatcccatcggccgagactttgttggtcaacggactgtcacattttctagtctcgtgccaggataccgccacgtctatctcgagggtctgacagaggcttccatcttcgtacacattactattaacgagatttatggaaaaaatcggcagctgcaaggtctgaaaggcttatttaataaaaacccccgacactcctcatctgaaaacaacagccactacgtccgcaagaggagcatcggcgaccgcattttgaggaggactgcttccgctcccgcaaaaggcagaaagaaaagtaaaatggggttccaggagatggtcgaaattaaggattcagtgagcgaggccaccagagatcaggacggcgtgctgcggcgaacaacgcgttctctgcaggccagaccggtcagcatgcctgttgacagaaatctgttgggtgctctgtctcttcccgtctccgaaacggccaaggatatcgaaggaaaagaaaattccctggacagcagcttctgccggcctaccgagcaggcaaaggccgaaatgtgcaaggtgccgtttccgcgtcagctcgagtgcgtgatgaaaatggagatctccgaaacatag

SEQ ID NO: 234920 - DNA, 3507 bp, synthetic construct
  misc_feature 1..3507: note = Description of Artificial Sequence: Synthetic coding sequence
  source 1..3507: mol_type = other DNA
atgtttcgagaggctgacaccgatgatcaccaggggacattggggttcgaagagttttgcgcattttacaagatgatgagcacgcgtagagacctgtatctgctcatgcttacctactctaaccacaaggaccatttggacgctgcatccctccagcgctttttgcaagtggagcagaagatggcgggagtcaccctggaaagctgtcaagatatcatcgagcaattcgagccctgtcccgagaataagtccaagggattactcggtatcgatggcttcaccaactatacacgaagccctgctggagacatctttaatcccgagcaccatcacgtccaccaggacatgacccagcctctgagccattacttcatcacctccagccacaacacatatctggtgggcgatcagctgatgtcacagtccagggtcgacatgtacgcgtgggtgctgcaggctggctgccgctgcgtagaagtcgactgttgggacggccctgacggagagcccatcgtgcaccacgggtatacactaacttcaaagatcctcttcaaggacgtgatagagacgatcaacaaatacgctttcattaagaacgagtacccggtaattctgtcgatcgaaaaccactgctcagttattcaacagaagaagatggcccaatacctgacagatatacttggtgacaagctggatctgtcttcagtgtcctcagaagatgcgactacactccccagcccacagatgctgaaaggtaagattctcgtgaaagggaaaaaactcccggcaaacatctctgaggatgccgaggagggagaggtatcagatgaagattctgccgacgaaatcgacgatgattgtaaactgctgaacggagatgcttccaccaaccgcaagcgtgtcgagaatacagctaagcggaagctcgactctcttatcaaggagtccaagatcagggactgtgaggacccgaacaactttagcgtgtccaccctgtcaccatccggaaagcttggcagaaagagtaaggccgaggaggacgtggaaagcggcgaggatgccggtgctagccggaggaacgggcgtttggtggtgggctcctttagtcggaggaagaagaagggcagtaaactaaagaaagctgcgtccgtagaagagggagacgaaggacaagatagcccaggcggtcaatcccgaggtgcgacaaggcagaagaagacaatgaagctgtctcgtgcactgtcggatcttgtcaagtatacaaagagtgtcgcgactcatgacatcgagatggaggctgcaagctcttggcaggtcagctctttttcggagacaaaggcccaccagatcctgcaacagaagccagcccagtatctgcgcttcaaccaacagcagctgtctcgtatctacccttcatcataccgcgtcgatagctcaaactacaaccctcagcccttctggaatgccggatgccagatgggggtgtttaatcccaatagtgaagacccactcccaggacagctaaagaagcagctggttctccggataattagcggtcagcagcttcctaagcccagggacagtatgttgggcgatcggggagagattatcgaccccttcgtggaggttgaaataatcggcttgcccgttgattgcagtagggagcagacaagggtggtcgacgacaatggctttaatcccacttgggaagagacactggtgtttatggtccatatgccggagatcgccctcgtgcgatttctggtgtgggaccatgacccaatagggagggatttcattggacagagaacattggctttttcatccatgatgcctggttaccgacacgtgtatcttgaaggtatggaagaagcatctatattcgtccatgtggccgtgtccgacatcagcgggaaagttaaacaggccctgggcctgaaagggctctttctgagagggcctaaacccggtagcttggatagccacgccgctggccgaccgccagccaggccttcagtgagccaaaggattctccgcaggacggcctccgctcccactaagagccagaaaccaggcaggagaggattcccagaattggttctgggtacacgcgataccggaagtaaaggtgtggcagacgacgtcgtccctccaggtcctggacctgccccagaggccccagcccaggaggggcctggttctggcagtcccagggacaccaggcctctgtcaacacagaggccactgccgcctctgtgctcccttgagaccatcgccgaggaacccgcaccaggcccaggcccaccccctccagcggctgtgcccacctctagttcacagggtcgcccaccttacccaacggggccaggtgctaacgtcgcatcgccactggaggacaccgaagaaccaagggacagccggcctcgaccttgtaacggggagggtgcaggaggggcatacgagcgcgctcctggcagtcagactgatggtaggagccagcccaggactctcgggcacctgccagtcattagaagggtgaaaagcgaggggcaggtcccgaccgaaccactggggggatggcggccacttgccgctccctttcctgccccagccgtctacagtgacgcaacaggctcagaccctctgtggcaacggcttgagccatgtggccaccgggacagcgtgtcctcctcctccagtatgtcctcgagcgacaccgttatcgacctttcccttccttcgctgggcctgggtcgcagtagggagaatctcgctggggcacacatgggcagactgccaccacgcccacatagcgctagcgccgcacgtcctgacctgccgcctgttacaaagtccaagtcgaaccccaacctccgagcaacaggtcagaggcccccaattcctgatgaactgcaacctaggagcctggctccacgaatggcgggtctgccgttcaggccaccttggggctgtctgtctcttgtgggagtacaagactgcccggtcgccgcaaaatccaagtcacttggggatctgacagcagacgatttcgcccctagctttgagggaggatccagaagactaagccattccctcggactccctggcggtacgcggcgagtgtccggccctggggttcgtcgggataccctcacggagcagctacgttggctcacagtctttcagcaagctggcgacattacgtcacctacctcattgggcccagccggagaaggagtggcaggcggacccggatttgtgcgacggtcttcatcacgttcccatagcagagtacgggcaatcgcctctagggcaagacaggctcaagagaggcagcagagattacagggtctaggaaggcagggacctcccgaggaggaacggggtactcctgaaggagcttgctccgtaggccacgagggaagcgtggacgccccagcaccaagcaaaggggctctcgggccagcctccgctgccgcagaaaacctagtcctactcaggttgtag

SEQ ID NO: 234921 - DNA, 1500 bp, synthetic construct
  misc_feature 1..1500: note = Description of Artificial Sequence: Synthetic coding sequence
  source 1..1500: mol_type = other DNA
atgggtgccatgcaggagggcatgcagatggtgaagttaagggggggatccaaggggctggtcaggttttactacctcgacgaacaccgtagttgtataaggtggcgaccttcacgcaaaaatgaaaaggccaagataagtatagactcaattcaggaggtgtctgaggggaggcagtcggaggtcttccagcgttacccagacggatcttttatcatagatccgtttgtggaggtcgagatcattggcttaccagtggactgcagtagagagcaaacgagggtggtggacgataatggattcaatcccacctgggaagagacactggtgtttatggtgcatatgcccgaaatagccttagtgcgcttcttagtttgggaccacgatccaattggccgagatttcatcgggcagcgcactctggccttttcttcaatgatgcctggctaccgccacgtgtatctggagggtatggaggaggctagcatattcgtccacgtggctgtgtcggatatttctggaaaggtgaaacaggccctggggctgaagggactgtttcttcgcggtcccaagccaggtagtctggactcccatgcggctggtcgaccacccgctaggccaagcgtttcccaacgaatactacgtaggacagcctctgcacccacaaagagtcagaaacctggccgtagaggttttccggaactggtgctgggcaccagagacaccggcagtaagggcgttgcagacgatgtagtaccccctggccctggccctgctccagaggctccagcccaggagggacctggcagcggctctcctcgcggaaaggctcccgctgccgtggcagaaaaatctcctgttcgtgtaaggcctcctcgagtgctcgacggacctggcccagcaggaatggccgctacatgtatgaagtgtgtcgtcggctcttgcgcaggcgtcaataccgggggactccagcgcgaacgaccaccgtcgccaggtccagcctcgaggcaggctgccatcagacagcagcctcgcgctagggcagactcactgggagcgccttgctgtgggctggaccctcacgctatccctggaagaagccgagaggctccaaaggggcctggggcttggcggcagggccctgggggaagtggctctatgtcttcagatagttcttctcctgattctccaggcataccggaacgcagtccaaggtggccggagggggcttgtcggcagccaggcgcactccagggagaaatgagcgcactgtttgctcagaagctggaggagattagatccaagtctccaatgttttctgcaggtaaaccactgctgccctgtgtagttcttccacacgccccagggatggctggccctggatcacctgcggctgcgtccgcctggactgtgtctcctcgcgtcctggtcctggttgccctgtacccatggcattgcttgagggggacgctcttaccatggctcgcttgcggcccttag

SEQ ID NO: 234922 - DNA, 3177 bp, synthetic construct
  misc_feature 1..3177: note = Description of Artificial Sequence: Synthetic coding sequence
  source 1..3177: mol_type = other DNA
atggctggtatcagcgacgaagactctttggctcggaggcagcgaactcgcgaccagtggctgaaacaaacattcgacgaagctgataagaatggggacggttccctgagcattggggaggttttacagttgctgcacaagttgaacgtgaatctgcccaggcagcgtgtgaaacagatgtttagggaggccgacactgacgaccaccaggggaccttgggttttgaagagttctgcgccttctacaaaatgatgtctacacgtcgtgacctgtatctccttatgctcacctacagtaatcacaaagatcatctagatgccgcatcacttcagcggttccttcaggtagaacagaaaatggccggagtgactctggagtcgtgccaggatatcatcgagcaattcgagccttgccctgagaataaatccaagggactcctggggatagacggtttcacgaattatacacgctctccggctggggacatcttcaatccggagcatcaccacgtgcatcaggatatgacacagccgctgtcccattatttcatcactagctctcacaatacttatctggtgggtgatcagctgatgagtcagagccgagtggacatgtacgcgtgggtgctccaggcagggtgtagatgcgtggaagtcgattgctgggatggccctgacggggaaccaatcgtccaccacgggtacactctgacaagcaaaatcctgttcaaagacgtgattgagaccataaacaagtatgctttcatcaagaacgaataccctgtaatcctatccattgaaaatcactgttccgtgatacaacagaagaaaatggcacagtacttgacagacattttaggggacaagctagatctgtctagcgtgtcatccgaagacgctactaccctgccaagcccacaaatgctgaagggcaaaatactcgtcaaaggaaagaaactccccgctaatatttctgaagatgccgaggagggcgaggtgtcagacgaagatagtgctgacgaaattgatgacgattgcaagctgctcaatggggacgcatctactaaccgcaaacgtgtggagaacacagcgaagagaaagcttgactctctgatcaaagaaagtaaaatccgggactgcgaggatcctaacaacttttcggtttccaccctctccccgagcggaaaattaggccgaaaatccaaagctgaagaagatgtagagagcggcgaggatgccggtgctagtcgacgaaatggcaggctcgttgtgggatcatttagccggcgtaaaaagaaggggtccaagctgaagaaggccgctagtgtggaagagggagatgaaggacaggactccccgggaggccagagtcgcggagctactcgccaaaagaaaaccatgaagctgagtcgagccctgtccgatctagtcaagtacacaaaatccgtcgcaacgcacgacatcgagatggaggccgcatccagctggcaggttagctctttttcagagacaaaagctcatcagattctgcagcaaaaaccagctcagtacctgagatttaatcagcagcaactcagccgaatctacccatctagctatcgcgtggacagtagtaactataatcctcagcccttctggaacgctggatgccagatggtcgcgctaaactatcaatccgaggggagaatgctgcaattgaaccgggcaaaattctcagctaatggaggttgcggttacgtgttgaaaccaggctgtatgtgccagggggtgttcaacccaaacagcgaagatcctctgccaggccaactcaagaaacagctggtgctccgcatcatttccggccagcaactccctaaaccgcgagattctatgttgggagaccggggagaaatcattgaccccttcgtcgaagttgagataataggtctgcccgtggactgctcccgtgagcagacgcgtgtggtggacgacaatggctttaacccaacgtgggaggaaactctcgtgttcatggtgcacatgccggaaatcgccctggtccgcttcctagtgtgggatcatgaccccattggcagagattttattggccagcgcacccttgccttctcgagcatgatgcccggataccgccacgtgtacctggagggcatggaagaggcctcaatcttcgtgcatgtcgcggtgtccgatatcagtggcaaagtgaaacaggccctgggactgaaaggcctctttctgaggggccctaaaccaggctcactcgactcacacgcagctggacgtcctccagccaggccttcggtctcccagagaattctcaggcggacggcctctgctccaaccaaaagccagaaaccaggcagacggggattccctgagctcgtcttaggcactcgggacacagggtccaagggcgtggcagatgacgtggtccctccgggaccgggaccagcaccagaggcacctgctcaggaaggcccaggctccgggagccccagggggaaggccccagctgccgttgctgagaaatctccagttagagtgcggcctccccgtgtgctagacggccctgggcctgctggtatggccgctacatgcatgaaatgtgtggtcggttcttgcgctggtgttaatacgggaggcttacagagggaaaggccccctagcccaggacccgctagtagacaggccgcaatcaggcaacagcccagggccagggctgattcactgggggctccctgttgcggcctggatccccacgccatacccggaaggtcaagagaggcgccaaaagggcctggagcctggcgtcagggtccaggaggctcggggtctatgagttctgactccagcagtccagacagccccggtattcccgagcggtctcctaggtggccagagggcgcatgccgccaacccggagctcttcagggggagatgagtgccctgtttgcacaaaagctggaggaaatcaggtcgaaatccccaatgttctccgctggaaaacctctgctcccctgcgtcgtactgccacatgcccctgggatggcgggacccggttcaccagcggcagcctctgcttggaccgtatctcctcgcgttctggtgctggtggccctgtacccgtggcactgtttgcgcggaacactgttgccttggctggcttgcggaccttag

SEQ ID NO: 234923 - DNA, 1494 bp, synthetic construct
  misc_feature 1..1494: note = Description of Artificial Sequence: Synthetic coding sequence
  source 1..1494: mol_type = other DNA
atgggagctatgcaggagggaatgcagatggttaaactgcgaggtggcagcaaaggactggtgcggttttactacctggatgaacataggagctgcatcagatggcggccttctaggaagaatgagaaggctaaaatctccatagattctatacaggaggtgagcgaaggcagacagagtgaggtcttccagcgctacccggacggcagctttgacccctttgtcgaagtagaaatcattggtcttccagtcgattgtagccgagagcagactcgcgttgttgacgacaacggcttcaatcccacttgggaggaaacacttgtttttatggttcacatgccggagatcgccctcgtgaggtttctggtgtgggaccatgaccccatcggaagggatttcattgggcagagaacactggccttttcttctatgatgccaggctatagacacgtgtatctggaggggatggaagaggcttcaatctttgtccacgtcgcagtcagcgatataagcgggaaagtcaaacaagcgctcggtctgaaggggctgtttcttagaggacctaaacctggatccctggatagccacgcagcaggcagaccaccagcacgcccttcagtgtcccagagaatcctaaggcgtacagcctcggctcctaccaagtcccaaaagcctggcaggcgtggtttcccggagctggtgctggggaccagagacactggctctaagggggtggccgacgatgtcgtaccccctggcccagggcctgcccctgaagctcccgctcaggaagggcctggatccgggtcccctcgcggtaaggcccctgcggcagtggcagaaaaaagccccgtgagagtcagacccccaagggtcttggatggaccgggacctgccggtatggctgccacttgcatgaagtgcgtcgtaggctcatgcgctggagtcaatacagggggacttcagcgcgagagacctccgagtccaggccctgcctcgagacaggcagcgatacgacagcaacctagggcacgcgctgattcactaggcgctccttgctgcgggctcgaccctcatgccattcctggtagatctcgagaagcccctaagggacccggagcttggagacaaggccctggcggttctggatcaatgagcagtgacagttcctctcccgactctcctgggatcccagagcgatcgcctaggtggccagagggggcttgccgacaacctggcgctctgcagggagagatgagcgcgctgttcgctcagaaactagaagagatccgtagtaagtccccgatgttttctgctggcaagcctctgctgccatgtgtcgttctccctcacgctccagggatggctggcccaggcagcccggctgccgcttcggcttggacagtctctcctagggttctggtgctggtggcactctacccttggcattgtctccgaggcacgttacttccttggctggcctgcggcccttag

SEQ ID NO: 234924 - DNA, 4251 bp, synthetic construct
  misc_feature 1..4251: note = Description of Artificial Sequence: Synthetic coding sequence
  source 1..4251: mol_type = other DNA
atgagcgggccatggccctcaccagactctcgcaccaaaggcacagtcgcatggctggccgaggtgttactgtgggtcggcggatccgtcgtgttgagcagtgaatggcagctgggcccacttgttgaaagatgtatgggcgctatgcaggagggaatgcagatggtgaaactgaggggcggtagtaagggcctggtgaggttctactatctcgacgaacaccgctcttgtatccggtggcgaccttcaaggaaaaatgaaaaggctaaaatctctattgattccatacaggaagtttccgaggggcgacagagcgaggtgtttcagaggtaccccgatggttcctttgaccctaactgttgctttagcatataccatggcagtcaccgggaaagtctggacctggtgagcacatcaagcgaggtggctagaacatgggtcactggtctgcggtacctgatggctggcatctcagacgaagattcgctggccaggagacagaggactagggaccagtggctgaagcagacattcgacgaggccgataagaacggcgatggatcattgagcataggtgaagttttgcagctgctgcataagttgaatgtgaatctccccaggcaaagagtgaaacaaatgtttagagaagctgacacagacgatcaccagggtactctcgggtttgaggagttctgcgctttttacaaaatgatgtccactcgacgcgacctatacctcctgatgctgacctacagcaatcacaaggatcacttggacgcagcctcactgcagcgattcctgcaggtagaacaaaagatggctggagtgactctcgaaagctgccaggatattattgaacagtttgagccatgtcctgagaataaatccaagggacttctggggatagatgggttcacgaattatacaagatcaccggcaggggatatttttaatcctgagcaccaccacgtccaccaggatatgacccaacctctctcacactactttattacctccagtcacaacacatacctcgtgggggaccagctgatgagccagtccagggttgatatgtacgcttgggttttgcaagccggatgcagatgtgtggaagtggattgctgggatggcccagatggagaacccatagtgcaccacggatataccctgacaagcaagatcttattcaaagacgtgatcgagacaatcaataagtacgctttcattaagaatgagtaccccgtcattctatcaattgagaatcactgcagtgtgattcagcagaagaagatggcccagtacctgacagatattttaggcgataagttggatctctcaagcgtttcctctgaagatgcgaccacacttccatctccacagatgcttaaaggaaagatccttgtcaagggaaagaaactccccgcaaacatctctgaggacgcagaggagggcgaggttagcgacgaggatagcgcagacgagatagacgatgactgcaagctgttgaacggagacgcctccaccaacagaaagcgtgtagagaacacggccaagaggaaactcgattctctgatcaaagaatccaaaattagagattgcgaggaccctaacaattttagtgtttcaaccctgagcccctccgggaaattagggagaaagagtaaggcggaagaggacgtcgagtctggcgaggatgctggggcttctagacggaacgggagactggtcgtgggatcattctcccgacgcaagaagaaaggcagtaagctaaagaaagctgcctccgtggaggagggtgacgaaggtcaggactcgcccggtggtcagtcacggggagctactcgccagaaaaagactatgaagctatccagagccctctccgacctggtcaagtatactaagagcgtcgcaactcatgacatcgagatggaggctgcttcgtcctggcaggtgtccagtttctcagagaccaaggctcaccaaatcttgcagcagaaaccggcacagtatctgcgcttcaatcaacagcagctgtccaggatctatccgtcgagctatcgggtggattctagcaactacaatcctcagcctttctggaatgccggttgccagatggtagcactcaactaccagagcgaagggaggatgcttcaactgaatagagcaaagtttagtgcgaatggcggttgtgggtacgtgttaaagccaggatgcatgtgccagggagtgtttaacccaaattctgaagacccccttcccggacagctcaaaaagcagctcgtgctgcggatcatttcgggccagcaactgccaaaacctagagattccatgctcggcgatcggggagaaatcatcgacccttttgtagaggtggagatcattggccttcccgtggactgctctcgagaacagactagagtggtggacgataacgggtttaatcctacttgggaggagaccctggtgttcatggtgcacatgccggagatcgctctagtccggttcctcgtatgggaccacgaccccataggaagggacttcatcggccagagaacgctggcattttctagcatgatgcctggctaccggcatgtttacctcgaggggatggaagaggccagcatctttgtgcacgtggctgtgtcagacatctccggaaaagttaaacaggctttaggcttgaaaggattattcttgagaggtccgaagcctggcagcctggactctcacgctgcagggaggccgccagcaagaccttcagtgtcccaaagaattctccggcgaaccgccagcgctccaacgaaaagtcagaagcccggaaggagaggatttcccgagctggttctgggcaccagggacaccggatccaagggcgttgcggatgatgtggttcctccaggtcccggaccggcaccagaggcacctgcccaggagggcccaggctcaggctctcccagggatacacgcccattgagcacccagcggcctcttcccccactatgctcactggagacgatcgctgaagagcccgcaccagggccagggccaccccctcctgctgccgtccctacaagcagcagccaagggaggccaccctaccccacggggccaggcgctaatgtagcatcccctctggaggataccgaagaaccacgcgactcccgcccacggccttgtaacggtgaaggcgctggcggagcctacgaaagagcacccggttcacagacagatgggagatcccagcctagaaccctgggacatctccctgtgataagaagggtcaagtccgagggccaggtgcccaccgagcccttggggggatggcgccctctcgcggctccattccccgcacctgccgtctactccgatgccaccggttcagaccctctgtggcagcgtctcgagccatgcggccaccgagactcagtgagctcatccagctcaatgagtagttccgacaccgtgatcgacctttcgctaccctctctcggcttagggagatccagagaaaatctagctggagctcatatggggaggctcccaccgaggccacatagcgcttccgcagcaaggcctgaccttcccccagtgaccaagagtaaatctaatcccaacctgcgagccaccggtcagcgtcccccaatcccggacgagctccaacctcggagcctcgcccctcgcatggctgggcttccgttccgccctccatggggatgtctctccctggttggagttcaggactgcccggtggccgcaaagtctaaatcactaggcgatctcaccgccgatgatttcgccccatccttcgagggcggatcacgtaggctgtcacattcccttggattgccagggggtacacggagggtctccgggccaggagtgagacgcgacacattgactgaacagcttcggtggctaacggtgtttcaacaggctggtgatatcacgagccccacctccctgggtcccgcaggggagggggtggctgggggaccgggttttgtgaggcgttcaagctctcgcagccacagtcgggtgcgcgcaattgcatcaagagcacggcaggctcaggagcgccagcagcgcctccaggggctggggagacagggccctcctgaggaggagaggggaacacccgaaggtgcctgctcagtgggtcacgagggaagcgtggatgctccggcacccagcaaaggagctctggggccagcttcagcagcagccgaaaaccttgtgctcctcaggctgtag

SEQ ID NO: 234925 - DNA, 4143 bp, synthetic construct
  misc_feature 1..4143: note = Description of Artificial Sequence: Synthetic coding sequence
  source 1..4143: mol_type = other DNA
atgtccgggccttggccgtcccccgactcgaggaccaaaggcacggtcgcatggttggcagaggttttgttgtgggtcgggggaagcgttgtgcttagttcagaatggcaacttggaccactggtcgagcgctgtatgggcgcaatgcaggaaggcatgcagatggtgaagttaaggggcggaagcaagggtctggttaggttttactacttggacgaacaccgctcatgcattcggtggcgcccatctaggaagaacgagaaggctaagattagcatagattctatccaggaggtcagtgagggaagacagtctgaagtgttccagcggtatcctgacggatctttcgatcccaactgctgttttagcatctaccacggatctcaccgcgaatctctggacctagtctccacctcttccgaagtggctagaacctgggtaacgggcctgcgctacttgatggctggtatctccgacgaagattcgcttgccaggaggcaaaggaccagggaccagtggttgaaacagaccttcgacgaggccgataaaaatggcgatgggtctctttcaatcggggaagtgctacaacttcttcacaagctaaacgttaatcttcctcgccagcgcgtcaagcagatgttcagagaggcagatactgacgaccaccagggcacattgggcttcgaggagttttgcgccttttacaagatgatgtccactagacgggacttgtatctgctgatgctgacctacagcaaccacaaagaccacctcgatgccgcaagtctgcaacgatttctgcaggttgaacagaaaatggccggtgtgacgctggagtcctgtcaggacataatcgagcaatttgagccttgtccagaaaataaaagcaagggcttacttggaatcgacggctttacgaactacaccaggtcacccgctggcgacatcttcaacccagaacaccatcacgtgcaccaggatatgactcaaccactctcccattacttcataacatcatcccacaacacatatctcgttggagatcagctgatgtcccagagtcgagtggatatgtatgcctgggtgctgcaagccggatgtaggtgtgtagaagtcgactgttgggacggcccagacggcgaacccattgtccaccacgggtacactcttaccagcaaaatcttgttcaaggacgtcatagagacaataaacaaatatgcattcataaagaatgaataccctgtcattctgtccattgagaatcactgttcggtgattcagcagaagaaaatggcgcaatatctgactgatattttgggagataagctggatttaagctcagtgtcctctgaagatgcaacaacattgccttctccgcagatgctgaaaggaaagatactggttaaaggcaagaaactgcccgctaacattagtgaagatgccgaggaaggcgaggttagcgatgaggactcggccgacgaaattgacgatgattgtaagctcctcaatggcgacgccagtacaaatcggaagcgggtagagaacacagctaagcggaagctggattcactgattaaggagtcgaagataagggactgcgaggatccaaataacttttctgtgtctaccctgtctccgtctggcaaattaggaaggaagagcaaagccgaggaagacgtcgagtctggagaagacgcaggggcttcccgaaggaacggaaggctggtggtcggaagcttctcaaggaggaaaaaaaaaggatctaagctcaaaaaggcagcctctgtggaggaaggagatgaaggacaagatagccctggaggccagagtaggggggctaccagacagaaaaaaacaatgaaactgagtcgcgcactctctgacctcgtgaagtatacaaaatccgtggccacccatgacatagagatggaggcagccagcagttggcaggtgagttctttcagcgaaacgaaagcccatcaaattctgcaacagaagcccgctcagtacctccgcttcaatcagcaacagctgtcacggatctacccctcaagctaccgcgtggacagtagtaactataatcctcagccattttggaacgctgggtgtcagatgggcgtattcaaccctaactccgaggatccgttgccgggacaactaaagaagcagctggtgcttagaattatctcaggtcagcagctgcctaaacctcgggattctatgcttggggatcgtggtgagattattgacccgttcgtggaagttgagattatcggcctgccagtcgattgtagcagggagcagactcgggtcgtagatgacaacggattcaaccccacatgggaggagaccctcgtctttatggttcacatgccggagatcgcccttgtccggttccttgtatgggatcatgaccccatcggacgggacttcatcggtcagcggacactagccttctcatctatgatgccaggctatcgccacgtgtacttggaaggcatggaagaagccagcatctttgtgcacgttgcggtttcagacatctctggcaaagtgaagcaggcactgggtctaaaggggctgttcctccgcggacccaagccagggtcactcgacagccacgcagccggtagacctccagctcgaccatccgtgtcccagagaatccttagacgcaccgcctctgctcctactaaaagtcagaagcctggaaggagaggtttccccgagttggtcctgggaacacgggataccggatccaaaggagtcgcggacgacgtggtgccacccggacctggaccagcaccagaggcaccagcacaggaggggccaggcagtggctcacccagagacacgaggccactgtcgacccaacgtccattacctcctctatgctcactcgagaccattgccgaagagcctgcgcctgggcctgggcctccccctcccgcagcagtgcccacgtcaagctcccagggtcgacctccctatcctacgggaccgggtgcgaacgtggcgtcccctctggaagatactgaggagcctagagactcccgtccacgaccatgcaacggggaaggagcaggcggtgcctatgaaagggcccctggcagtcaaacagacgggcgttctcagccccgaacactagggcatttgcctgttatcagaagagtgaaatctgaaggtcaagtgcctaccgaaccattgggtgggtggaggccactggcagccccttttcctgcccctgccgtgtactcggacgccactggtagcgacccgctgtggcagcgactagaaccctgcggccaccgggacagtgtatcatctagctcgagcatgtcttcttccgacaccgtgattgacttaagcctgccttcactcggcctcggacgaagcagggagaatctggcaggagcacacatggggaggctgccgcctagaccccactctgcctccgccgcaaggccagatttgccaccagttacaaagagcaagtctaatcctaacttaagagctactggtcagcgccctcccattcccgacgagttacagcccaggtcactcgcaccccgtatggcaggccttcccttccgacctccttggggctgcctgagtctggtgggagtgcaggattgtcctgtggccgcaaagtccaaatccctgggggatttaactgctgatgactttgccccatccttcgagggtggaagtcgcaggctctcacatagtttaggccttccaggcggaacaagacgggtctctggcccaggcgtgcggagagacaccctgacagagcagctgcgatggctcacagtgtttcaacaggccggtgatatcacctctcccacatccctcgggcctgcaggtgagggggtcgcaggcggacctgggttcgtgcgacggtcgtctagtcgctctcacagcagggtcagagctatcgcctcgcgcgctcgccaagcacaggagagacaacagcgtctgcagggactgggcagacaggggccaccggaggaagagcgtggtactcctgagggagcctgctctgtgggtcatgagggttccgtggacgctccagcaccttcgaagggagcgctgggtccagcttcagcagccgctgagaacctggtactgcttaggttgtag

SEQ ID NO: 234926 - DNA, 2136 bp, synthetic construct
  misc_feature 1..2136: note = Description of Artificial Sequence: Synthetic coding sequence
  source 1..2136: mol_type = other DNA
taggccctgaactaccagtctgaggggaggatgctacagctgaatagggctaagtttagcgcaaacggcggttgtggctacgtgctgaaacccggatgcatgtgccagggggtgtttaaccccaacagcgaagatcccctgcctggtcagctaaagaagcaactagtgctgagaatcatttccggtcagcagctgcccaaaccccgagactccatgctgggggacaggggcgagataatcgatccctttgttgaggttgaaataattggattacctgtggactgcagtcgtgagcagacgcgggtcgtcgacgacaatggattcaaccccacatgggaggaaactttggtgtttatggtgcacatgccagagattgcactcgttaggttcctcgtgtgggatcacgatccgataggcagagatttcataggacagcgcactctggcctttagttctatgatgccgggataccgccacgtatatctcgaaggcatggaagaagccagtatatttgtgcatgtcgccgtcagtgacatttcggggaaagtgaaacaagcactggggctcaagggcctgtttttgaggggtcccaagccaggatccctggattcacacgcggcaggcagacctccagccaggccatccgtgtcacagaggatccttcgtagaacagcctctgcccctacaaagtctcagaaacccggtaggcgtggcttcccggaactggtgctggggacgagggacacagggagcaagggagtggccgacgacgtggtgccccctggtcccggacccgcacctgaagcacccgctcaggaaggccctgggtcaggatctcccagagacacccggccactgagcacacaacgcccacttccgcctctttgcagtctggagacaattgctgaagaacccgcacccggacccggaccacctcctccagccgctgtaccaacctcttctagccagggcagacctccctatcccactgggccaggagccaacgtggcttctcctcttgaagatacggaagaacctcgcgattcccggccacgcccatgcaatggtgagggcgcaggaggcgcatacgagcgagcccctggatcccagaccgacggacgatcacagcccagaacattaggccatctgcctgtgattaggcgcgtcaaatcagagggccaagtccctaccgagcctctcgggggatggagacccctagccgctccatttcctgcccctgctgtttatagcgacgctaccgggagcgaccctttgtggcagagactggaaccatgcggccatagagactctgttagtagcagtagcagtatgagttctagtgataccgtgattgacctgtctttgcctagcctgggcctcggtcgctctcgcgagaatctcgccggtgcgcatatgggtcggctgcctccaaggccgcattctgcatccgctgcaaggccggatctgccccctgtaactaaaagcaaaagtaatcctaacctccgtgccaccggccagagaccacccatacctgatgagctgcagcccaggtccttggctccacgcatggctggcctcccattccggccaccctggggatgcctgagtctggtgggggttcaagattgccctgtcgcggctaagtcaaagagcctgggcgatctcactgccgatgatttcgctccatcatttgagggtggctcgagaagactgtcccacagcctgggactacctggcggaacacgtcgcgtcagtggtccaggggtgcgcagggacacactcactgagcaactgaggtggctcacagtctttcagcaagccggagacatcaccagccctacctcacttggaccagccggtgagggtgtcgccggtgggccaggatttgtgagacgctcctcttctagatctcattccagagtgagagcaatcgccagtagggctaggcaagctcaggagaggcagcagcgcctgcagggtctcgggaggcaagggccacctgaagaggagcggggaacccccgaaggcgcatgctccgttgggcatgaggggtccgtggatgcccctgccccttccaagggggcactgggcccagcctcagcagccgctgagaatttagtactcctccgtctttag

SEQ ID NO: 234927 - DNA, 3390 bp, synthetic construct
  misc_feature 1..3390: note = Description of Artificial Sequence: Synthetic coding sequence
  source 1..3390: mol_type = other DNA
atggaggaacccggaccaccaggaggactgagtcaggaccaagtcgagcgatgtatgggagcaatgcaagaaggcatgcagatggtgaaactgcggggaggctctaaaggattggtgcgcttctattatctggacgagcacaggtcatgtatccgctggagacccagccgcaaaaatgagaaagccaagattagcatcgacagtatccaggaggtgtccgaaggacgtcagagcgaggtgttccagcggtacccagacggctcatttgatcccaattgttgcttttcaatctaccatggttcacaccgggaatctctcgacctggtaagcacttcctctgaagtggcccgtacttgggtcaccggacttaggtacctaatggccggaatctcagacgaggattctctggctcggaggcaacgcacacgggaccaatggctgaaacagacttttgatgaagctgataagaacggcgacggatctttatcgattggggaagtgcttcagctgttgcataaattaaatgtcaacctcccgaggcagcgggtgaagcagatgttccgtgaagccgataccgacgaccatcagggaaccctgggattcgaagagttttgcgcattttataaaatgatgagtacacgaagagacctgtaccttttgatgcttacctattcaaatcataaagaccacctcgacgcagccagcttgcaaaggttcctacaggtcgaacagaagatggcaggcgtgacactggaaagttgccaggacatcattgaacaatttgagccgtgtcccgaaaataagtcaaaggggctcctgggcatcgatgggtttaccaattatactagatctccagccggagatatcttcaaccctgaacaccatcacgtgcatcaagacatgacccagcccttgagccactacttcattacatctagtcacaacacctacctcgtgggtgaccagctgatgtcacagtcccgcgtggatatgtatgcctgggtgctacaagccggatgtagatgtgtggaggtagattgttgggatggtcccgacggcgagcccatcgtgcatcacgggtatactctaacctctaagatactgtttaaggacgtcattgaaaccattaataagtatgcattcataaaaaatgaatatccggtcattttgtcgatagagaaccattgttccgtgatccagcaaaaaaagatggcacagtaccttacggatattcttggagataagctagatcttagttccgtgagcagcgaagacgccaccaccctaccaagcccccagatgctgaaaggcaaaatcttggttaagggcaaaaaactccccgcaaatattagtgaggacgctgaagaaggcgaggtgtccgacgaggattctgccgatgagattgatgatgattgtaagctccttaatggggatgcatcaacaaataggaagcgggtcgagaatacggctaagaggaaactggacagtcttatcaaagaatccaaaattagagactgcgaggatcctaacaacttctcagtttcaactctgtctccaagcgggaagctcggacgcaagtcaaaggctgaggaggacgtggagagcggagaggacgctggagcatctcgcagaaatggccgactggtggtgggctcatttagccggagaaagaagaagggatccaagctaaagaaggccgcaagcgtagaggagggggacgagggccaagattctcctggcggtcagtcaaggggggctacacgtcagaaaaaaacgatgaagctctccagggccctgtctgacctagtcaagtacaccaaaagtgtggcaactcacgatattgaaatggaagccgcatcttcgtggcaggtgtcgagtttttcagagaccaaggctcatcagatcctgcaacagaaaccagctcagtatcttcggttcaaccaacagcaattgtctcgcatttatccttcttcctacagagtggattcctctaattacaacccgcaaccgttctggaacgcaggttgccagatggtggccttaaactaccagtcagaggggagaatgctgcaacttaatcgtgcgaaattcagcgctaatgggggatgtggctacgtgctgaagcctggatgtatgtgtcagggggtattcaacccaaattctgaagaccctctgcccggacagctgaagaaacagttagtgctgagaataatcagtgggcagcagcttccaaaacccagggacagcatgttaggtgaccggggagaaatcatcgacccatttgtggaggtcgagataataggcttaccagtggactgttcccgagagcaaacaagggtggtcgacgataacggatttaaccccacatgggaagaaacccttgtatttatggtgcatatgcctgaaattgccctcgtacgattccttgtatgggatcacgacccgattgggcgagacttcatcggacagagaactttggctttttcaagtatgatgcccggatacaggcacgtatacttggaaggcatggaagaggctagcatctttgtgcacgtggccgtctcagacatttcagggaaggtgaagcaggcgttagggctcaagggactctttctcaggggacccaaacctggtagtctggactcccacgcagccggtcgccctcccgctaggcctagcgtctcccagagaattttacggagaaccgctagcgctccaaccaaatctcagaagcccggtcgaagaggctttcccgagctggtgttgggcactcgggacacaggctccaaaggagttgccgatgacgttgtgcccccaggtcccggtcccgcacccgaagctccagcacaggaggggcctggttccggtagccccagggggaaagccccagccgcagtggccgaaaagtcccccgtcagagtcagacctccaagagtcctggacggtccaggtcctgccggaatggctgccacttgtatgaaatgcgttgttgggagttgcgctggcgttaatactgggggtctgcagcgcgagcggccaccgagccctggtcctgccagcaggcaggctgcgatcagacagcagccaagggcacgcgcagatagcctcggagccccatgttgcggactcgatccccacgcgattccaggacgaagccgggaggcgcctaaaggccctggtgcgtggcggcagggcccaggaggctcaggctccatgagctcagacagctcgtcgcctgattcacccggtattcccgagcggagtcctaggtggcccgaaggggcatgcaggcagcccggtgccttacagggggaaatgagcgcacttttcgcccagaaattggaggaaattaggtcaaaatcacccatgttttcagccgtaagaaactag

SEQ ID NO: 234928 - DNA, 1827 bp, synthetic construct
  misc_feature 1..1827: note = Description of Artificial Sequence: Synthetic coding sequence
  source 1..1827: mol_type = other DNA
atggaaatgcgctggttccttagcaaaatccaagacgactttcggggaggaaagatcaatcttgagaaaacgcagaggctactggaaaagttggatattaggtgttcttatattcacgttaagcagatttttaaggacaacgatcggctgaaacaaggtaggatcacaatagaggaattccgggcaatataccggatcattacccatagagaagagattattgaaatatttaatacgtatagtgagaaccgcaaaatcctcctagcctcaaacctcgctcagtttttgactcaggaacagtacgctgcagagatgtccaaggcaatagcctttgagatcatccaaaagtatgagcctatcgaagaggtacggaaggctcaccaaatgtctctagaaggttttacaagatacatggattcaagagagtgtttgttgtttaagaatgagtgcagaaaggtgtaccaagatatgacacaccctctgaatgattacttcatatcatccagccataacacatatttggtgtccgatcaattgcttggtccttctgatctctggggctatgtcagcgctctcgtgaagggctgtcgttgtctggagatcgactgctgggacggcgctcaaaatgaacctgtggtgtaccatggatatactctgacctctaagctgctcttcaagacagtcatacaagccatccataaatacgcattcatgacttctgactacccggtcgtgctgagcctggagaatcactgcagtacagcacagcaggaggtgatggccgacaacctccaggctacgttcggggaatcattactcagtgatatgcttgatgacttccccgacaccctgccttctccagaggctctcaagttcaagattttagttaagaacaaaaaaatcggaacgctgaaggagacacacgagcgcaagggatctgacaaaagaggagataatcaagataaggaaacaggtgttaaaaagctacctggggttatgctgtttaaaaaaaaaaaaacccggaagctcaagatcgcgttagctttgtctgatctggtgatttatactaaagctgaaaagttcaaatccttccaacacagcaggctgtaccagcagttcaatgaaaataattcgattggggagacccaagcacggaaactgtccaagctcagagtacacgaattcatcttccatactcggaaatttatcacacgaatttaccccaaggcgacgcgagcggactcgagtaactttaacccacaagaattctggaatatcggatgtcaaatggtggcgttaaactttcaaacccctggcctccccatggatttacagaatggcaagttcttggacaacggcggttcagggtatatacttaaaccacacttcctgagagaaagtaaatcgtactttaacccatctaatatcaaagagggcatgccaattaccttgaccattaggttgataagtgggatccaacttccactcacccatagctcttctaacaagggcgactcactggttataatcgaagtctttggcgtacccaacgatcagatgaaacagcagacacgagtcattaagaagaacgcttttagcccgagatggaacgagacctttacctttattatccatgtgcccgagctcgcacttattcgtttcgtggtggaggggcaggggctgatagctgggaatgaattcctgggacagtacaccctgccactgctgtgtatgaacaaaggatacagaaggatccccctgttcagccgaatgggcgagtctttggagccagcgtcacttttcgtgtacgtgtggtacgtgcgttag

SEQ ID NO: 234929 - DNA, 1242 bp, synthetic construct
  misc_feature 1..1242: note = Description of Artificial Sequence: Synthetic coding sequence
  source 1..1242: mol_type = other DNA
atgcggtggtttctatccaaaattcaggatgatttccgcggaggtaaaattaacctcgaaaagacccagaggttattggagaaactggacataagatgttcttatatccacgtgaagcagatcttcaaaacaagcgattacccagtcgttctatcccttgagaaccattgttctacggctcagcaggaggttatggcagacaatctgcaagcaaccttcggggaatcattactctctgatatgctggacgattttcctgacacactgccatctccagaggctctgaagttcaaaattctcgttaaaaataagaagatcgggacactgaaggaaacgcatgaaaggaagggctccgacaagaggggggacaaccaggataaggagacaggagtgaagaaacttcccggtgtgatgctttttaaaaagaagaagacacgcaaattgaagattgctctggcacttagcgacttggtgatatatacaaaggctgaaaaattcaagagctttcagcactcaagattatatcaacagttcaacgaaaataactccatcggggaaactcaggccaggaaactgagcaagctgagggtccatgagtttatcttccatacgaggaagttcattacacgaatataccccaaagctacaagagcggattcctcgaatttcaacccccaggagttttggaatattggatgccagatggtggcgctgaatttccagacacccggactgcctatggatctccagaatgggaagttcttggacaacgggggatcgggctatatcctgaagccacacttcttaagggaaagcaaatcctactttaatcccagtaatatcaaggagggaatgcctatcaccctgacaattagactcatttccggtatccagctgcccttaactcacagcagttccaataaaggcgatagcctagtcatcatcgaggtgtttggggttcccaacgaccaaatgaaacagcagacaagagttataaaaaaaaacgcttttagtccacgctggaatgaaactttcacctttataatacacgttcccgagctggcattgattagattcgttgtggagggccaggggcttatagcaggaaatgagtttcttggccagtataccttgcccttgttgtgtatgaataaaggataccgacgaatccctttgtttagtcgaatgggcgagtcattggagcctgcatccctgtttgtctacgtttggtatgttcggtag

SEQ ID NO: 234930 - DNA, 1821 bp, synthetic construct
  misc_feature 1..1821: note = Description of Artificial Sequence: Synthetic coding sequence
  source 1..1821: mol_type = other DNA
atgaggtggtttctcagcaagatccaggatgattttaggggtggcaaaatcaacttggagaagactcaaaggctgctagagaaattggatataagatgtagctatatccacgtgaaacagatcttcaaggataacgatagactgaaacaggggcgaatcaccatcgaggaatttcgggcaatctatcgcatcatcacccacagagaagagattattgagatcttcaatacatactctgaaaatcggaagatccttctagctagcaacctcgcccagttcttgacccaggagcagtatgccgctgagatgagcaaagcaattgctttcgaaatcatccagaaatacgagcccatcgaggaagtgaggaaggcccatcagatgagcctcgagggcttcacccgatacatggattcccgggaatgcctgctgttcaagaatgagtgcagaaaagtctaccaagacatgacacatccgttaaacgattattttatctcctcctcacacaacacttatctggtgagtgatcaacttctcggtccctctgacttgtggggatacgtgagtgccctagtaaagggatgtcgctgtctggagattgactgctgggatggggctcagaatgaacccgtcgtttatcatggatataccctaacatcaaagcttctattcaaaacagtgattcaggccattcacaagtacgccttcatgacttcagactatccagtcgttctgagccttgagaatcattgctcaaccgcgcaacaagaggttatggcggacaacctgcaagcgacattcggagagtcgctcctgagcgatatgttggacgattttccagacaccctcccaagtccggaggccctgaaattcaagatccttgtgaagaataagaaaatcggaaccctcaaagagacacatgaacggaaggggtcagacaagcggggtgataatcaggataaggagaccggcgtgaagaagcttcctggtgtcatgctttttaagaagaagaaaacccggaaactgaaaatcgccttggcactctcagatttggttatttacacaaaagcagaaaaattcaaatcgttccagcattctaggctctatcagcagtttaacgaaaacaactcaatcggcgaaacacaggcacgaaaactgtctaagctgagggtgcacgagttcatttttcatacacgcaaatttattacacgcatctatccgaaggccacacgggcagactcgtcaaacttcaacccacaggagttctggaatattggatgtcagatggtggctctgaatttccagactcctggcctgcctatggatctgcagaatgggaaatttctggacaacggcggaagtggatacatcctgaagcctcactttttacgggagagcaagtcctatttcaatcctagtaacatcaaagagggcatgcctattactcttaccatccgccttatctcaggcatacagctaccgcttactcatagcagcagtaataaaggagattctctggttattatcgaggtgtttggggtccccaatgaccagatgaaacaacaaactagagtgatcaagaagaatgcctttagccctcgttggaacgagacctttactttcattattcacgtgcccgagctcgccttaattcggttcgtcgtggaggggcaaggcctgatcgccggaaacgagttcttgggccagtatactctgccactactgtgcatgaacaaaggatataggcgtatccccctgttcagtaggatgggtgagtcactggagcccgcaagtctgtttgtctatgtatggtacgtgcgctag

SEQ ID NO: 234931 - DNA, 1248 bp, synthetic construct
  misc_feature 1..1248: note = Description of Artificial Sequence: Synthetic coding sequence
  source 1..1248: mol_type = other DNA
atggagatgcgctggtttctctcaaagatccaggacgatttcagggggggaaagattaatctggaaaaaacacagcgtctattggaaaagctggacatcaggtgcagctacattcacgttaagcagatcttcaaaaccagcgattatccagtggtgttgagccttgaaaaccactgctccactgcacagcaagaggttatggcggacaacctccaggctaccttcggcgagtcgttactgtccgatatgctagacgacttccccgatactcttcccagccccgaagccctgaaatttaagatcctggttaagaacaagaagatcggcaccctgaaggaaactcacgaaaggaaggggagcgacaaaaggggggacaatcaggacaaagagaccggcgtgaagaagctcccaggcgtgatgctcttcaaaaagaagaaaacccgtaaactgaagatcgcactggcactctcagatttggttatctataccaaggcagagaagtttaaaagtttccagcacagcaggttgtatcaacaattcaacgagaacaattctatcggggagacccaagcacgaaaactaagcaaactgcgagtgcatgagtttatattccacacacgtaagttcatcacaagaatttatcccaaagcaacaagggccgactccagcaatttcaatccacaagagttctggaacatcggatgtcagatggtggcgcttaactttcagacccccggtcttcccatggatctgcagaacggaaagttcctcgacaacggcggatcaggctatatcctaaaacctcactttcttagggagtctaagagttattttaacccttcaaacattaaggagggcatgcccatcacacttaccattcgcctgatctcaggaatccagctgcctctcacccactcttcctccaataagggtgactctttggtcattatcgaggtttttggagtgccaaacgatcagatgaagcagcagaccagagtgatcaaaaagaacgccttctctcccaggtggaacgaaacattcacgttcatcatacatgttccagaactggctctgatacggttcgtggtcgagggtcagggcttgatcgctggcaatgagttcttgggccaatacacgctgccactcttgtgtatgaacaaagggtatagacgtatacctctgttttcaaggatgggtgagtctcttgagccagcaagcttgtttgtgtatgtgtggtacgtgcgttag

SEQ ID NO: 234932 - DNA, 1212 bp, synthetic construct
  misc_feature 1..1212: note = Description of Artificial Sequence: Synthetic coding sequence
  source 1..1212: mol_type = other DNA
atggatagcagggaatgtctgctgttcaaaaatgagtgcaggaaggtgtatcaggacatgacccaccccttgaacgactatttcatcagcagctcccataatacatatttagtgagtgatcaactgctcggaccttccgatctctggggctacgtatccgccttggtcaaagggtgtcgctgcctcgagatcgattgttgggatggcgctcagaacgagcccgtcgtctatcacggatacacactgacttcaaaacttctgttcaaaaccgtaatacaggctatacacaaatacgctttcatgacaagcgattacccagtcgtcctaagccttgagaaccattgctccacggcccagcaggaggtgatggccgataatttacaggcaaccttcggtgagtctctgctgtccgatatgttagatgatttccccgatacactgccgtccccagaggccctcaagttcaagattctggtcaaaaataagaagataggaactttaaaggaaacgcacgagaggaaggggtccgacaaacgcggtgacaaccaggataaggaaaccggagtcaagaaactgcccggtgtcatgttattcaagaagaagaagacacggaagcttaaaattgccctggccctgtctgatctggtaatttacacgaaagcggagaagtttaagagttttcaacattcccgcctgtatcagcagttcaatgagaataattcgattggcgaaacccaggccaggaagctctcgaaattgcgcgtgcacgagttcatctttcacacacggaagtttatcactaggatctatcccaaggcaaccagagctgatagttcaaactttaatccacaagaattctggaatattggatgtcaaatggtggcgctcaacttccaaacccccggactgccaatggatctgcagaatggcaaattccttgacaacgggggaagcggttacatcctgaagccacattttctgcgagagtcaaaatcttacttcaaccctagcaacatcaaggagggcatgccaattaccttgaccataaggttaatttccgggattcagctgcctcttacacacagctccagcaataagggcgatagcctggttattatcgaggtgtttggcgtccctaatgaccagatgaagcagcagacccgggttattaaaaagaacggtcaagggaacatggtgattatcccagcgtag

SEQ ID NO: 234933 - DNA, 3387 bp, synthetic construct
  misc_feature 1..3387: note = Description of Artificial Sequence: Synthetic coding sequence
  source 1..3387: mol_type = other DNA
atggcagattgcgtgcggggatgggcagctgtgggtggagccctccccaccagcccgggtccatcactgggggctaagggcgcactcaaagccggtgtgggtgaagatggcgttggcggaggtcgcctggtacatgggagggccaggtacgattcagggggtgtaagtaatggcgactgttcccttggcgtgtctggggatgaagcacgagcctcacccacccggggtccaagaggggtggccctggctcctactccaagcgccgtggtgtgtacactgccaagagaatcgaaacccggtggcctcccacggcgatcctccatcattaaagacggtaccaaacagaaacgcgagcgcaaaaaaaccgtgagcttcagttctatgcctaccgaaaagaagatatcctcagcatccgattgcatcaattccatggttgaaggcagtgagctgaagaaagttcggtcaaattctcgaatctatcatcgatactttctgctagatgcggacatgcagagtctgcggtgggaaccctccaagaaagattccgagaaggccaagattgacatcaaatccataaaggaggtgagaacaggaaagaataccgatatattccgatccaacgggatcagtgatcagatcagcgaagactgcgctttttccgttatttacggtgagaactacgaatcccttgatctggtagcaaacagcgcggatgtggccaatatttgggtgacaggtctgcgttatcttatttcttacggaaaacatacattagatatgcttgagtcatcacaagacaacatgagaacgagttgggtgagccagatgttctctgagatcgatgtcgataatctgggtcatatcactctgtgcaatgcagtgcagtgcatacggaacctgaatccaggattgaaaacttctaagattgaattgaagtttaaggagctacataagtctaaggataaagccggaacagaggttactaaggaagagtttattgaagtgtttcacgagctgtgtactcgaccagagatttattttctgctagtgcagttctcgagcaacaaggagttcctggacacaaaggacctgatgatgttcctcgaggcggaacagggcgtggcccacatcaatgaagaaatttccctggagattatccacaaatacgaaccgtcaaaggaaggtcaggaaaaaggttggctcagcattgacggtttcactaactatctaatgagccctgactgctatattttcgacccagagcataagaaagtctgccaggatatgaaacagccactttcccactacttcattaattcatctcataatacatatctaattgaggatcagtttcgtggaccctctgacattaccggttatatccgtgccctgaagatggggtgccgtagcgttgaactagatgtttgggacggacccgacaatgagcccgtgatctatactggacacactatgacgtctcaaatcgtatttagatccgtcatcgacattatcaataagtatgccttttttgcaagcgagtatccactcattctgtgcctagagaatcactgcagcattaaacagcagaaggtgatggtgcagcacatgaagaagctccttggggataagctctacacaacctccccgaatgtggaggagtcttacctaccatccccggacgtgctgaaaggcaagatattgataaaagccaagaagctgagcagcaattgctccggagtcgagggagacgtgaccgacgaagacgaaggggcagagatgtcacagcggatgggaaaagagaatatggagcaaccaaataacgttcccgttaaacggttccagctgtgtaaagagctctcagagctggtctccatttgtaaaagcgtacaattcaaggagtttcaggtttcatttcaagttcagaagtactgggaggtgtgtagctttaatgaggtactcgcatcgaaatacgcaaatgagaacccaggagatttcgtgaactataacaaacgttttctggctagagtgttcccaagccctatgcggatagactctagcaatatgaacccgcaggatttctggaagtgtggttgccagattgtcgccatgaattttcaaacccctggtctgatgatggacctcaacatcggatggtttagacagaacggtaactgtgggtacgtgctcagacccgctattatgcgggaggaggtgtccttcttcagtgctaacacaaaggatagtgtgccgggagtaagccctcaactgctacacatcaagattatctctggccagaacttccctaagcctaaaggctcgggcgctaagggggacgtcgtggatccctatgtgtatgttgagatccacggaattccagctgactgcgccgagcagcgaacaaaaaccgtgcaccagaacggcgatgcacccatcttcgatgaatcatttgagttccagatcaacctccctgaactggctatggtccgctttgtcgtcctggatgacgattatatcggcgacgagtttattggacagtacaccatcccgttcgagtgtctgcagaccgggtacagacacgtgccactgcaatccttaaccggcgaggtgcttgcacacgcctcattgttcgtgcacgttgctataaccaaccgaagaggtggcggaaaaccccataagcggggtctgtccgtgaggaagggtaagaaaagcagggaatatgcctccctgcgcacactgtggataaagacagttgacgaggtgtttaaaaatgcacagcctcctattagagatgccactgacctgagggaaaacatgcagaatgcagtggtgtcctttaaagagctgtgtggattgtcgtctgtggcaaacctgatgcagtgtatgctcgccgttagccctaggtttctggggccagataacactcctctcgttgtgttgaacctgagcgagcagtacccaactatggagttgcagggcattgtgcccgaagtcctaaagaagatcgtgactacatatgatatgatgatccagagcctgaaggctcttattgagaacgcagacgcggtgtacgagaaaatcgtacactgtcagaaagccgctatggagttccatgagcatctccactccatcgggaccaaggagggactgaaagagcgtaagttgcagaaagcggtagagtcgtttacatggaatatcacaatccttaaggggcaggccgacttattgaagtacgctaagaacgagaccctcgagaatctaaagcagatccattttgccgctgtctcctgtggactgaataagccgggtaccgagaatgcagacgtgcagaaaccacgaaggtccctggaggtcatcccagaaaaggctaatgacgaaaccggagaatag

SEQ ID NO: 234934 - DNA, 2883 bp, synthetic construct
  misc_feature 1..2883: note = Description of Artificial Sequence: Synthetic coding sequence
  source 1..2883: mol_type = other DNA
atgccaactgagaaaaagatctcttcagcctctgattgcatcaacagcatggtggagggatccgagcttaagaaggttaggagcaacagccgcatctaccatagatacttcctgctggatgccgacatgcaatcgctccggtgggagccctccaaaaaagacagcgagaaggctaaaattgatataaagtcaattaaggaagtacgcactgggaagaacactgatatctttaggagcaatggcatctcagatcaaatatccgaggactgtgcttttagcgtcatctatggggagaactatgagagccttgatttagttgcgaacagcgcagatgtggctaacatttgggtgactgggctgaggtaccttatttcatatggtaagcataccttagacatgctggaatcgagccaggataacatgagaacctcttgggtctcccaaatgtttagcgaaatcgatgttgataacctggggcacatcaccttatgcaacgccgtacagtgtatccgcaacctgaacccagggctgaagactagtaagatcgaattgaagtttaaggaattgcacaaatccaaagacaaggccggaacagaggtgacaaaggaagaatttatcgaggtgttccacgagctctgcacacgcccagaaatatattttcttctagtgcaattttcctctaacaaggaatttctcgatacaaaagatcttatgatgttcttagaggccgagcaaggcgtcgcccacatcaacgaggaaataagtctggagatcatccataagtacgagcccagcaaggaaggtcaggagaaaggatggctttcaatcgatggtttcaccaattatctgatgagcccagattgctatatattcgatcccgaacataaaaaagtgtgccaggacatgaagcagcccctttctcattattttatcaactccagtcataatacctacctcatagaggatcagtttaggggaccatctgatattaccggatacatccgggctctgaaaatggggtgccgctctgtggagttggacgtttgggacgggccagataacgaaccagtgatatacacgggacacacaatgacatcgcagattgtgttcagatcagtgattgacattatcaacaaatatgctttcttcgcaagtgagtatcccctgatactgtgtttagaaaatcattgttctattaagcaacagaaagtcatggttcagcacatgaaaaaacttctgggagataaactgtatactactagccctaatgttgaggagagttacttgccctctcccgacgtgttaaaggggaaaatcctgatcaaagccaaaaaactcagttctaactgttctggtgtcgagggtgacgttaccgacgaagacgaaggggctgagatgtctcagcggatgggcaaagagaatatggagcaacccaataatgtgcccgtgaagcgcttccagctgtgcaaggaactctcagagctggtctccatttgtaagagtgtacaatttaaagagttccaggtgtcttttcaagtccagaaatactgggaggtttgttcctttaatgaagtgctggccagcaaatacgccaacgaaaaccccggtgactttgtgaactataataagcgcttcctggcccgtgtgtttccgtcacctatgagaatcgatagcagcaacatgaacccccaggacttttggaagtgcggatgtcagatcgttgcaatgaacttccagacccctgggctgatgatggatctgaacattgggtggtttcgacagaacggcaattgcggctacgtcctgcggccagccatcatgagggaggaggtgtctttcttttccgccaataccaaggatagcgtgccaggggtgtctccccagctgcttcacataaaaataatatctggccagaattttcccaagcccaaggggagcggcgctaagggcgacgtggtggatccctatgtgtacgttgaaatccacgggatccccgctgactgtgcagagcagcgtaccaagactgtgcatcagaacggcgatgctccaattttcgatgagtctttcgaattccagatcaatctgccagagcttgctatggtgcgattcgtggttctggacgacgactacattggtgacgagtttataggccagtacacgattcctttcgaatgtctccagactggctacaggcacgttcctctgcaatctcttacaggcgaagtgctggctcacgctagcctgttcgtacacgtggctattactaaccggcgtggaggtggaaaaccccataagcgaggtttaagcgtccggaaaggaaaaaaatcacgggaatacgctagtctgaggacactgtggatcaagaccgtggacgaagttttcaagaatgctcagccccctatacgcgatgcaacagatttgcgagagaacatgcagaacgctgtcgttagcttcaaggagctgtgcggtttgtcaagtgtggcaaatctgatgcaatgtatgctcgcagtctcaccaagatttctgggacccgataataccccgttagtggttctcaaccttagcgaacaatacccaactatggaacttcaaggcatcgtgccagaggtgctaaaaaaaatagtaactacgtatgatatgatgattcagagcctgaaagccttgattgagaatgccgacgccgtgtacgagaagatcgtgcactgtcagaaagccgcaatggaattccacgaacacctgcactcaatcgggacaaaggagggcttgaaggagcgaaaactgcagaaggcagttgaaagcttcacttggaacattacaattctgaagatcaggaaaaccggacgacgaagcatttttgtgccacagaccccaatcatggtgtag

SEQ ID NO: 234935 - DNA, 3006 bp, synthetic construct
  misc_feature 1..3006: note = Description of Artificial Sequence: Synthetic coding sequence
  source 1..3006: mol_type = other DNA
atgccaaccgaaaagaagatctctagcgcctctgattgcatcaatagcatggtcgaaggcagcgaactcaagaaggtgcggagcaacagtcggatctaccatcgctacttcctcctcgacgctgacatgcagtcactacgttgggagcccagtaaaaaggactcagagaaggcgaagatcgatattaagagtatcaaagaggtgaggacgggcaagaacaccgatatatttcgatccaacgggatctccgaccagatcagtgaagattgcgccttttcagttatttatggggaaaactacgaaagcctggatctcgtggccaacagcgctgacgtggccaacatctgggtgaccggacttcgatacctgatttcgtacggcaaacacacactggacatgctggaatcgagtcaggataatatgcgcacctcttgggtcagtcagatgttcagcgagatcgatgtggacaaccttggccatatcaccctgtgcaacgctgtacagtgcattcgcaatttaaatcctggcctcaaaacatcgaaaattgagctgaagttcaaggagctgcataagagcaaggacaaggccggtaccgaggtgactaaggaggagttcatagaggtttttcatgagttatgcaccaggccggagatttactttctattggtgcagttttccagcaacaaggagtttctcgacactaaggacctcatgatgtttctcgaagccgagcagggggtagcccatataaatgaggaaatctctctggaaattatccacaagtatgagccctccaaggaggggcaggaaaaagggtggcttagcatcgacgggtttactaattacttaatgagccccgattgctatattttcgatcctgagcataaaaaagtgtgccaggatatgaagcagcccctctcacactacttcatcaactcttctcataacacatacctgattgaagatcagtttcggggaccgagcgacattaccggctacattagagccctcaaaatgggctgccggtcagtcgagcttgacgtatgggatggcccagataacgaaccagtgatctatactggccacaccatgacaagtcaaattgtgttcaggagtgtgattgacataattaacaaatacgcattctttgcctcggagtaccctctcatcttgtgcctcgaaaaccactgtagcatcaagcagcagaaggttatggtgcagcacatgaagaaacttctcggcgataagctgtatactacgagcccaaatgtcgaggaatcctatcttccttcccctgacgtgcttaagggaaagatcctcatcaaagctaagaagctgtcatctaactgcagcggtgtggagggtgacgtgacagatgaggatgaaggggctgaaatgtcccagagaatggggaaggagaatatggaacaaccaaataatgtcccagtgaaacgatttcagctgtgcaaggaactgtctgagttagtatccatttgtaagtccgtccagtttaaagaattccaggtttcattccaggtccagaagtactgggaagtttgctcctttaatgaagtcctggctagcaaatatgcaaatgaaaatcctggagattttgtgaactacaacaagagatttctggcaagggtattcccctctcctatgagaattgattcctcaaatatgaacccccaggatttctggaagtgtggctgtcagattgtggcaatgaactttcagactcctggcttaatgatggacctcaatataggctggttccgtcagaatgggaattgtggctatgtactgcgcccagctatcatgcgagaggaagtctcttttttctccgccaatactaaagatagtgtgcccggagtttctcctcaactactgcacataaagatcattagcggccagaatttccccaaaccgaaaggatcaggcgcaaagggagacgtcgtagatccatacgtctatgtggaaatacatggaattcctgcagattgcgcagaacagcgaaccaagaccgtgcatcaaaacggagatgccccaatcttcgacgaaagtttcgagtttcaaatcaatttgccagaactcgcaatggttcgcttcgtagtgctggacgacgattatatcggtgacgagttcattgggcagtacaccattcctttcgaatgcctgcaaactggataccgacacgtgccactccagtccctcactggtgaagtgctggctcacgcctctctttttgtccatgttgcaatcactaacagacggggaggcggaaagccccataagcgcggattgtccgtgcggaaaggcaagaaatctagggagtatgccagcctgcgcacgttatggattaagaccgttgatgaagtcttcaagaatgcccagccgccaattagagatgccactgacctgagggagaacatgcagaatgctgtggtgtctttcaaggagctgtgtggcttaagctctgtcgctaacctgatgcagtgcatgctggccgtgtctcccaggttcctaggaccagataacacacctctcgtggtactcaatctgtcagagcaataccctacaatggagctgcaaggtattgttcctgaagtgttaaaaaaaattgtgactacctacgatatgatgattcagagccttaaagcccttatcgagaatgcagatgccgtctacgaaaaaatagtgcactgtcagaaagccgcaatggaattccatgagcaccttcatagtataggtactaaggaaggcctgaaagagcgcaagttgcagaaggccgttgagtcctttacatggaacataaccattctgaagggccaagcagatctcctaaaatatgcaaaaaacgagaccctagaaaacctcaagcagatccactttgctgccgtctcctgcggactgaataaacccggtactgagaacgcggacgtgcagaaaccccgtcgcagtctggaagttatcccagagaaggccaatgacgaaactggggaatag

SEQ ID NO: 234936 - DNA, 3006 bp, synthetic construct
  misc_feature 1..3006: note = Description of Artificial Sequence: Synthetic coding sequence
  source 1..3006: mol_type = other DNA
atgccaacagagaaaaagatcagctctgccagtgactgtatcaattctatggtcgaagggtcagaactcaaaaaggtgcggtctaattcacgaatatatcacagatatttcctgctcgacgctgatatgcagagtctacggtgggaaccatctaaaaaagacagtgagaaggcaaagatcgatatcaagtcgattaaggaggtgcgaaccggaaaaaacactgatatcttcaggtccaatgggatcagcgaccagatcagtgaagattgcgcttttagcgtgatctatggtgagaactacgagagcttagacttggtcgcaaacagtgctgacgtagccaacatatgggtcactggccttaggtacctcataagctacggaaaacacactctcgacatgttggaatcctcgcaggataacatgcggaccagctgggtaagccagatgttttccgagatagatgtagataatctgggccatataacactgtgcaacgccgtgcagtgtataagaaatttaaacccagggctgaaaacatccaagatcgaacttaaatttaaggaactgcacaaatcaaaagacaaggccggaacagaagtgacaaaggaggaattcattgaagtttttcacgaactctgcaccaggcctgaaatctactttctgctggtacagttctcgtctaacaaagagtttcttgatactaaggacctgatgatgtttctggaggccgagcaaggggtagctcatattaacgaggaaatcagcctcgagattattcacaaatacgagccttcaaaagaaggccaggagaaaggctggctcagcattgacggctttactaattatttaatgagcccagactgttacatttttgaccctgagcacaagaaggtctgccaggacatgaagcaacccctgagtcactattttatcaatagcagtcataatacatacctgatcgaggatcaatttagggggccttctgacattacgggatatatacgcgcattaaaaatgggctgccgcagcgtcgagctggatgtctgggacggacctgataacgagcccgtgatctacaccggtcacacaatgactagccagattgtcttcaggagtgtaatcgatataatcaacaaatacgccttttttgcgtccgaataccctctgatcctgtgccttgagaatcactgctctatcaagcaacaaaaggtgatggtgcagcatatgaaaaagctccttggcgataagctgtatacaaccagccctaacgttgaagagtcctacttgccttcccccgacgttctgaagggcaaaatcctgataaaggccaaaaagctcagcagtaattgcagcggagtggaaggagatgtcactgatgaggatgagggtgctgaaatgtctcagagaatggggaaagagaacatggagcaacccaataatgtgccagtgaagaggtttcaactgtgcaaagagctatcagagcttgtgagcatctgtaagagtgttcagttcaaagaatttcaggtttccttccaggtccagaagtattgggaagtctgctccttcaatgaagtgctggccagcaaatacgcaaacgagaatcctggcgactttgtaaactacaacaagcggtttctggccagggtattcccgagccctatgagaatcgacagctcaaatatgaatccacaggacttctggaagtgtggatgtcagatcgtcgcaatgaatttccaaactcctggacttatgatggacctgaacatcggttggtttagacagaacggtaattgcgggtatgttcttcggccagccatcatgagggaggaggtttcattcttttccgcgaataccaaagatagcgtgccaggagtcagtccacagctcctccacataaagatcatcagcggccaaaattttccaaaacccaaaggcagtggggcaaagggagacgtcgttgacccttacgtctatgtcgaaattcacggtattcccgcagactgcgcagagcaaagaacaaagacggtgcatcaaaatggagacgcccctatctttgacgaatcctttgaattccaaattaatctcccggaattggctatggtgcggtttgtggtgctggacgatgattatataggtgacgaattcataggacagtacactatccccttcgagtgtctgcagacaggctatagacatgtccctctgcagtcactcactggcgaggtgctagcccacgcatctctcttcgtgcacgtggctattaccaacagaagaggaggtggcaaaccacacaaacgcggtctgagtgtccgtaaaggaaaaaagtcccgggagtacgcttccctgcggactctgtggataaaaacagtcgatgaggtgttcaagaatgcccagccccctattcgggatgcaaccgacctcagagaaaatatgcagaatgccgtggtgtcatttaaagaactgtgcggcctgagctctgtagccaaccttatgcaatgcatgctggccgtttctcctcgattcctgggtcctgataacaccccacttgttgttctaaacctctccgagcagtaccctacaatggagttgcagggtattgttcccgaggtgctgaaaaagatagttaccacatacgacatgatgatccaaagcctcaaagctctaattgaaaacgctgatgctgtgtatgagaagatcgtgcattgccagaaagcagctatggaatttcatgaacacctgcattctatcggcactaaggagggccttaaggagcggaagctacagaaggcagtcgagtcattcacctggaacattactattttgaagggccaggctgacctgctgaagtacgctaagaacgagactctcgagaaccttaagcaaatccattttgcagctgtgtcttgcggcctcaacaagcccggaaccgagaacgccgatgtccaaaaacccaggcggtcattagaggtgattcctgagaaggcaaatgacgagaccggtgaatag

SEQ ID NO: 234937 - DNA, 2802 bp, synthetic construct
  misc_feature 1..2802: note = Description of Artificial Sequence: Synthetic coding sequence
  source 1..2802: mol_type = other DNA
atgacagctacacccgagtctctgtttcctacaggggacgaactggacagctcccagttacaaatggaatctgatgaagtcgatactctcaaggaaggtgaggacccagccgaccggatgcacccttttttagcaatttatgaactgcaatccttaaaggtgcatccactggtgttcgctcctggcgtgcctgtcactgcgcaagtggtcggcacagaaagatatacaagcggatctaaagtaggcacttgtaccttatattccgtgcgcctgacacacggagatttctcctggacgactaaaaagaagtataggcatttccaggagctgcatcgtgatctcctcagacacaaggttctgatgtccctccttccactagcacggttcgccgttgcgtattcacctgctagggatgccggaaatcgcgagatgccttccttgcctagagccggacccgaggggtctacccggcatgctgcaagcaaacaaaaatacttggaaaactacctgaataggcttttgaccatgtcattctaccggaactatcatgctatgaccgagttcttggaggttagtcagctgagtttcatccctgacctgggccgaaaaggtctcgaaggcatgatacggaagcgatccgggggacaccgggtgcctggtcttacttgttgcggtcgggatcaggtgtgttacagatggtctaaaagatggctggtcgtgaaggattcctttctcctgtatatgtgtctggaaactggcgcaatatcttttgtccagctttttgaccctggtttcgaagtgcaagttggcaagaggtcgaccgaggcccgacatggcgtgcgtatagatacaagccaccgctcactgatcctcaagtgttcatcatacaggcaagcgagatggtgggcccaggaaatcacggagctggctcagggacccggaagagattttctccagctccataggcacgacagttacgctcccccaaggcctgggacacttgcaagatggttcgtaaacggcgcaggctatttcgccgcagtggcagatgccatcctgagggcccaggaggaaattttcatcacggactggtggctgtcaccggaagtgtatctcaaacgacctgcacacagcgacgactggcggctggatataatgctcaaaagaaaggcagaagaaggggtgcgcgtgtcaatcctattgtttaaggaagtggagttggcgttgggcattaacagcgggtattcgaagagagccctgatgctgcttcatcctaacattaaagtgatgcggcaccctgaccaggtgaccctgtgggcccaccacgaaaaactgctggtcgtggatcaggtggtggcctttctcggcggactcgatctggcctacggacggtgggacgatctacactaccggcttaccgaccttggcgattccagcgaatctgctgccagtcagcctccaaccccaagaccagattcacctgctacccccgatctgagtcacaaccagtttttttggctgggaaaagactattcaaacctgatcaccaaagattgggtgcagctggatcggccttttgaggacttcattgatcgagagactacccctaggatgccctggagagatgtgggagttgtcgtccatggactgcctgctcgggacctggcccgacactttattcagaggtggaattttacaaagaccacaaaggctaagtataagactcccacgtatccctaccttctgcctaaaagcacctcaaccgctaaccagttaccatttacactgcccggagggcagtgcacaactgtgcaggtgttacgcagcgtggatcgctggtccgccggtacactggagaattccatcctcaacgcttaccttcataccatccgcgagagccaacactttctgtacatcgagaaccagttctttattagctgctcagacgggaggaccgtgctgaataaagtcggggacgagatcgttgataggatcctcaaggctcataagcagggctggtgttacagggtgtacgtactgctgcctcttcttcccggtttcgaaggagacatttccaccgggggtggcaacagcatccaggcgatcctgcactttacttaccgaacactgtgtagaggcgagtacagtatcttgcacagattgaaagcagctatgggtaccgcttggcgagactacatttctatatgtggactgcgtacccatggggagctgggagggcacccagtcagcgagctcatctacatccactcaaaagtgttgattgccgacgacaggaccgttataattgggagtgccaacatcaacgatcgaagtctgctgggaaagagggactcagagctggcggtgctcattgaggataccgaaactgaaccctccttaatgaacggagcggaataccaagccggtagattcgctttgtcgctgcggaagcactgctttggagtgatcttgggcgctaatactcgtcctgatctggatctgcgggacccaatttgtgacgatttcttccagctatggcaggacatggctgagtcaaacgccaacatctatgaacaaatcttccgatgcttgccttcaaatgccacccgatcactgcgcactttacgggagtacgtcgcagtggaaccattagcaactgtctctccgccattagcaagatcagaacttacacaggtgcaggggcatctggtccacttccctttaaagtttcttgaggacgagtccctactgccaccgttggggtcaaaggaagggatgatacctcttgaggtctggacctag

SEQ ID NO: 234938 - DNA, 2769 bp, synthetic construct
  misc_feature 1..2769: note = Description of Artificial Sequence: Synthetic coding sequence
  source 1..2769: mol_type = other DNA
atgacggcaactcccgaatctctgttccctactggcgatgagttggatagctcccagctgcagatggaatcagatgaagtggataccctgaaggaaggggaggacccggcagatcggatgcatccttttctagcgatttatgagctacaatccttgaaggtgcaccctttagtcttcgcccctggcgttccagttacagcacaggtcgtgggaaccgaacggtatacgagcgggtctaaggtagggacctgtaccttgtactcggtccgcttgacgcatggagacttcagttggaccactaagaagaagtaccggcatttccaggagttacatcgagacctgctgagacataaggtccttatgtcacttctgccattggccagattcgcggtcgcttattcacccgcaagagatgctggcaatagagagatgccatccctgccgagagccggacccgaggggagtaccagacacgccgctagcaagcagaagtacctagagaattacctcaataggctgctaaccatgtccttttaccgcaactatcatgcaatgactgagtttctggaggtcagccagctcagttttatcccagacttaggcaggaagggactagaaggaatgattcggaagcgatcaggaggacatagagtgccaggtctaacatgttgcggcagggaccaagtgtgttataggtggagcaagaggtggctcgtggttaaggactctttcctcttatacatgtgcctggagactggggctatttcctttgtgcagctgttcgatccaggattcgaggtgcaggtgggcaagcgctccaccgaagccaggcacggagtccggattgatacctctcacaggagccttatcctgaaatgcagttcctacaggcaggcccgatggtgggctcaggagatcaccgagctggcgcagggccctggcagggactttctgcagttgcatagacacgattcgtatgcccctcctcgccctggaaccctggcccgatggtttgtaaatggggcaggatattttgccgcagtagcagacgcaatccttcgcgcacaggaggaaatctttataaccgactggtggttgagtccagaggtgtatctcaagagacccgctcattccgatgattggcggttagacatcatgctaaagagaaaagctgaggagggcgtacgggtgtccattctcttgtttaaggaggtggagttagccctgggcattaactccggatactctaaaagggcactcatgctgcttcatcctaacatcaaagttatgaggcaccctgatcaagttactctttgggcacatcacgaaaagttactagttgtggaccaggttgtagcgtttctcggtgggcttgatctggcgtacggtcggtgggatgacttacattacagactgacggacctgggagattctagcgagtctgcggcttcacagcccccaaccccccgacccgattccccagctacaccggatctttcgcacaaccagtttttctggctgggtaaggactactccaatctcattaccaaagattgggtccagttagataggcccttcgaagacttcatagacagagagacaaccccacgaatgccttggcgcgacgtgggcgtcgttgtccacgggctgccggctcgcgacctggccaggcattttatccagaggtggaactttacgaagaccactaaggctaagtacaaaacacccacttatccctatctgctgcctaaaagcaccagcaccgctaatcaattgccctttacattacctgggggtcaatgcacgacagttcaggtgctgcggtctgttgacaggtggtccgctggcaccctggagaatagtatcctgaacgcctacttgcatactatccgggaatcacagcatttcctgtatatcgagaatcaattttttatatcatgctcagacgggagaaccgtcctgaacaaggttggagatgaaatagtagatcgaatcctgaaagcgcataagcaaggctggtgctacagagtgtatgtgctgcttcctctcttgccaggattcgaaggagacatttcaacaggcggtggaaattctattcaagcaatcctgcatttcacttacagaactctgtgccgtggtgaatactccatcctccacaggctgaaggccgcaatgggaaccgcctggagggattatattagcatctgcggcctccgcacacatggagaactaggagggcatcccgtcagtgagcttatttatattcacagcaaagttctcatagccgatgaccgcaccgttatcatcggtagcgctaacattaacgaccggtctctccttggcaaacgcgattcagagttagcagtgctaatcgaggatactgaaacggaaccttcgcttatgaatggcgcagagtatcaggctggcagcgttatcctgggagcaaacacgcggcctgacctggacctgcgggatccaatttgtgacgattttttccagctctggcaagacatggccgagagcaatgccaacatttatgaacagatattccgctgtcttcctagtaacgctacccggtctctgagaactcttagggagtacgtggcagtggagccactcgccacggtaagtcctcctctggccaggtcggaactcactcaagtccagggccacctggtgcacttcccgttgaagtttctggaggatgagtccctcttgccacctctggggtctaaagagggtatgattcccctggaggtctggacatag

SEQ ID NO: 234939 - DNA, 957 bp, synthetic construct
  misc_feature 1..957: note = Description of Artificial Sequence: Synthetic coding sequence
  source 1..957: mol_type = other DNA
atggataaacaaaactctcagatgaacgccagtcaccctgagaccaatctccccgtgggatacccaccccagtatccacccaccgcttttcagggaccccctggttattcggggtacccaggcccacaagtgtcatatccccctcctcccgctggtcacagcggcccagggccagctggcttcccagtgcccaaccaacctgtgtataaccagccagtatacaatcaaccggtgggagcggctggcgtgccatggatgccagcgcctcagccccctctgaattgtcctccgggacttgaatacctcagccagatcgaccaaatcctgatccatcagcagattgaactgctggaggtgctgactggattcgaaaccaacaacaagtatgaaatcaagaacagcttcggacagagagtctacttcgcggcagaagacacagattgctgtacaaggaactgctgtggcccatcgcgcccattcactctcagaatcattgacaatatgggccaagaggtcatcacccttgagagacccctcaggtgtagcagctgttgctgtccgtgttgtctgcaagagattgagatccaagctccccctggagtccccataggttacgtaatccagacctggcacccttgcttgccaaaattcaccattcaaaacgagaaacgagaagatgtgctcaagatttctggtccatgtgtcgtctgctcctgctgcggcgatgtggatttcgagatcaagagcctagacgagcagtgtgtggtgggaaaaattagcaaacactggaccggcattttgcgcgaagcctttaccgacgctgataactttgggatacagtttccactagacctggacgtcaaaatgaaggccgttatgatcggcgcttgcttcttaattgatttcatgtttttcgaatccaccgggtctcaagaacagaagtccggggtttggtag

SEQ ID NO: 234940 - DNA, 93 bp, synthetic construct
  misc_feature 1..93: note = Description of Artificial Sequence: Synthetic coding sequence
  source 1..93: mol_type = other DNA
atgaaagcagtcatgatcggcgcttgcttcctgatagatttcatgttcttcgagagcaccggcagtcaagaacaaaagtctggggtgtggtag

SEQ ID NO: 234941 - DNA, 750 bp, synthetic construct
  misc_feature 1..750: note = Description of Artificial Sequence: Synthetic coding sequence
  source 1..750: mol_type = other DNA
atggataagcagaactcccaaatgaacgcttcccaccccgaaacaaacttgccggtgggttatccccctcagtatcctccaacagcatttcaggggccacccggttacagcggataccccggtccgcaagtgtcttacccccctccacccgctgggcacagtggacctggacctgcaggtttccccgtgccgaatcagcccgtgtataaccaacctgtatataaccaacctgtgggcgctgctggggttccgtggatgccagccccacagcctcccctgaattgcccccctggcctggaatatctttcccagatcgaccagatcctcatacatcagcagattgagttactcgaggtgctgaccggttttgagacgaataacaaatacgagattaagaactccttcggacagcgtgtatattttgctgcggaggacaccgattgttgtacacggaattgctgtggccctagtaggcctttcacactccgcataattgataatatgggacaagaagttattacactcgagcgacctttacggtgttccagctgttgctgcccgtgttgtcttcaggagatagagattcaggcccctccaggcgtgcccattggctacgttatccagacctggcacccctgcctgccaaagttcacgattcagaacgagaaacgcgaggacgttcttaagatcagcggaccttgtgttgtctgcagctgctgtggagacgttgattttgagataaagtcgtag

SEQ ID NO: 234942 - DNA, 675 bp, synthetic construct
  misc_feature 1..675: note = Description of Artificial Sequence: Synthetic coding sequence
  source 1..675: mol_type = other DNA
atgccagctccccctcccccactcaattgcccgccagggttggagtacctgtcgcaaatcgacatgattcttattcatcagcagatcgaactgctggaggtactgttcagtttcgagtcgtctaatatgtatgagataaagaattcattcgggcagcggatctacttcgccgcagaggatacaaatttctgcatcaggaactgctgcggaaggtcacgtccatttacattacggatcacagacaacgtgggaagggaagtgataactctggagcggcctcttaggtgcaattgctgttgttgcccgtgctgcttgcaagagatagaaatccaagccccaccgggtgtgccggtggggtacgttacacaaacatggcacccatgcctgaccaaatttaccattaagaatcagaagagagaagacgtgttaaagatttcaggcccttgtatcgtctgctcgtgcattgcaggggtggacttcgagatcacatcattggatgagcaaatcgtagttggtagaatctccaagcattggtctggctttttgcgcgaagcgtttacagacgctgataattttgggattcagtttccacgcgatctggacgtaaaaatgaaggccgtcatgataggggcttgctttctgatcgattacatgtttttcgagcgcacacgatag

SEQ ID NO: 234943 - DNA, 486 bp, synthetic construct
  misc_feature 1..486: note = Description of Artificial Sequence: Synthetic coding sequence
  source 1..486: mol_type = other DNA
atgcccgctccccctccgcctttgaattgcccccctgggctggagtatctgtctcagatcgatatgatactgatccaccaacagatcgaactgcttgaggttctcttttcttttgagagctctaacatgtacgagatcaagaacagcttcggccaacggatatacttcgcagctgaagacaccaacttctgtattaggaattgttgtggtagaagccggcctttcacacttcggattaccgataacgtaggacgggaagttatcactcttgagaggcccctgcgctgcaactgctgctgttgtccctgctgccttcaggaaattgagatccaggcacccccaggtgtcccagttggatacgtgacccagacttggcacccttgcctcaccaaatttaccattaaaaatcagaagagggaggacgtcctgaagatctcggggccatgcatcgtctgtagctgtatcgcaggcgtggattttgagtag

SEQ ID NO: 234944 - DNA, 894 bp, synthetic construct
  misc_feature 1..894: note = Description of Artificial Sequence: Synthetic coding sequence
  source 1..894: mol_type = other DNA
atgcgttcctggaactcactattttgtcttaattcctcgagacccccaggacacatcgtctaccccaaacaccaggctggtcacacaggcaagcaggccgaccacctaggctcccaagctttttatcccggacgccagcatgattatctcgtacctcccgcaggcaccgcgggtattccagtccagaatcagcccggaagaccagagggagtgccttggatgcctgccccacccccacctctgaactgccctcccggattagaatatttatcacaaatcgatatgatactgattcaccagcaaatcgaactcttggaagtccttttctccttcgaaagctccaatatgtatgagatcaaaaactcgttcggtcagaggatttattttgccgcagaggacactaacttctgcatccgaaactgctgcggccgatcacgacccttcactctccggatcacagataatgtcggtcgagaggttatcactctcgaaaggcctctaagatgcaattgctgttgttgcccttgctgccttcaggaaattgagatacaggcgccacccggagtgcctgtggggtacgtaacgcagacctggcacccatgcctgaccaagtttaccatcaagaaccagaagcgggaagatgtgttgaagatctcaggaccttgcatcgtatgcagctgtattgccggagtggattttgaaatcacctcactcgacgaacagatcgttgttggccgaattagcaagcattggtccggctttttacgggaagccttcacagacgctgacaatttcggtatccagtttccgagagatcttgatgtcaaaatgaaggccgtgatgatcggtgcctgtttcctgattgattacatgttttttgaaaggacacgatag

SEQ ID NO: 234945 - DNA, 951 bp, synthetic construct
  misc_feature 1..951: note = Description of Artificial Sequence: Synthetic coding sequence
  source 1..951: mol_type = other DNA
gtctcggcccatcttaggttttttttggctataatcttaagagattccggcctgtgggctgaatggagaatgaagccctttcagatacatcttcccggaccacccggtcatattgtctatccaaaacatcaggccggtcacacaggaaagcaagccgatcatctcggctcccaagctttctatcccggaaggcagcatgattatttggttcctccagcaggcacggctgggattcctgtgcagaaccagcccggtcgcccagagggcgtgccatggatgcctgcgccacctccacctctcaattgcccgcctggtttggagtacctaagccagattgatatgattcttattcatcaacagattgaactcttggaggtgttgttttcgttcgaaagcagtaatatgtatgaaataaagaatagctttggtcagcggatctactttgctgcagaagatacaaatttctgcattcggaactgttgcggcaggtctagacccttcactcttcgcatcactgacaatgtggggagggaagtcataactttggagcgcccactgcgatgtaactgctgctgttgcccttgttgtctgcaagagatcgagattcaagctccgcctggagtacctgttggctacgtaacccagacatggcacccgtgtctaaccaagttcactataaagaaccagaaaagggaggacgtattgaaaatctcaggaccatgtatagtgtgcagttgtattgctggggtggacttcgagatcactagcttagacgaacagatcgttgtgggacgaatatccaagcactggtctggttttctgcgggaagcatttacggatgctgataacttcgggattcaatttcctcgggatctggacgtcaagatgaaggcggtgatgatcggagcttgcttcctgatagattatatgtttttcgagagaactagatag

SEQ ID NO: 234946 - DNA, 888 bp, synthetic construct
  misc_feature 1..888: note = Description of Artificial Sequence: Synthetic coding sequence
  source 1..888: mol_type = other DNA
atggccggatatttgcccccaaaaggatacgccccatcgccaccgccaccctacccagtgactcccggatacccagaacccgctctgcaccctggtccagggcaggctccggtgcccgcacaggtacccgcaccggcacccggttttgcgctattccccagtccaggccctgtggcactgggatctgccgcaccattcctccccctacccggagtccccagtgggctggagttcctggtacagatcgatcagattctgatccaccagaaggcagagcgtgtcgagacttttctggggtgggagacctgtaaccgttatgagttacgatctggagccggtcagccgctgggccaggcagccgaggagagcaattgttgcgcaaggctctgctgtggagcacgccgacctttaagagtgcgccttgccgatccgggagatagggaagtcctaaggctgctccgaccactccactgtggatgttcttgctgtccatgcggactgcaggaaatggaggttcaggcccctcccggtaccacaattggtcatgtactgcaaacatggcacccttttctgccgaaattttcaatccaagacgccgaccgccagactgtgctaagggtggtcggcccttgttggacatgtggctgcggcaccgacacaaattttgaggttaagacccgcgatgaaagtagatccgtaggaaggattagcaaacagtggggcggtcttgtaagagaagccctgaccgatgcagacgactttgggttgcagtttccgctcgacctcgatgtccgagtgaaggcagtgctgcttggcgctacattcttgattgattatatgttcttcgagaagagggggggagccggtccgagtgcagtgacgtcatag

SEQ ID NO: 234947 - DNA, 672 bp, synthetic construct
  misc_feature 1..672: note = Description of Artificial Sequence: Synthetic coding sequence
  source 1..672: mol_type = other DNA
atggccggttacttgccccctaagggttacgcgcctagcccaccgccaccttaccccgtgacgcctggatatcccgagccagctcttcacccaggacccggacaagcgcctgtgccggctcaagtgccagctccagccccaggcttcgcactgttcccaagcccaggtcctgtggccctcggtagtgccgcaccctttctccctctgccaggcgtcccctccggtctggaattcttggttcaaattgaccagatccttattcatcagaaagccgaaagagtcgagactttcttgggatggcggcctgtgatcgggatgaattgcgctctgggccctggaagcccctgggtccgccgtcctaggcgtgctaccgccgcacccgtttgcgctgtggcacccgcaggcaggtgtgttagcgcttggcctacacccggaactgtgcggtgctgcgtatgcagtgcacgatgcactgtcgcagcggcagcagctccagttgcttccaggcgctggaagtacagactacaccaggcacccccactcgccacctgctatcgtcccggtataccttcctcaccgagctcccccagccggatgccaattgcacgtcagagctgcgaatggtgggggccagccggtccagtcgccgtggcccaaacccccacactccgttag

SEQ ID NO: 234948 - DNA, 888 bp, synthetic construct
  misc_feature 1..888: note = Description of Artificial Sequence: Synthetic coding sequence
  source 1..888: mol_type = other DNA
atggctggatacttaccaccgaagggatacgctccaagtcctccacctccatatcccgtcacaccaggctaccctgaacctgcattacacccgggtcccggtcaagcacccgttcccgctcaggtgcccgcacctgcccctggattcgcgctgttcccgagtcctggacccgttgctctcggcagcgccgcaccattcctgccgctcccaggcgtgccgagtggcctcgagttcttggtgcagatcgatcaaattctgattcaccagaaggccgagcgggttgagacattcttgggctgggagacatgcaatagatacgagctgcggtcaggcgctggccagcctctgggacaagctgccgaggagtccaactgctgtgcaaggctgtgttgcggcgctcgccgaccacttcgggtgagattggcggacccaggagaccgagaggttctcaggctgttacggcctcttcactgcggctgttcctgttgtccttgtggcttgcaggagatggaagttcaggccccacccggtacgactatcggccacgtcctgcagacatggcacccctttttgccaaaattttccatccaggacgctgaccggcagacagttctgcgggtcgtaggtccctgttggacctgcgggtgcggaacagacacaaatttcgaggtaaagactagggatgagagccggagcgtgggccgtatctctaagcagtggggcggattggtcagagaggccttaacagacgccgatgattttggactgcaattcccactcgatctggacgtgcgcgtcaaagctgtcctcctgggagctacgttcttgatagactacatgttttttgaaaaacggggaggcgctgggccttctgcggtcacttcgtag

SEQ ID NO: 234949 - DNA, 888 bp, synthetic construct
  misc_feature 1..888: note = Description of Artificial Sequence: Synthetic coding sequence
  source 1..888: mol_type = other DNA
atggcaggctatctcccacctaaaggttatgcccctagcccaccgccaccctatccggttactcctggttatcctgagccagccctgcaccctggccctggccaggcccctgtccctgcacaggttccagccccagctcccggatttgctttgtttccctctcccggacctgtagcccttgggtccgcggcaccattcttacccctccctggcgtgcctagcggtctcgagtttctagtgcagattgaccagatcctgatccaccagaaggcagagcgcgtggaaacatttttaggatgggagacttgtaatcggtacgaactgcgctcgggggctggacaacctcttggtcaagccgcagaagagtcaaattgttgtgccaggttgtgctgcggagcaaggagaccactacgggtccgcctagccgaccctggcgatcgggaggtgctgcgccttctgcgccctctccattgcggctgctcctgctgtccgtgcggtctgcaggaaatggaggtgcaagccccacctggaactacgatcgggcatgtgcttcagacctggcaccccttcctgcccaagttctccatccaggacgccgatcgacagaccgtactgcgtgttgtcggcccttgttggacatgcggttgtggaactgacaccaactttgaggttaagacccgcgacgaatccagaagcgtggggaggatttccaagcaatgggggggactggttcgcgaggccctgacagacgcggacgactttgggctgcaattccctttggacctggacgttagagttaaagctgttctattaggggcaacatttctgatcgattatatgttttttgagaaacggggtggtgcaggacccagtgctgtgacatcctag

SEQ ID NO: 234950 - DNA, 990 bp, synthetic construct
  misc_feature 1..990: note = Description of Artificial Sequence: Synthetic coding sequence
  source 1..990: mol_type = other DNA
atgagcggcgtggtgcccacagctccagagcagcccgcaggcgagatggagaaccagactaaacccccagaccctaggcctgacgcaccaccagaatataactcacacttccttcctggccctcccggaaccgccgtgcctccccctaccggttaccccggagggttaccaatgggttactattcaccccaacaaccgagcacctttcctctctaccaaccagtcgggggaatccatccagttcgatatcagccaggtaaataccccatgcccaaccaatccgtgcccattacctggatgcctggtcctactccgatggctaattgtcctccaggattagagtatctcgtgcagctggacaatattcatgttcttcagcacttcgagcctcttgagatgatgacgtgcttcgagaccaataatcgctacgatattaagaataatagcgaccagatggtgtacatcgtgacggaagacaccgacgactttactcgcaatgcctataggaccctaaggcccttcgttctgagagtcacggactgtatgggtcgggagatcatgaccatgcaacgtccattccggtgcacctgctgctgtttctgttgcccctcagcaagacaggaattggaagtacaatgcccgcctggtgtaaccatcggatttgtcgccgaacattggaatctctgtcgggctgtatatagtatccagaacgagaaaaaagaaaatgtaatgagggtacgcggaccttgcagcacctatggctgcggaagtgactctgtgtttgaagttaagtcactggatggcatttcaaatatcggatctattattaggaagtggaatgggcttctttccgcaatggccgacgctgaccacttcgacatccatttccccctggacttagatgtgaagatgaaggctatgatctttggtgcgtgctttctgattgatttcatgtattttgagcggtctcctccacagcggtccaggtag

SEQ ID NO: 234951 - DNA, 720 bp, synthetic construct
  misc_feature 1..720: note = Description of Artificial Sequence: Synthetic coding sequence
  source 1..720: mol_type = other DNA
atgagtggcgttgttcccaccgctccagaacagccggcaggggaaatggaaaaccagacaaagccaccagaccctcgtcccgatgctccaccagaatataattcccattttttacccggaccgccaggtacagctgtccctcctcctaccggctatcccggtggcctgcccatgggctactatagtcctcagcaaccatccacctttcctctgtatcaaccagtcgggggtatccatccagttcgctatcagccgggaaagtatcctatgcccaaccagagtgttccaattacatggatgcctggacccacaccgatggcgaattgcccacctggtcttgagtacctcgttcagctggaggttcagtgccccccaggggtcactattggctttgtggcggagcactggaatttgtgcagggccgtatattccattcagaatgaaaagaaggagaatgtgatgagggtacgcggtccgtgctccacttacggatgcggctcagatagcgtgtttgaagtcaaaagtctagatgggatctcaaatatcggctctatcattcgaaagtggaatggcttgctttctgcaatggctgacgctgaccattttgatatccatttcccccttgacctggatgtgaagatgaaggctatgatctttggcgcttgttttctgattgacttcatgtacttcgagcgcagccctccccagcgatcaagatag

SEQ ID NO: 234952 - DNA, 990 bp, synthetic construct
  misc_feature 1..990: note = Description of Artificial Sequence: Synthetic coding sequence
  source 1..990: mol_type = other DNA
atgtccggcgttgttcctaccgccccagagcagcccgctggtgagatggagaatcagacaaagccaccagatccacgacctgatgccccaccggaatacaactctcatttcctgccagggccacccggtaccgccgtgccaccaccaacgggttatccaggtgggctcccaatgggatattattcgccccagcagccctcgactttcccactctaccaaccagtgggaggcatccaccctgtgaggtaccaacctggcaaataccctatgcctaaccagagtgtgcccatcacatggatgcctggtccaacccccatggcgaactgcccacctggactcgaatatctcgtgcaactggataatatacatgtgctgcagcatttcgaaccactggaaatgatgacctgcttcgagactaacaatcgctacgatataaaaaataacagtgaccagatggtttacatagtgactgaggacaccgatgactttactagaaacgcttatcggacactccggccatttgttcttcgagtgaccgactgcatggggagagagatcatgactatgcagagacccttcaggtgcacctgttgctgtttctgttgccccagtgccaggcaggagctggaggtgcaatgcccacctggagtgacaattggattcgttgctgagcattggaacctctgcagggcggtgtattcaatccagaacgagaaaaaggaaaatgtcatgcgggttcgtgggccttgcagcacctacgggtgcggatctgacagtgtattcgaggtgaaatccctagatggcataagtaacatcggaagcattattcggaagtggaacgggctgctctcggctatggcagacgccgaccacttcgatatccatttccctctcgatctggacgtgaaaatgaaagccatgattttcggagcttgttttctgatcgatttcatgtactttgagcgatcaccgcctcaaaggtcgcgctag

SEQ ID NO: 234953 - DNA, 789 bp, synthetic construct
  misc_feature 1..789: note = Description of Artificial Sequence: Synthetic coding sequence
  source 1..789: mol_type = other DNA
atgagcggagtggttccaaccgcaccggaacaacctgccggagagatggagaaccagacaaagccgcctgaccccaggccagatgcaccaccggagtacaattctcactttctgccgggaccacctggtaccgctgtcccgccaccaaccggttacccagggggtttgcccatggggtattactctcctcaacagccatcaactttcccgttatatcagccggtgggtgggatccaccctgtgagataccaaccgggaaaatacccaatgccgaaccagtctgtcccaattacatggatgccgggacccacccctatggctaactgcccgccaggacttgaatatcttgtgcagttggacaatatacacgtccttcagcatttcgagcccctggagatgatgacttgcttcgagaccaacaaccgttatgacatcaaaaacaactccgatcaaatggtttacatcgtgactgaagacacggatgacttcacacggaatgcatacaggaccctacgtccatttgtgctccgggttactgattgtatgggtcgcgaaatcatgaccatgcaacgtccctttcgatgcacgtgttgttgtttttgttgtccaagcgccagacaggaactagaagttcagtgccctcccggagttactataggattcgtcgccgagcattggaacttgtgtcgggctgtctattctattcagaatgaaaagaaagaaaacgtgatgagggtgcggggaccctgttctacctatgggtgcggcagcgactccgtgtttgagtag

SEQ ID NO: 234954 - DNA, 627 bp, synthetic construct
  misc_feature 1..627: note = Description of Artificial Sequence: Synthetic coding sequence
  source 1..627: mol_type = other DNA
atgagcggtgtggtcccaacagcgcctgagcagcccgctggggagatggaaaatcagaccaagcctcctgatccacgacctgatgcaccgccagaatacaattctcatttcctgcctgggccacctggcaccgctgtgccgcctcctacaggttacccaggtgggttgccaatgggctattacagtccacagcaaccaagcaccttccccttgtatcagcctgttggcggtatacacccagtgcggtaccagcctggcaagtacccaatgcccaatcaatcagttcctatcacatggatgcccggtccaacaccaatggctaactgtcctcccggactagagtaccttgtgcaacttgacaacatccatgtgctgcaacattttgagccgctcgagatgatgacgtgcttcgaaacaaataatcgctatgatattaaaaataacagtgatcaaatggtgtacatagtaacagaggataccgacgatttcaccaggaacgcctacaggactctgaggccctttgtactgcgggtcactgattgtatgggccgtgagataatgaccatgcagcgcccatttcggtgtacttgttgttgcttctgttgcccctccgccaggcaagaatag

SEQ ID NO: 234955 - DNA, 429 bp, synthetic construct
  misc_feature 1..429: note = Description of Artificial Sequence: Synthetic coding sequence
  source 1..429: mol_type = other DNA
atgtcaggcgtggttcccacagcgcctgagcagcccgctggcgaaatggaaaaccagaccaagcctccagatcctcgacctgacgcgcctccagaatataacagccacttcctgcctggccctccagggacagctgtgccgcctccaacgggataccctggcggactccccatgggctattattcaccccaacagcctagcacctttcccctataccaaccagtgggcggaatccatccagtgcggtatcagccgggtaaatacccgatgcccaaccagtccgtgcccattacttggatgcctgggccaacgccaatggcaaattgcccaccaggcttggaatatctggttcagttagacaatattcacgtactgcagcacttcgaacctttagagatgatgacctgtttcgaaacaaataacaggtag

SEQ ID NO: 234956 - DNA, 990 bp, synthetic construct
  misc_feature 1..990: note = Description of Artificial Sequence: Synthetic coding sequence
  source 1..990: mol_type = other DNA
atgtccggtgtggtccctactgccccagagcagcccgcaggcgaaatggagaatcagaccaaacctcctgacccaagacccgatgctcctcccgagtataatagccactttctccccggacctcctggaaccgctgtacctcctcctaccgggtaccctgggggactgccaatgggttattattcgcctcaacagcctagcacattccccctgtatcagccagtgggtgggattcaccctgtgagataccaacccggaaagtatcccatgccaaatcaatcggtgcctataacgtggatgcccggtcccacgcccatggctaactgtccacccggtctggagtacctggtgcagctagataatatccacgtcctccagcactttgagcccctagagatgatgacttgtttcgagaccaataacagatacgatattaaaaacaacagcgaccagatggtttacattgtgacagaggatactgacgatttcaccagaaatgcttacagaaccctgcgccctttcgtattgagagtgactgactgcatgggaagggagattatgaccatgcaacggccattcaggtgcacttgttgttgcttttgttgtccctctgctagacaggaattggaggtacagtgtcctccaggcgtgacaatcggattcgtcgccgagcattggaacctgtgccgggctgtttactcaatacagaacgagaagaaggaaaatgtgatgcgggtgaggggcccatgctccacctacggatgcggctctgattctgtatttgaggtgaaatccctcgatggaattagtaacatcgggagcattatccggaaatggaatggcttgctctcagccatggcagacgctgaccattttgacattcactttcctctggacctggatgtgaagatgaaagccatgatcttcggcgcatgcttcttgatcgatttcatgtattttgaacggagccctccccagagatccagatag

SEQ ID NO: 234957 - DNA, 297 bp, synthetic construct
  misc_feature 1..297: note = Description of Artificial Sequence: Synthetic coding sequence
  source 1..297: mol_type = other DNA
atgtcaggggtggtgccaaccgccccagagcaacccgcaggggaaatggagaatcagactaaaccacctgatcctcgcccagatgcccctcctgagtataattctcacttcctgccgggacctccgggtacagccgtgcctccccctacaggataccccggtggattgcctatgggctattattctccccagcagccctcaaccttcccattgtatcagcctgtggggggaatccatcccgtacgctaccagcccggtaaatatcccatgcctaatcagagtgtacctattacctag

SEQ ID NO: 234958 - DNA, 675 bp, synthetic construct
  misc_feature 1..675: note = Description of Artificial Sequence: Synthetic coding sequence
  source 1..675: mol_type = other DNA
atggagaatcaaacgaagccgccagacccacggccagatgcccctcccgaatataacagccacttcctccccggaccgccaggcacagctgtgcctcccccaactggataccccggaggcttacccatgggctattacagtccccagcaacccagcacattcccgctgtaccagccagtgggcggaattcaccctgtgcgataccagcctggaaagtaccctatgcccaatcagtccgtgccaataacttggatgcctgggccaactccgatggcaaattgcccccctggtttagaatacttggtgcagttagaggtgcagtgtcccccaggcgttaccataggatttgttgctgaacactggaacctgtgtcgagcagtgtactccatccagaatgaaaagaaagaaaatgtgatgagagtaagagggccatgttcaacttatggatgcggctcggacagtgtattcgaggtgaaatctctggatggcatcagtaacataggttctatcataaggaagtggaatgggctcctctccgccatggccgatgcggatcactttgatattcatttccctctcgaccttgacgtaaagatgaaagctatgatctttggcgcatgtttcctgattgattttatgtattttgagcgctcgcctccccagaggtctagatag

SEQ ID NO: 234959 - DNA, 1326 bp, synthetic construct
  misc_feature 1..1326: note = Description of Artificial Sequence: Synthetic coding sequence
  source 1..1326: mol_type = other DNA
atggctctgtttggcgctctcttcttggctctgctggccggagctcacgcagaattccccggttgcaaaatccgggtgacatccaaagcactcgaactggtaaagcaggaggggctacgctttctcgaacaggagctggaaacaataaccattcctgatctccgcggtaaggaagggcacttctattacaatatcagcgaagtcaaggtaaccgagcttcagttaacaagttcagagttggattttcagcctcagcaagagctcatgttacagatcaccaacgcttctctgggcctgaggtttagaagacaattgttatactggtttctaaaggtatacgacttcctgtcaacgtttatcacgagcggcatgcgcttcttgcttaaccagcaaatatgccccgtgctttaccacgcgggaactgtcctgttaaactcccttttagatacagtgccggtccggagttcagttgatgaacttgtcggcatcgactactcattgatgaaagatcctgtggcttcaacttctaatctcgatatggacttccggggtgcattctttcccctgactgagagaaattggagccttcctaaccgggcagtggaaccacagctccaagaggaagagaggatggtttatgtagcctttagtgagtttttcttcgacagcgcaatggaatcttatttccgagctggagctctgcagctgttgctagtgggtgataaagtacctcatgacctggacatgcttctgcgggctacctactttggctctatcgtcctgttgtcacctgccgtcatcgacagtcccctcaaactggagttacgtgtcctggctcccccacggtgcacaatcaaaccttccgggaccaccatctcagttacagcctccgtaacaatcgctctggttcccccagaccagccggaggttcaattgtcatctatgactatggacgccagactgtctgccaaaatggcactccggggaaaggctttaagaacacagctagacctcaggcgatttcggatttactctaatcacagtgcactagagtcactggccctgatccctttgcaggcaccgctgaaaacaatgctccagatcggggtgatgcccatgctgaacgagcgaacctggcgcggtgtgcaaattccacttcccgaaggaattaacttcgtgcacgaagtagtcaccaatcacgcaggcttcctcaccattggggcagacttgcactttgccaaagggctgagagaagtgatagaaaaaaaccgtcccgctgacgtgcgcgcttcaacagcacccacacctagtactgccgcagtgtag

SEQ ID NO: 234960 - DNA, 1482 bp, synthetic construct
  misc_feature 1..1482: note = Description of Artificial Sequence: Synthetic coding sequence
  source 1..1482: mol_type = other DNA
atggcactgttcggggcattgttcttggccctattggcaggggctcatgcagagtttccagggtgtaagatcagagtcaccagcaaggcactcgaactggtgaaacaggagggcttacgtttcctcgaacaggagctggaaaccattacaattcccgatcttaggggtaaagagggccacttctactacaatatcagcgaagtgaaggtgacagagctgcaactgacatcctccgagcttgactttcagcctcaacaggagctaatgctccagataactaatgctagtcttggccttcgttttcggcgacagttactgtactggttcttctatgacgggggatatataaacgcctcagcagagggcgtgagcatccggactggcctggaactatctcgcgaccccgcaggtcggatgaaggtgtctaacgtgagttgtcaggcgagcgtcagccgtatgcacgccgcattcggcggaaccttcaagaaagtgtacgattttctgtctacctttatcacgtccggaatgaggttcctgttgaaccaacagatttgtccggtcctctaccatgcaggtacagtcctactcaattccttactggatacagtcccagtacgctctagtgtggacgaactggtcggaatagactattctcttatgaaggatccagtagcttcaactagtaatctggacatggattttaggggcgctttctttccactgactgagcgcaattggagtctgccaaatagggccgtggagcctcagctgcaggaggaagagagaatggtctacgtggccttctccgaattcttcttcgacagcgcaatggagtcctatttcagagctggagctctgcaactactgctggtgggtgacaaagtaccgcacgacctcgacatgttgctgagggcaacttacttcggatcgatcgtgctgctgagccctgcggtgattgatagccccctgaagctcgagctccgcgtactcgcaccgccaagatgcaccatcaaaccctcaggtacgaccatttccgttacagcgtctgtaactattgcactggtgcccccagaccagcccgaggttcagctgagctctatgaccatggatgctcgcttgtcggctaaaatggccctccggggtaaagccctgaggacccagctggacctgcgcaggttccggatttactcgaaccattcagcccttgagtcgctcgctctgattcccctacaagcccctctgaagaccatgttgcagataggggttatgccaatgttaaatgagcgcacttggcgtggggtgcagatacccctccccgagggcatcaactttgttcacgaggtggtgacaaatcatgcgggattcctaacaattggagccgaccttcactttgctaaggggctgagagaagtcattgagaagaacaggcccgcagatgtgagggcttctactgcccctacaccgagtaccgccgctgtctag

SEQ ID NO: 234961 - DNA, 1482 bp, synthetic construct
  misc_feature 1..1482: note = Description of Artificial Sequence: Synthetic coding sequence
  source 1..1482: mol_type = other DNA
atggccctgtttggcgcactctttctggcactcctggcgggtgcccatgccgagttcccgggttgtaagatcagagttacctccaaagccctcgaactggtgaaacaggaggggttgcggtttctagagcaggaactggagactattactattcccgacctgcgtggtaaagagggccatttctattacaacataagcgaggtgaaagtgacagaactgcagctaaccagttctgaactggatttccaaccgcagcaagagcttatgttgcagattaccaacgcttccctggggctgagattccgcagacagctgctttattggttcttctacgatggcggttatattaacgcaagtgctgaaggcgtgtcgattcgtacaggattagaactctcccgcgaccctgcagggaggatgaaagtcagcaatgtaagttgccaggctagcgtttccaggatgcacgccgcattcgggggaacattcaaaaaagtgtatgactttcttagtacgtttatcacttctggcatgaggttccttctgaaccagcagatctgccccgttctttaccacgctggtactgtcctgctgaactccttacttgatactgtgccggtgcgctcctctgtggacgaattagtagggatagactactctttaatgaaggatcctgtggcctctactagcaacctagatatggactttcggggagccttcttccccctgactgaaaggaattggtccttacctaatcgcgctgttgaaccacaattacaggaggaagaacgtatggtgtacgttgccttttccgaattcttctttgactctgcaatggaatcttacttcagggctggggctctccagttgcttctggtgggagacaaggtgccacacgatctggatatgcttctgcgcgctacgtactttggatccatcgttcttctgtcacccgctgtgattgactctcctctcaaactggagttgcgagtgctggctcctcccaggtgtactatcaaaccatccggtacgacgatcagcgtgaccgcgtctgtgacgatcgccctcgtgccaccggatcagccagaagtgcagctgtctagtatgactatggatgccaggttgtctgcaaagatggctctgcgcggaaaggcccttcgaacgcaactcgatctccggcgatttagaatctactcaaatcattcagctctggagtcacttgccttaatcccactccaagcccctttgaagaccatgttgcagatcggagttatgccaatgcttaacgaacgcacatggaggggggtgcagattcccctacccgagggaattaatttcgtccacgaagtggtcactaaccacgcgggatttcttacaattggggcagatttgcatttcgccaaagggctcagagaggtcatcgagaaaaatagacccgcagatgtccgggcaagcactgctccaacgccgtccacagcagcagtctag

SEQ ID NO: 234962 - DNA, 1542 bp, synthetic construct
  misc_feature 1..1542: note = Description of Artificial Sequence: Synthetic coding sequence
  source 1..1542: mol_type = other DNA
atgggcctgtctggcagtgataatagctgcgatcctacacctccgccaggcccactggcgatggccctgtttggggcactattcctagctctgctggccggtgcacatgccgagttccccggatgcaagattagagtgacgagtaaggccctcgagctggttaaacaggagggcctgcgattcctggagcaggagttggagaccatcaccatccccgacttaagaggaaaggagggccacttctattacaatatctccgaagtgaaagtaactgaactgcagctaacctcttctgaactggattttcagcctcagcaggagttgatgctgcaaataactaatgcatctctggggttgagatttcgacgacagctgctttattggtttttttatgatgggggatacattaatgcctccgccgaaggcgtttccattcgtaccggtctcgaactcagcagggaccccgctggccgaatgaaggtatctaatgttagctgccaggcttccgtaagtcggatgcacgctgctttcggaggcactttcaagaaggtttacgactttctgtctaccttcattacctccggcatgcggtttctcctgaatcaacagatctgcccagtcctgtaccatgccggtacagtgctactcaactccctgctagacactgtccccgtcaggtcctctgtcgacgagctagtcgggattgactacagccttatgaaagatcccgtggcctctacatctaacctggacatggactttcgaggtgcatttttccccctcactgagcgtaattggtctcttcctaatcgcgctgttgagccacagctgcaagaagaggaacggatggtatatgttgcgttttcggaattcttcttcgattccgcaatggaaagctacttccgggctggcgctctccagctgttgctcgttggcgataaggtgcctcatgatctggacatgctgttacgcgctacctatttcggctctatcgtgctattatcccccgcagtgatcgattctccattaaaattggaactgagagttctggcacctcctcggtgtaccatcaaacccagcggcacaactatatctgtgactgctagtgttacaattgcactggtcccacccgatcaaccagaggtacagctgagttcaatgaccatggatgccaggctatcagctaagatggctttaagaggcaaggctttgagaacacagttagaccttcgtaggttcaggatttatagcaaccatagcgctcttgagagcctggccctgatacctctccaggccccactgaagactatgctgcaaatcggagttatgccaatgcttaacgaaagaacgtggagaggcgtgcagattcctctgccagaggggataaacttcgtacatgaagtcgtcaccaatcacgcagggttcctgaccatcggggcagaccttcattttgctaaagggcttcgggaagtaatcgagaaaaacagaccagccgacgttagggcttctacggccccaacccccagcacagcggcagtttag

SEQ ID NO: 234963 - DNA, 1218 bp, synthetic construct
  misc_feature 1..1218: note = Description of Artificial Sequence: Synthetic coding sequence
  source 1..1218: mol_type = other DNA
atgctgcaaatcaccaatgctagtctaggccttcgctttcgtcgccaactgctgtattggttcttttatgacggaggctatataaacgccagcgctgagggtgtaagcatcagaacggggctcgagctgtcccgagatccagccggaagaatgaaggtcagcaacgtaagttgccaggcatccgtcagccgcatgcacgccgcattcggcggaacctttaagaaggtatatgactttctctcaacatttatcacctcaggtatgcgctttttgctgaatcagcagatttgtccagtgctgtaccacgctggcaccgtattactgaatagcctcctggatactgtgcctgtccggtcctccgtagatgagcttgtgggcattgactattcactgatgaaggatcccgttgcaagtacatctaatctggatatggacttcaggggtgctttttttccattgacagaacgcaactggagcttacccaatcgagcagtagagccacagctgcaggaagaagaacgaatggtgtatgtggctttctctgagttcttcttcgatagcgcaatggaatcttactttcgtgcgggtgccctgcagctcctgttggtgggcgataaggtgccgcacgatctggacatgctgctgcgtgccacctacttcggctccattgtgctgctgtcccctgccgtgattgatagccccctgaaactcgaactccgcgtgctggcacctccacggtgcactatcaagcctagcggcacgactatctcggtcacagctagcgtgaccatcgctctggtgcctccagaccagccagaagttcaactctccagcatgactatggacgctcgactgagcgccaagatggctcttcgtgggaaagctcttaggactcaacttgatttgagacgcttcaggatatactccaaccatagcgcactggagtctctggcactgatccctctgcaggccccactcaaaactatgctgcagatcggggtgatgcccatgctgaacgaacggacctggcgaggcgtgcaaatcccgttgcctgagggcattaactttgtgcatgaagttgttacaaatcatgctgggtttctaaccattggcgcagaccttcattttgccaagggattaagagaagtgatcgagaagaatagaccagcggatgtgcgcgcaagcacagcacctacaccctctactgcagccgtgtag

SEQ ID NO: 234964 - DNA, 1197 bp, synthetic construct
  misc_feature 1..1197: note = Description of Artificial Sequence: Synthetic coding sequence
  source 1..1197: mol_type = other DNA
atggctctgtttggggcactgtttctggccttgctcgccggtgcgcatgccgagtttcctgggtgtaagattagagttacttccaaggccctggagcttgtcaagcaggagggtcttaggttcctcgagcaggaactagagaccataacaattcccgacctgcgaggaaaggaaggacacttttactataacatcagtgagaaggtctacgacttcctgagcaccttcataacatcaggcatgcgatttctgctcaaccagcagatctgccctgtcctgtatcatgctggcaccgttctgctgaattctttactggacaccgtgcccgttcgcagctccgttgacgaactcgtcggcattgattacagtctgatgaaggacccagttgctagcacaagtaatctggatatggatttcaggggtgctttttttcccttaacagaacgtaattggtctttgcccaaccgggcagtcgagccacagctgcaagaggaggagcgcatggtttatgtggccttctccgagttttttttcgattcggctatggagagctactttcgcgctggtgcactgcagttgctgcttgtcggagacaaagtgcctcatgatttagacatgctgttgagagcgacctacttcggcagcatagtgctgctctcgccagccgtgatcgacagtcccctgaagctagaattacgagtgctcgctcctccgaggtgcactattaagccctctggaactaccatttctgtgactgcaagcgtgaccattgcactcgtccctccggaccagcccgaggtccagcttagttccatgactatggacgcaaggctgagtgctaagatggcgctacgtgggaaagccctgcggacccaattggatcttcgcaggttccgcatatatagcaatcacagcgctctggagtctctggctttgattccactacaggctccattgaagacgatgctgcagataggagtaatgcccatgcttaatgagcggacatggagaggggtgcagattcctcttcccgagggcatcaattttgtccacgaggtagtcaccaaccatgctggttttttaacaatcggggcagacttgcacttcgccaagggactgagagaagtcatagagaaaaatagacctgccgatgtaagagcctccacggcacccacaccgtctaccgctgcagtgtag

SEQ ID NO: 234965 - DNA, 2343 bp, synthetic construct
  misc_feature 1..2343: note = Description of Artificial Sequence: Synthetic coding sequence
  source 1..2343: mol_type = other DNA
atggcgccatacagcttgcttgtgacccggcttcagaaagccctgggcgtccgacagtaccacgtcgcctccgtgttgtgccaacgtgccaaagtggccatgtcacactttgaaccaaacgagtacatacattacgatctactcgaaaaaaacattaacattgttcgcaagagactcaataggccgctgacactctctgaaaaaatcgtgtatgggcacctcgacgatcctgccagtcaggagatcgagcggggtaagagttacctgagactcagaccagatcgggtggccatgcaagacgccactgctcagatggcgatgctgcagtttatcagcagtggcctaagcaaggtggccgtgccgtccacaatacattgtgatcacttgatcgaggcacaggtgggtggcgagaaagaccttcgtagagccaaagacattaaccaagaggtgtacaatttcctggcaactgccggtgctaagtacggtgttggcttctggaagcccggttctggaataattcaccagataatacttgagaattacgcgtacccgggtgttctgctgattggcaccgattctcacacccctaacggaggcggactggggggtatctgtattggtgtgggtggggctgatgccgtagatgtgatggcgggaatcccatgggagctgaagtgccctaaagtgattggcgtgaagctgaccggatcactgtctggctggtcttcgccgaaggatgtgatcctgaaggtggctggaattcttaccgtgaagggaggaaccggggctatcgttgaataccatggaccgggtgtggattcaataagctgtacaggcatggccaccatatgtaacatgggcgctgagattggggctactacgagcgtgtttccgtacaaccacagaatgaagaagtatttgtctaagaccggtcgggaggatatagcgaacctggcagatgagtttaaggaccatctcgtgcctgatcctggatgtcactacgaccagctcatcgagattaatctcagtgaactgaagcctcatattaacgggccatttacaccagatctggcccaccccgtggccgaagtcggcaaagtcgctgaaaaagagggctggcctttagatatccgggtcggtctgattgggagttgtaccaacagttcttacgaagacatgggtaggagcgctgcagtggcaaagcaggctttggcacacggtctaaaatgcaaatcacagttcacaatcaccccaggatctgaacagattcgcgctacgattgaaagggacgggtacgcccagattcttagagacttgggtggaatcgtgttagcgaatgcttgcggaccatgcataggccagtgggatagaaaagacatcaagaagggtgaaaagaacactattgtcacatcgtacaataggaacttcacgggcagaaatgatgccaacccagagacgcatgccttcgtgacttcaccagaaatcgtgactgcgctggccattgccggtactctgaagtttaatccagagaccgactatctgaccggcacagacggcaagaagttccgcctggaggcaccggacgccgatgaactccccaaaggtgaatttgacccaggccaagatacatatcagcacccaccgaaagatagcagtggacagcatgttgacgttagccccacctcacagcgcttgcagctgctcgaaccgtttgacaagtgggatgggaaagatctcgaagacttacagattttgattaaggtgaagggaaagtgcaccacagaccacatctctgccgcaggcccttggctgaaatttcggggacacctggacaacataagcaataacctgctcattggcgcaatcaacattgagaacgggaaagctaactccgtgcgcaatgcagtgacacaggaatttggacccgtgcctgacacggctcgctactataaaaagcatgggatcagatgggtggtgattggcgacgaaaactatggcgaaggttcatctagggagcacgccgctctagagcctagacacctgggaggacgggcaattattaccaaatcgttcgctcggatccatgagacgaacctgaagaagcaaggcctcctgcccctaaccttcgccgaccccgctgattacaataagatccatcccgtggataaactgaccatccaaggattaaaggattttactcctggcaaacccctgaaatgcatcattaagcaccctaacggcacccaagagaccattctactgaatcataccttcaacgagacccagattgaatggtttagagccggttctgccctgaatcggatgaaggagctgcagcaatag

SEQ ID NO: 234966 - DNA, 741 bp, synthetic construct
  misc_feature 1..741: note = Description of Artificial Sequence: Synthetic coding sequence
  source 1..741: mol_type = other DNA
atggccgctccaggaccggctctgtgcttattcgatgttgacgggacattaaccgctccacgtcagaagatcacaaaagagatggatgacttcctccagaaactcagacaaaaaattaaaataggggtcgtgggtggatccgactttgagaaggttcaggaacaactcggtaacgacgtagttgaaaagtacgattacgtttttccagaaaacggcctcgttgcgtacaaagacggaaagctgctgtgcagacaaaacatccagagccacctcggagaggccctcattcaagacttgatcaattactgcctcagttacattgccaaaatcaagttgccgaaaaagcggggtaccttcatcgaattcaggaatggtatgctgaatgtgagcccaatcggacgctcatgcagccaggaagagcggatcgagttctatgaactagataagaaggaaaacattcggcagaagtttgtggccgatcttagaaaggaatttgcaggcaaggggctgactttttccataggaggccagattagttttgatgtgttccccgacgggtgggacaagaggtactgtcttaggcacgtggagaacgacgggtacaagacaatctatttcttcggtgataagaccatgcccggtgggaatgatcatgaaatctttacagaccccagaacaatgggctattctgttacagcaccagaggacacgcgtagaatatgcgaattgctcttttcttag

SEQ ID NO: 234967 - DNA, 366 bp, synthetic construct
  misc_feature 1..366: note = Description of Artificial Sequence: Synthetic coding sequence
  source 1..366: mol_type = other DNA
atgctgaatgtgtctccaatcggcaggtcctgcagccaggaggagcgtatcgagttctatgaactggacaaaaaagagaacatcagacagaaatttgtggccgaccttcgcaaagagttcgctggaaaaggattgacgttttccatcggcggtcagatctcgtttgacgtgtttccagacgggtgggataaacgatactgcctgcggcatgttgagaacgatggttacaagacaatttatttttttggagataagaccatgccagggggaaatgaccatgaaatctttaccgatccacggacaatggggtactcagtgaccgccccagaagatacccgcagaatttgcgagctactgttctcttag

SEQ ID NO: 234968 - DNA, 492 bp, synthetic construct
  misc_feature 1..492: note = Description of Artificial Sequence: Synthetic coding sequence
  source 1..492: mol_type = other DNA
atgatgaacattcagtcacatttgggtgaagcactcatccaggatttgatcaactattgtctgagctatatcgccaagatcaaactgcctaagaagcggggtacctttatcgagtttcgcaatgggatgctcaatgtgagccctatcggtcggagttgctcgcaggaagaaaggattgagttctacgagctggataagaaggaaaacattagacagaagttcgttgctgaccttcgcaaggagtttgccggtaagggtctaactttttccatcgggggacagatcagctttgatgtctttcctgatgggtgggataagcgctactgcctgagacatgttgagaatgatgggtacaaaaccatctacttcttcggcgacaaaaccatgccaggaggcaatgatcacgagatcttcacagacccacgaactatgggctattctgtgaccgctccagaggacacccgcagaatctgcgagctgctgttttcttag

SEQ ID NO: 234969 - DNA, 579 bp, synthetic construct
  misc_feature 1..579: note = Description of Artificial Sequence: Synthetic coding sequence
  source 1..579: mol_type = other DNA
atggccccacttggcggtgcaccaaggctggtgctgctgtttagtggtaagaggaaatccggtaaggactttgtgaccgaggcactccaatcccgtctgggagcagacgtctgcgctgtattacggttatcaggccctctgaaagagcagtacgcccaggaacacgggctgaactttcagcggctgctggatacatctacttataaagaggcgtttagaaaagacatgatcaggtggggagaggagaagcgccaggccgaccccggatttttctgtcgtaagatagtggagggcattagccagcccatttggctggtttctgacaccaggagagtatcagatatccagtggtttagagaagcctacggtgccgttactcaaacggtgcgtgtcgtagcgctggagcagtctagacaacaacggggatgggtgttcaccccaggtgtggacgacgcggagtcggaatgtggcctggataacttcggggacttcgattgggtgattgagaaccatggggtggagcagagattggaggagcagctggaaaatctcatcgagtttatccggtcacggctttag

SEQ ID NO: 234970 - DNA, 615 bp, synthetic construct
  misc_feature 1..615: note = Description of Artificial Sequence: Synthetic coding sequence
  source 1..615: mol_type = other DNA
atggagccaaaggcctcatgccccgctgccgctcccctcatggagagaaaattccatgtcctcgtcggcgtgacagggagtgtagcagctctcaaactgcctctcctggtaagcaagctcctggatataccaggattagaagtcgccgtcgtgacaaccgagcgggctaagcatttctactctcctcaggatattcctgtaaccctctacagcgacgccgacgaatgggaaatctggaaaagtagatccgacccagtccttcacatagacctacgcaggtgggccgacctgttactggtagctcccttggacgcgaacacattaggaaaggttgcatctggtatttgtgataatttactaacttgcgtcatgagagcctgggaccggtcaaagccattgctcttctgtcctgccatgaacacagccatgtgggagcatccaatcaccgcccagcaggtggaccagctcaaggcgttcggatacgtcgaaatcccttgcgtggcaaagaaattagtttgtggcgacgaaggtctaggcgctatggcagaagtcggaaccatcgtcgacaaagtcaaggaagtgctctttcaacattccggatttcaacaatcatag

SEQ ID NO: 234971 - DNA, 171 bp, synthetic construct
  misc_feature 1..171: note = Description of Artificial Sequence: Synthetic coding sequence
  source 1..171: mol_type = other DNA
atggcagaaatggacccggtggcggaattcccccaacccccaggagctgcccgttgggctgaggctctactgagatgtttcacatggctccgactttgtcagatttccatgtttctctcattgaaatgcttaaatactagatcatcccatttgggagcacactgcaggtag

SEQ ID NO: 234972 - DNA, 642 bp, synthetic construct
  misc_feature 1..642: note = Description of Artificial Sequence: Synthetic coding sequence
  source 1..642: mol_type = other DNA
atggcagagatggatccagtcgccgagtttccacagccaccaggggctgcccgttgggccgaggtgatggcccgatttgcagcacgcctgggtgctcagggccgtagggtggtactggtcacaagcggcggtacaaaggttccccttgaggcgagaccggtgaggtttctggacaacttctcctcaggaagaagaggagcaacctcggctgaggcttttttggccgcagggtacggggttctctttctgtacagagctcggtccgcttttccatacgctcatcgctttcctccccagacctggctgtcagccttacgacccagtggtccagctctgagcggcctgctgtcactagaggctgaagagaacgctcttcctgggttcgctgaggcgctgagatcataccaggaggctgctgctgcaggcaccttccttgccgtggagtttacaactctagccgattaccttcacctgttacaagccgctgcccaggccctcaaccccctcgggccaagcgctatgttttatctggcagccgctgtgagtgatttttatgtgccagtttccgaaatgcctgagcataagattcagagctctggagggccattacaggtgatgggcgcttccctgcctgaaatctag

SEQ ID NO: 234973 - DNA, 936 bp, synthetic construct
  misc_feature 1..936: note = Description of Artificial Sequence: Synthetic coding sequence
  source 1..936: mol_type = other DNA
atggcagaaatggacccagtcgccgagttccctcagcctccaggtgcagcgcgttgggccgaggtgatggcaaggtttgcagctaggcttggggctcagggcagaagggtggtgctggtgaccagcgggggtaccaaggtgcccctggaggcaaggcctgtgcgctttctggacaattttagctccggtagaagaggggctacgagcgctgaggcctttcttgctgctggctatggagttcttttcctctacagagcacggagcgcattcccctacgcccatcgcttccccccacagacctggctgtctgctctgaggccatcaggtcccgcactgtcgggattgctgagtcttgaagcagaggagaatgccctccctgggttcgcagaggccctacgatcttatcaggaggcagctgctgctgggacatttctggctgttgagttcacgacactggcagactatttacacctcctgcaggctgcggcacaggccctgaatccgctgggccctagcgccatgttctaccttgctgcagcagtttccgacttttacgtgcctgtaagtgagatgcccgaacataaaattcagtcttccggaggccctttgcagatcacgatgaaaatggtgcctaagctgctgagccccctggtcaaagactgggctccaaaggcatttatcatctcatttaagttggagacagaccccgctattgtaatcaatagggcacgtaaagcgctggaaatttatcagcatcaggtcgtggttgctaatattttggagtcaagacaatcctttgtttttatcgttacaaaggactcagagactaagctgttgctgtctgaagaggagatagagaagggggtggagatcgaggagaaaattgtcgacaacctgcagagccgccacactgcgtttataggagatcgcaactag

SEQ ID NO: 234974 - DNA, 417 bp, synthetic construct
  misc_feature 1..417: note = Description of Artificial Sequence: Synthetic coding sequence
  source 1..417: mol_type = other DNA
atgttttatctggctgctgctgtgagcgacttctatgtaccagtctccgaaatgcccgaacataaaattcagtcgtccgggggaccactgcagattaccatgaaaatggtgccaaagttgctttcccctctcgtcaaggactgggccccaaaagcctttattatcagttttaagttagaaactgatcccgcaatcgtaattaaccgagctcgtaaggccctcgagatatatcaacaccaagtagtcgtggctaacatcctagaatcgcgacagagcttcgtgttcatcgtgacgaaggattcagagacaaaactcctgctgtctgaagaagaaattgagaagggcgttgaaatcgaggagaaaattgttgacaatctccaatctcgccatacggccttcatcggcgacaggaactag

SEQ ID NO: 234975 - DNA, 417 bp, synthetic construct
  misc_feature 1..417: note = Description of Artificial Sequence: Synthetic coding sequence
  source 1..417: mol_type = other DNA
atgttttacctggccgcagcagttagcgatttttacgtccctgtatcagaaatgcccgagcacaaaatccagagcagcggtggtcctctgcagatcacgatgaaaatggttcctaaactgctgagtccactcgtaaaagattgggccccaaaggcttttattatcagcttcaagctcgagacagatccagccattgtgattaacagggcacgaaaggctctcgagatttatcagcaccaagtggtggttgcaaacattcttgagagtaggcagtcctttgtgttcattgtaaccaaggactcagaaactaaactcctcctttctgaagaagaaatcgagaaaggcgtggagatagaggagaagatcgttgacaatctccagagccggcataccgcctttatcggggacaggaactag

SEQ ID NO: 234976 - DNA, 393 bp, synthetic construct
  misc_feature 1..393: note = Description of Artificial Sequence: Synthetic coding sequence
  source 1..393: mol_type = other DNA
atggctgagtacgggacgttgttgcaggacctgacgaataacattacactggaggatctcgagcagttaaagagcgcttgcaaggaggacatcccgagcgaaaagtcagaagaaataactaccggatcagcttggttttccttcctcgagtcccacaataagttagataaggacaatctatcctacattgaacatattttcgaaatctcccggcgtcctgatctgcttacaatggtggtggactacaggactcgcgtgctcaaaatctctgaggaggacgaactcgacacaaaactgacccgcatccccagcgccaagaagtataaagacataattaggcagccctctgaagaggagatcattaagcttgcaccacctcccaaaaaagcgtag

SEQ ID NO: 234977 - DNA, 456 bp, synthetic construct
  misc_feature 1..456: note = Description of Artificial Sequence: Synthetic coding sequence
  source 1..456: mol_type = other DNA
atggaggacgaggggaacaagctttgtcaggccccaccgtggcccggacaaaccagtcccgtcatggcagagtacggtaccttgctgcaggatttaacgaataatattaccttagaagaccttgagcagctgaagtctgcctgtaaagaggacatcccttcagagaaaagtgaagaaatcacgaccggatcagcatggttcagctttcttgagtcgcacaataagctggacaaggacaatctttcctacattgagcacatctttgagattagccgcaggccagacctgctgaccatggtggtcgactaccggacgagggttctaaaaatttcagaagaagatgagctcgatactaaactgacacgtattcccagcgccaagaagtacaaggatatcatccgtcagccgtctgaggaggagatcattaaactcgccccaccgccaaaaaaggcctag

SEQ ID NO: 234978 - DNA, 327 bp, synthetic construct
  misc_feature 1..327: note = Description of Artificial Sequence: Synthetic coding sequence
  source 1..327: mol_type = other DNA
atggccgagtacggcacgctgttacaggatctcaccaataacatcactttggaagacctggaacaacttaaatcagcctgtaaggaagacatcccttctgagaagaacaatctttcctatatcgagcatattttcgagatctctaggagacccgacctgcttacaatggtcgtggactatcggaccagagttcttaaaatcagtgaggaggacgagttggataccaagctcaccaggattccatccgccaagaaatataaagatataatccggcaaccttctgaggaagagattatcaagttggcaccaccgcctaagaaagcctag

SEQ ID NO: 234979 - DNA, 1554 bp, synthetic construct
  misc_feature 1..1554: note = Description of Artificial Sequence: Synthetic coding sequence
  source 1..1554: mol_type = other DNA
atggagctcgaggagctaggaatccgggaggagtgcggggttttcggatgtattgctagtggagagtggcctacccagttagacgtaccacatgtgattaccctcggtctggtaggcttacagcacaggggccaggagtcagctggaattgtgactagcgacggatcttctgtgccgactttcaagagtcataagggcatgggattagtgaatcacgtattcacagaggataatcttaagaagctgtatgtgtcaaatcttgggatcggacatacacggtatgcaactactggcaagtgcgagttagagaattgccagccctttgtcgtagaaacattacacggcaaaatagccgtagcccataatggcgaactcgtcaacgctgcgagactgaggaagaagttactgcgccatggtatcggtctgtctacctcaagtgattctgaaatgatcacccagctgctggcttacacgccaccccaggagcaggacgatacccccgattgggtcgcacgtataaaaaacctgatgaaagaagctcccacagcctattcacttcttattatgcacagagatgtgatttacgccgttcgggatccttacggaaaccgcccactgtgtataggtcgtctcataccagtcagcgacattaacgataaggagaagaagacatctgaaactgaggggtgggtggtatcctcagagagttgtagcttcctctctatcggtgcgaggtactacagggaggtactgcctggagagattgttgaaatttcccggcacaacgtgcagactctcgacataatcagtcgctctgagggaaatcctgtggcattttgcatctttgagtacgtgtactttgccaggccagactctatgtttgaggaccagatggtttacactgtgcgatatagatgcggccagcagcttgccattgaggccccagttgatgccgacttggtgtcaaccgttccagaatctgcaactccagcagccctggcctacgccggtaagtgtggtctcccgtacgtcgaggttctgtgcaagaatagatacgttgggagaacctttattcagccaaacatgaggcttaggcagctgggcgtcgctaagaagtttggggtcctctctgacaattttaagggaaaaaggattgtcctggtggacgatagcatcgttaggggaaacacgatctcccccattatcaaactactcaaggagtctggtgctaaggaggtgcatatcagagtagcctctcctcctattaagtatccctgttttatggggatcaatatccccaccaaagaggagcttattgccaataagcctgagttcgaccacctggcagagtacctcggagccaatagcgtggtgtatctgtcggttgagggcctggtaagtagcgtgcaggaaggcataaaattcaagaagcagaaggagaagaagcacgatatcatgattcaggagaatggtaatggcttggaatgcttcgaaaagtctggtcactgcaccgcctgtcttaccgggaagtatccagtggaattggagtggtag

SEQ ID NO: 234980 - DNA, 657 bp, synthetic construct
  misc_feature 1..657: note = Description of Artificial Sequence: Synthetic coding sequence
  source 1..657: mol_type = other DNA
atggaattattaattatgataaatgcctgcaaaatcgcatccgcaagccgcgtgacagctgtaatcccttgctttccatacgctaggcaagacaaaaaggataagggattcttcgatattccagtggataacctctacgcagaacccgcagtgctgaagtggatcagagaaaacatttctgaatggcgcaattgcaccatcgtgtcccctgatgctggtggagccaagcgcgtgactagcatcgcagataggcttaatgttgatttcgccttgatacataaggaaaggaaaaaagctaacgaggtggatcgcatggtcctcgttggggatgtcaaagatagggttgcgatcctggtcgacgacatggctgatacctgcgggaccatctgtcatgcagcggataagctgttgagcgccggagccacacgagtttacgccatccttacccacgggatattttctggaccagcgatcagtaggataaacaacgcatgtttcgaagctgtggtagtgaccaataccatcccccaggaggataaaatgaaacactgttccaagattcaggtgatcgacatctcgatgatactggctgaagcaataaggcggacacacaatggtgagtctgtcagctacctgttctcccacgtgccactctag

SEQ ID NO: 234981 - DNA, 507 bp, synthetic construct
  misc_feature 1..507: note = Description of Artificial Sequence: Synthetic coding sequence
  source 1..507: mol_type = other DNA
atgcccaacattaagatttttagtggcagctcccatcaagacctatcccagaaaatagctgataggttagggcttgagctgggaaaagtggtgacaaagaagtttagtaaccaggaaacatgcgtggagatcggcgagtcggtacgtggcgaggacgtctatattgtccaatcaggctgtggggaaatcaacgataacctgatggagctcttgataatgattaatgcctgtaagattgctagtgcaagccgagtgacggcagtgatcccttgttttccctatgccaggcaggacaaaaaagataagagtagagccccaataagtgccaaacttgttgcaaacatgctgagtgtagcgggagccgaccatatcatcactatggaccttcacgcgtcacaaatacaggtgtcagttgaggccaagtactggtgtctgaagggcggtcgcaaaggtctcatgatgctgaaaactgctgagaagcctaaaattatgcccaagtatatttag

SEQ ID NO: 234982 - DNA, 756 bp, synthetic construct
  misc_feature 1..756: note = Description of Artificial Sequence: Synthetic coding sequence
  source 1..756: mol_type = other DNA
atggagctgctaattatgatcaacgcatgtaagatagcttccgctagtagagttacagcggtgataccatgtttcccctatgctcggcaagacaagaaagataaatcgagggcaccgattagtgccaagctggtagccaatatgttgtctgtcgccggagctgatcatattattaccatggatctgcacgccagtcagatccaggggttttttgacattcctgtggataatttatacgcagagccggcagtgctgaagtggattcgggagaacatctccgaatggcgtaactgcacaatcgtgtctcccgatgcaggcggtgctaagcgagtcacatccatagctgataggctgaatgttgattttgcgctgatccacaaagaaaggaaaaaagccaatgaggttgatagaatggtgctcgtgggggacgtgaaggatagggtggccatcctcgtggatgatatggccgacacctgtgggacgatttgccacgccgctgataaattactcagcgcgggtgctactagggtgtatgccattctcacccatggtatcttttcaggtcccgctatctccagaatcaacaatgcttgcttcgaggcagtggtcgtgacaaacacaatcccccaggaggataaaatgaagcactgtagcaagattcaagtgatcgatatctctatgatccttgcagaggcgattagacgtactcataatggagaaagcgtttcttacctattttcacatgtgccgctgtag

SEQ ID NO: 234983 - DNA, 957 bp, synthetic construct
  misc_feature 1..957: note = Description of Artificial Sequence: Synthetic coding sequence
  source 1..957: mol_type = other DNA
atgccaaacatcaaaatattttctgggtcgagtcatcaggacttgagtcaaaagatagctgacaggctcggcctcgagctaggaaaagtggtgactaaaaaattttccaaccaggagacatgcgtggaaattggcgagagtgtacgtggagaagacgtgtatatagtgcagagcggttgcggtgagatcaatgataatctgatggagctgctcataatgatcaatgcttgtaagatcgccagtgctagtcgggtcactgccgtgatcccctgctttccctatgccagacaggataaaaaagacaagtcacgcgctcctatcagtgccaagctagttgcaaacatgctgagcgtcgccggagccgatcatatcattacaatggatctccatgcctctcagatccagggctttttcgacataccagtggacaacctctacgccgaacctgctgtactcaaatggattcgcgagaacatctctgagtggcggaattgtaccatcgtgtcgccagatgccggaggcgcaaagagagtaacctctatagctgaccgcctgaacgtcgactttgccttaatccacaaggagaggaaaaaagcgaatgaagtcgacaggatggtgttggtcggagatgtgaaagatagggttgcgatcctcgtagatgatatggctgatacctgtggtacaatctgtcatgcagccgacaaacttttgtccgcaggggctaccagggtttatgccattttgactcatgggatctttagcggacctgcaatcagcaggattaacaacgcctgctttgaagctgtggtagttaccaacaccattccacaggaggataagatgaagcattgtagtaaaattcaagtgattgacatctctatgatccttgccgaagctattaggaggactcataatggggagtccgtctcctatctgttttcccacgtgccattgtag

SEQ ID NO: 234984 - DNA, 957 bp, synthetic construct
  misc_feature 1..957: note = Description of Artificial Sequence: Synthetic coding sequence
  source 1..957: mol_type = other DNA
atgccgaatatcaaaattttctcaggctcatcgcaccaagacctgtcacagaagatcgcagacagacttggactggagctcggcaaagtggtgacaaaaaagttctcaaaccaggagacctgcgtcgagatcggagaaagcgttcgcggtgaggacgtctacattgtgcagagcgggtgcggagaaatcaacgacaacctgatggagctcctgataatgattaatgcttgtaagattgcctccgcctcaagggtgacagcggtaattccttgctttccttatgctcgccaggataagaaagataaatccagagctccaataagcgcaaaactcgtggctaatatgctctcagtcgctggcgctgaccatatcataacaatggacctacacgcctcccagatacaaggcttctttgatatacctgtggataacctgtatgcagagccagcagtgctaaagtggatcagggagaacatcagcgaatggcggaattgcactatagtttctcccgacgccggtggcgcaaaacgggtgacttctatagcggatcggttaaacgttgacttcgcgcttattcacaaggagagaaaaaaggccaatgaggttgataggatggtcctcgtcggagatgtcaaagacagggtcgccattcttgtggacgacatggcggatacttgcggcaccatctgtcacgccgctgacaagctgctctcagcaggggcaacacgcgtgtatgccattttgacccacggcattttttctggtccagccatcagtcgcatcaacaatgcctgctttgaagccgtggtcgtgactaataccatcccgcaggaagataagatgaagcattgcagcaagatccaggtgattgacatttctatgattctggcagaagctattcggagaacacacaacggcgagtcagtgagttacctgtttagtcatgtgccactctag

SEQ ID NO: 234985 - DNA, 957 bp, synthetic construct
  misc_feature 1..957: note = Description of Artificial Sequence: Synthetic coding sequence
  source 1..957: mol_type = other DNA
acccctaatatcaagatcttttctgggtcctcacatcaggacctcagccaaaagatcgcggataggctgggacttgaactgggcaaggtggtgacaaaaaagttctcaaatcaggaaacctgtgtggagattgacgaatcggtgagaggtgaggatgtgtatattgtgcaaagtggatgtggtgaaattaatgacagcctgatggagctcttaattatgataaacgcgtgcaaaattgcttccgcgagtcgtgtaacagcagtaatcccttgttttccttacgcgagacaggacaagaaggataagagcagaagccccatcagcgccaagctggttgccaatatgcttagcattgctggcgcagaccacattattaccatggatcttcacgcctctcaaatacaggggttttttgacatcccagtcgataatctgtacgctgagcctaccgttttgaagtggattcgcgaaaacattccagaatggaagaactgcattattgtgtccccagacgccggaggggctaagcgtgtgacaagcattgccgaccagctcaacgtcgactttgccctgattcataaagagagaaagaaagccaacgaagtggactgcattgtgctcgttggtgacgtcaatgatagggtggccatcttggtggacgacatggcggacacttgtgtcacaatttgcctcgccgctgataaacttcttagcgccggtgctaccagggtctatgcgattttgactcatgggatctttagcggaccagctatctctcggattaatactgcttgctttgaggccgtcgttgtgaccaacacgattccccaagacgagaagatgaagcactgttctaagatcagggtcatcgatatctcaatgatcttggccgaggccattagacgcacccacaatggagaatccgtctcatacctgttcagtcacgtcccactgtag

SEQ ID NO: 234986 - DNA, 957 bp, synthetic construct
  misc_feature 1..957: note = Description of Artificial Sequence: Synthetic coding sequence
  source 1..957: mol_type = other DNA
atgcccaatatagtgctgttttcaggctcctcacatcaggatctgtcccagcgggtcgcagaccggctcggcctggaattggggaaggtagtgaccaagaagttcagtaaccaggagactagtgtcgagataggcgaaagtgtgagaggcgaagacgtctatataatccagagcggatgtggcgaaatcaatgacaacctcatggagttactcatcatgattaacgcttgtaagatcgcctcttcttctcgcgtgactgcggtgatcccatgttttccttatgcaagacaggacaaaaaagacaaaagcagggcacctatttcagcaaaactggttgctaatatgctgagcgtcgctggggctgaccacatcatcactatggatctgcacgcctcccagattcaaggtttttttgatatcccagtcgacaacctgtatgctgagccagccgtgctgcaatggatccgggagaatatcgcggagtggaaaaattgtattattgtgagccctgatgcagggggtgccaaacgcgtaacttccatcgccgacaggttgaatgtggagtttgcgcttatacataaagaaagaaaaaaggcaaacgaggtggaccgtatggtcttggtgggcgacgttaaagatagggtcgctatattagttgatgacatggccgatacctgtggtacaatctgtcatgcagctgacaagttgttatctgctggcgctactaaggtgtacgcaatcctcacacacggcatcttttctggacctgctatctcaagaattaacaatgctgccttcgaggcggttgtagtgacaaataccatcccacaggaagacaaaatgaagcactgcacgaaaattcaggtgatcgatatttcaatgatcctcgccgaagccattcggcgaactcacaacggcgagtctgtgtcctacctgttcagtcatgttccgctgtag

SEQ ID NO: 234987 - DNA, 966 bp, synthetic construct
  misc_feature 1..966: note = Description of Artificial Sequence: Synthetic coding sequence
  source 1..966: mol_type = other DNA
atgcccaatattgtcctgttctctggttcaagccatcaagatttgagccagcgggtcgctgaccggctcggtttagagcttggaaaagtagtgacaaagaagttctcaaaccaagagacttctgtggaaatcggtgagtccgtgaggggagaggatgtctacatcatccagtcaggatgcggggagatcaacgataatctcatggaactgctgattatgatcaatgcctgtaagatcgcatccagtagccgagtgaccgctgtgattccttgcttcccttacgcgaggcaagataagaaggacaaagtgggtgagagcagggcgccaatatccgccaaactcgtggccaacatgctgtccgtggcaggggcagaccacattattaccatggaccttcatgcatctcaaattcaggggttctttgacattcctgtcgacaatttgtacgctgagccagcagtactgcagtggatcagagaaaacatagccgagtggaaaaactgcataattgtgtcacccgatgcgggaggggctaagcgcgtcacatccattgccgacagattgaacgtggaatttgccctgattcacaaagaaagaaagaaggccaatgaggtggaccgaatggtgctagtgggcgacgtcaaagacagggtcgcaatactggtggatgacatggcagatacatgtggcacaatttgccacgcggcagataaactcctgtcagccggagccacgaaagtttatgccatcttaacccacggaattttttcaggccctgcaatcagccgcatcaacaacgcagccttcgaagccgtcgtagtgactaatacaatacctcaggaagataaaatgaagcactgcacaaaaattcaggtgatcgacatttctatgattctggctgaagccatccggcgaacccataacggagaatctgtgagttatctttttagtcatgtgcccctctag

SEQ ID NO: 234988 - DNA, 849 bp, synthetic construct
  misc_feature 1..849: note = Description of Artificial Sequence: Synthetic coding sequence
  source 1..849: mol_type = other DNA
atggaattgctgattatggcctacgcgctcaaaaccgcctgtgcaagaaacattatcggagtgatcccatactttccttactctaagcagtcgaagatgcgcaagagaggtagtatagtctgtaaactcctggccagtatgctcgctaaggccggtctgacccatattatcaccatggatctgcaccagaaggagatccagggatttttcagtttccccgtggacaatctgagggccagtccttttctgctgcaatacattcaggaggagatcccgaactaccgaaatgctgttattgtagccaagtctccagacgccgctaagcgcgctcagtcatacgctgaaaggctgcgactggggctagccgtgatccacggtgaagctcagtgtaccgaactggacatggacgacgggcgacattctccaccaatggttaaaaacgcgacggttcaccccggtctggagctccctctgatgatggcaaaggagaaacctccaatcacggtggtaggagacgtgggcggaagaatcgcaatcatcgtggacgacatcattgacgatgtcgaatcttttgtggccgctgctgaaatactgaaggagagaggtgcttacaagatctatgtcatggctactcacggcattctctcggccgaagccccacgtttgattgaagagagctcagtcgacgaggttgttgttactaacaccgtcccacacgaagttcagaaactgcaatgccctaaaatcaagaccgttgatatcagccttattctttccgaagctattaggaggatccataacggtgaaagcatggcctatttgtttcgcaacataacagtagatgattag

SEQ ID NO: 234989 - DNA, 1158 bp, synthetic construct
  misc_feature 1..1158: note = Description of Artificial Sequence: Synthetic coding sequence
  source 1..1158: mol_type = other DNA
atgcccaaaaagctgcttcttctgcccccaccatcagccagctctgcgttcagagtgcctagagccaggccagttccgccacctgcgatgaacgccgcaaggacggggtaccgcgttttctccgcaaattctacagcagcctgcactgagttggctaagaggattacagagcgtttgggcgcagagctggggaaaagcgtcgtgtaccaggaaaccaatggcgaaacgcgcgttgaaattaaagaaagcgtcaggggccaagacatcttcatcattcagacaatacctagagacgtgaataccgctgtgatggaactgctgatcatggcatacgcactgaagaccgcttgcgctcggaacattatcggcgtgatcccttacttcccatactccaagcagtccaaaatgcgaaaacggggttccattgtgtgtaagcttctggctagcatgttagctaaggccggactgacacacattatcactatggacctgcaccagaaggagatccaaggcttcttctcttttcctgttgataacttgcgcgctagcccctttcttctccagtatatccaggaagaaattcctaactacagaaacgcagtgatagttgcaaaaagccccgacgcagccaagagggcacagtcatacgcagagcgactgagactgggactggccgtgatccacggcgaggctcaatgtactgagctggacatggacgatggtcgtcattccccacctatggtcaaaaatgctacagtccacccaggactggaactaccgctgatgatggccaaagagaagcctcctatcactgtagtgggggatgtagggggaagaattgcgattattgtggatgacattatcgatgatgtggagtcctttgtagcggcagccgaaatacttaaggaacgcggagcatacaaaatctacgtcatggctacccacggaatcttgagcgcagaggcgcctcgactgatcgaagagagctcagtggatgaggtggtggtgactaacaccgtgcctcatgaagtccaaaaactgcagtgtcccaagatcaagactgtggatatttctctaattcttagcgaagcaatcaggagaatccataatggggaatccatggcatatctcttccggaacattaccgtggacgattag

SEQ ID NO: 234990 - DNA, 1110 bp, synthetic construct
  misc_feature 1..1110: note = Description of Artificial Sequence: Synthetic coding sequence
  source 1..1110: mol_type = other DNA
atgttctgtgtgacaccaccagaacttgaaaccaagatgaacataactaagggcggactcgtgctgttctccgcaaacagtaattcatcatgtatggagctctccaaaaaaattgcggagcgcttgggcgttgagatggggaaagtgcaggtatatcaggagccgaacagagagacgagagtgcaaatacaagaaagtgtgcgaggtaaagatgtatttataatccaaacggtcagtaaagacgttaataccacgatcatggaattgcttattatggtgtacgcatgcaagacgtcctgtgctaaatctattattggcgtgatcccttatttcccctactctaagcagtgcaagatgcgcaaaagaggatctatcgtgtcaaagctactcgcgtctatgatgtgtaaggcaggtcttactcacctcatcacaatggatttacaccaaaaggagatccaaggtttcttcaacattcccgtagataacctgagggcctcgcccttcttgctgcaatacattcaggaggaaattcccgactacaggaacgccgtgatagtggctaagtctcctgcaagtgctaaacgcgcacagagtttcgctgagcgtttaaggctaggaatcgccgttattcacggagaggctcaggacgccgagagcgatctggtggatgggaggcacagcccccctatggtgagatctgttgctgctatccatcccagtctggagatccccatgctgatccccaaggaaaaaccaccaataaccgtcgttggggatgtggggggaagaatcgccattatcgtagatgacatcatcgacgatgtcgattccttccttgccgcagcagaaaccctgaaggaacgcggtgcctataagattttcgtgatggccactcacggtctgcttagtagtgatgctccaagaagaatcgaggagagtgctatagacgaagtagtcgtgactaacactatccctcacgaagtccagaagcttcagtgccctaagatcaagaccgtcgacattagcatgatactgagcgaggcgatcaggaggatccataacggtgagtccatgtcctacttgtttcgcaacatcggcctcgacgattag

SEQ ID NO: 234991 - DNA, 1110 bp, synthetic construct
  misc_feature 1..1110: note = Description of Artificial Sequence: Synthetic coding sequence
  source 1..1110: mol_type = other DNA
atgttctgtgtgacccctccagaactggagacaaaaatgaacattacaaaagggggtttggtgctgttctccgcaaacagcaatagcagctgcatggagcttagcaagaagatcgcggaacgcttaggcgtcgagatgggcaaagtccaggtttaccaggaacccaaccgggagacacgggtacagatccaagagtctgttcgtggcaaagatgtcttcatcatacagaccgtttcaaaagacgtaaacaccaccatcatggagctcttgattatggtatatgcctgcaaaacttcctgtgccaaatctatcatcggagtaattccatactttccctattcgaagcagtgcaagatgcgaaaacgcggaagtatcgtcagcaagttgctagccagtatgatgtgtaaagccggactcacccatctaatcactatggatctgcatcagaaagaaatacaaggattcttcaacatacctgttgacaacttgagagcttccccatttttgttacagtacatccaggaggagataccagactatagaaatgcagtaatcgtggccaaaagtccagcatcagctaagcgcgctcaatcttttgctgagcgattaaggctgggcatcgctgtgatccacggtgaagcacaggacgcggagtccgatctggttgatgggagacactccccaccaatggttcgtagtgtagctgcaattcatccaagcttggagattcctatgttgattcctaaggagaagccacccattaccgtggtcggcgacgtgggtggcagaatcgctattattgtcgacgacattatcgacgacgttgacagttttctggccgcagcagagacactgaaggaacggggagcatacaagatcttcgtcatggccacacacggccttctgagcagtgacgcacctaggcggatagaagagtctgcgatcgacgaggttgtggttaccaatacgatccctcatgaggttcagaaattgcagtgcccaaaaataaaaactgtggacatctccatgattctttcggaggcgatcagacgaatccataacggtgaaagtatgagctatctgttcagaaacatcggtttagacgactag

SEQ ID NO: 234992 - DNA, 807 bp, synthetic construct
  misc_feature 1..807: note = Description of Artificial Sequence: Synthetic coding sequence
  source 1..807: mol_type = other DNA
atgttttgcgttacccctcctgagttggaaaccaaaatgaatatcactaagggaggattggtgctttttagcgccaactctaactcctcatgtatggaactctcaaagaagattgccgagcgcctgggggttgagatgggcaaggtgcaggtgtatcaggagcctaatcgggagacccgcgtgcagatccaggagagcgtccggggaaaagacgtgttcataatccagacagtctccaaagatgttaacactactataatggaattattgatcatggtctatgcctgcaaaacttcctgtgccaaatctatcattggagtgattccctacttcccttacagtaagcaatgtaaaatgaggaagaggggatccatagttagcaaattactcgcctctatgatgtgtaaggcaggactcacacatctcattaccatggacctgcatcagaaggaaatccaaggctttttcaacataccggtggataacctgagagcctcaccgttcctccttcagtacattcaggaggaaattccggactacaggaatgccgtcatcgtggctaagtctccagctagcgccaagcgggctcagtcttttgctgagcggctgaggctcggaattgcagtcatccacggcgaagctcaggacgccgagagtgacctggtggatggacgccatagtccacctatggttagatcggtggctgccatccacccttcattggaaattccgatgttaatcccaaaggaaaagccaccaatcacagtggtaggcgacgtaggtgggcgaattgctatcatcgtttag

SEQ ID NO: 234993 - DNA, 585 bp, synthetic construct
  misc_feature 1..585: note = Description of Artificial Sequence: Synthetic coding sequence
  source 1..585: mol_type = other DNA
atgttttgtgtgacccctccggaattggaaactaagatgaacatcacaaaaggtggcttagtcttgttcagtgccaactcaaactcttcctgcatggaactgtcaaaaaaaatagcagaaaggctaggagtggaaatgggcaaagtccaagtgtaccaggaacctaaccgagagaccagagttcagatccaggaatcagtgcgtggaaaagatgtattcataatccagactgtatctaaggatgtcaacacaacgattatggagcttctcattatggtgtacgcctgtaaaacttcttgtgctaaaagcattatcggtgtaataccctatttcccctatagcaagcagtgtaagatgcggaaaagaggttctatcgtatccaagctacttgcaagtatgatgtgcaaggctggcctcacccacctcatcacaatggatctgcatcaaaaagaaatccagggattctttaacatacctgtggataatcttagggcaagcccctttctgttacagtatattcaagaggaaataccagattacagaaacgcagtcattgtggctaagtcccccgcaagtgcaaaatag

SEQ ID NO: 234994 - DNA, 990 bp, synthetic construct
  misc_feature 1..990: note = Description of Artificial Sequence: Synthetic coding sequence
  source 1..990: mol_type = other DNA
atgttttgtgtgacccctcctgagttagaaactaagatgaatattacaaaaggcggactggtactattttctgccaatagcaattcatcctgtatggagctcagcaaaaaaatcgctgaggacgtcaacacaacaatcatggagctgctcatcatggtatacgcgtgcaagacaagctgcgctaaatcaataataggtgtcatcccgtattttccctacagcaagcaatgcaagatgcgcaaacgaggctcgatcgtgagtaagctgctcgccagtatgatgtgtaaagccggattaacgcacttgatcaccatggatctacaccaaaaggagatccaaggttttttcaatatccccgtagacaacctgagagcatctccctttcttttgcagtatatccaggaagaaatcccagattatcgaaacgcagtgattgttgcgaaatcgccagcatctgcgaagcgagcccaatcgttcgccgagcgcctaagacttggaatagctgttatacatggcgaggctcaggatgccgagtctgacttggtggacgggaggcactctcccccaatggtgaggtccgtcgccgcaattcatccctcgcttgaaattccaatgctaataccaaaggagaaacccccaattactgttgtcggcgatgttggaggtcgtatcgcaattattgtggatgatattatcgacgatgtagattcttttctcgccgctgccgagacattaaaagaacggggtgcttataagatttttgtcatggcaactcatggactcctgagttctgacgcgccacgacgcatcgaagagtctgccatcgatgaggtggtggttaccaatacgatacctcatgaggtccaaaagttgcaatgtccaaagatcaaaaccgtggacatatcgatgatcctgtcagaggcaatcagacggatacacaacggggaaagtatgtcatacctttttcgaaatataggactggatgactag

SEQ ID NO: 234995 - DNA, 531 bp, synthetic construct
  misc_feature 1..531: note = Description of Artificial Sequence: Synthetic coding sequence
  source 1..531: mol_type = other DNA
atgttctgcgtaactcctccagagcttgaaaccaagatgaatatcaccaaaggaggactggtgctgtttagcgccaacagcaattccagctgcatggaactcagtaaaaaaatcgccgagaggctaggggtggaaatgggcaaggttcaggtttaccaggaacccaaccgcgagacacgggtgcagatccaggagagcgtccggggtaaagacgtgttcattatccagacggtcagtaaggacgtaaatacgaccatcatggagcttctcattatggtttacgcctgcaagacctcatgcgccaagtcgatcatcggcgtgattccgtacttcccttattcaaaacaatgtaagatgagaaagcgaggcagtattgtgagcaagcttctggcatcaatgatgtgcaaagcgggtctgacacaccttatcacaatggacttacatcaaaaggagatccaaggcttcttcaacatcccagtcgataacttgagagctagcccttttcttctccagtatattcaggaggagtag

SEQ ID NO: 234996 - DNA, 735 bp, synthetic construct
  misc_feature 1..735: note = Description of Artificial Sequence: Synthetic coding sequence
  source 1..735: mol_type = other DNA
atgttctgcgtaacacctcccgagctagaaactaagatgaacatcacaaagggagggctcgtgctctttagcgccaattcaaattcatcctgcatggagctgtcaaagaagattgcggagagactgggcgtggaaatgggtaaggtgcaggtgtaccaggaaccaaaccgggagacccgggtccagattcaggaatctgtgagggggaaggatgtgtttatcattcagaccgtatccaaagacgtcaataccaccatcatggagctgttgatcatggtgtacgcctgcaagacaagttgcgctaaaagtattataggcgtgattccgtactttccgtattccaagcagtgcaagatgaggaagcgagggtcaatagtgtctaaactgttggcttctatgatgtgcaaagcgggtctcacacatctgatcacgatggacctccatcagaaagagatccaaggattttttaatatcccagtggataatctccgggcatctccattccttctgcagtatattcaagaagaaattcctgattaccggaatgccgttatcgtggctaaatcacccgcttccgccaagagagcacagtccttcgctgagagacttcggctgggtatcgccgttattcatggggaggctcaggacgccgagtccgacctggtcgacgggagacattctccccctatggtcagatcggtcgctgcgatccaccccagtctggagatcccttag

SEQ ID NO: 234997 - DNA, 135 bp, synthetic construct
  misc_feature 1..135: note = Description of Artificial Sequence: Synthetic coding sequence
  source 1..135: mol_type = other DNA
atgttctgcgtcaccccccctgagcttgagacaaagatgaacatcactaaaggcggactggtcctatttagcgctaattcgaattcgtcttgcatggagctgtctaagaaaattgccgagcgcctcggggtttag

SEQ ID NO: 234998 - DNA, 807 bp, synthetic construct
  misc_feature 1..807: note = Description of Artificial Sequence: Synthetic coding sequence
  source 1..807: mol_type = other DNA
atgttttgtgtaactcccccagagctggagaccaagatgaacatcactaaaggaggactggtccttttctcggcaaacagcaacagtagttgtatggaattgtctaaaaagattgctgaacgcctcggcgtggaaatgggaaaagtgcaggtttatcaggagcccaaccgggaaactagggtacaaatccaggaatccgtgcgcggaaaagacgtctttattatacagacggtgagcaaggatgtgaataccaccattatggagcttcttatcatggtgtatgcttgtaaaacatcatgtgccaaaagcatcatcggagtgataccctactttccctacagtaagcagtgcaaaatgcgaaaacgcggatccatcgttagcaaacttttggcctccatgatgtgcaaagcaggtctaacacatctcatcacgatggacctgcaccagaaagaaattcagggttttttcaacatccctgtagataatctgagggccagccctttcctgcttcagtatatacaggaggaaatccccgattacagaaatgcagtgatcgtggccaaaagtcctgccagcgcaaaaagagcccagtcattcgccgaacggctccgcctggggatcgccgtaattcacggcgaagctcaggatgccgaatcagatcttgtggatggacggcatagcccacctatggtgaggagcgttgccgctatacaccctagcttggaaatccccatgctcatccccaaagaaaagcccccaataacagtggtcggcgacgtgggcggtagaattgcgatcatcgtctag

SEQ ID NO: 234999 - DNA, 423 bp, synthetic construct
  misc_feature 1..423: note = Description of Artificial Sequence: Synthetic coding sequence
  source 1..423: mol_type = other DNA
atgttctgtgtgacccctccagaacttgagactaaaatgaatatcacaaaaggtgggctggttctgtttagcgctaattctaattcaagctgcatggagttgtccaaaaaaattgctgagcgactgggtgtggagatgggaaaagtgcaggtgtatcaggagcccaacagagagacccgggtgcaaatacaggaatcagtgaggggaaaagatgtcttcattatccagaccgtctcaaaagacgtgaatactaccattatggagctgttaatcatggtttatgcctgtaagacatcttgcgccaagtccattatcggggtgatcccttactttccctatagtaagcagtgtaagatgcgcaagcggggaagtatcgtctcaaagcttctagcatcaatgatgtgcaaggccggtttgacatag

SEQ ID NO: 235000 - DNA, 807 bp, synthetic construct
  misc_feature 1..807: note = Description of Artificial Sequence: Synthetic coding sequence
  source 1..807: mol_type = other DNA
atgttttgcgtgacaccacccgaactggaaacgaagatgaacatcaccaaaggcggactggtactgttttccgccaactctaattcaagctgtatggaactgtctaagaagattgctgaacggttaggggtagagatgggcaaagtgcaggtgtatcaggagcctaatcgggagacgcgggttcaaatacaagagtctgttcgagggaaggatgtgtttatcattcagaccgtaagtaaagatgtcaatacaacaataatggagctcctcattatggtgtacgcatgcaagaccagttgcgctaagtccatcataggcgttatcccatattttccctactctaagcagtgcaaaatgcgcaagagggggagcatcgtgtcgaaactactggcttcgatgatgtgcaaggcgggtctgactcatctgattactatggatctccatcagaaagagatacagggcttcttcaacataccggtggacaatctgcgggctagcccctttctgctgcaatatattcaggaagaaatcccagattatcggaacgccgtcatagtggcaaagagcccagccagcgccaagcgggcacaaagttttgcagaaaggctacgccttggcatagccgtgattcacggcgaagcacaagacgctgagtctgatctcgtggacgggcgacattctccgccaatggtgcggtctgtcgccgcaatccacccaagtcttgaaatcccaatgctgatccctaaagagaaaccacccatcacagtcgtgggagatgtaggaggaagaatagccatcatagtgtag

SEQ ID NO: 235001 - DNA, 852 bp, synthetic construct
  misc_feature 1..852: note = Description of Artificial Sequence: Synthetic coding sequence
  source 1..852: mol_type = other DNA
atggaactgctcatcatggtttatgcttgtaaaacttcttgcgctaagagtattattggcgtcatcccctacttcccttatagtaaacagtgcaaaatgcgcaagcgcggtagcatagtatcaaaattgctggcgtccatgatgtgcaaggccggattgacccatctcatcaccatggacctgcaccagaaagaaattcaaggttttttcaatattcctgtggataacttaagagcctcaccttttctgctgcaatacatccaagaagagattccagactatagaaatgctgtcatcgtggctaagtccccagcatcagccaagagggctcagagcttcgcagagagactgagactagggatagcggtgatccatggcgaagcacaagacgccgagtctgatcttgtggatggacggcattcccctcctatggttcggtccgtggcggcaattcaccccagcctggaaatacccatgctgatcccaaaggaaaaaccgcctattactgtggtgggagacgtcggaggcaggatcgccatcattgtggacgacatcatcgacgatgtggacagttttctggcggcagccgagaccctgaaagaacgaggcgcttacaagatcttcgtgatggctacccatggtctgctgtcctctgacgcaccaagacggatcgaggaatctgccattgacgaagttgtcgtgacgaacacaatccctcacgaggttcagaaactgcagtgccctaagatcaagaccgtcgatatatccatgatcctgtctgaagctatccgcaggattcacaacggggagtccatgtcttacctttttcgtaatataggcctcgatgactag

SEQ ID NO: 235002 - DNA, 963 bp, synthetic construct
  misc_feature 1..963: note = Description of Artificial Sequence: Synthetic coding sequence
  source 1..963: mol_type = other DNA
atgttctgtgtgactccacccgaattggagacaaagatgaacatcaccaaaggcggactggttctgttctccgccaactcgaactcctcctgtatggagttgtccaaaaaaatagcagagaggttaggagtagaaatgggcaaggtgcaggtgtaccaggaacctaaccgtgaaacccgcgtacaaattcaggaatctgtaagggggaaggacgtttttattattcagactgtttccaaagacgttaacactacaattatggagttacttatcatggtctatgcctgcaagacctcctgtgccaagtccattataggcgtcatcccgtacttcccttatagcaaacagtgcaagatgagaaaacggggtagcattgtatccaagctgttggcgagcatgatgtgcaaagcgggactgacccacctgattaccatggacctgcatcaaaaggagatccagggctttttcaatatacccgtggataaccttcgcgctagccctttcctgctgcagtacattcaggaagaaatcccagactaccgcaacgctgtgattgtagcaaaaagcccagcctctgccaagagggcccagtccttcgccgaacgcttgagactgggcatcgcagtgatacatggggaagcccaggatgcagaatctgatctggttgacggccgacactcgcctcccatggttcgaagcgttgcggcaatccacccaagccttgagatcccaatgctgatccccaaagagaagccccctatcaccgtagttggcgacgtggggggaagaatcgctatcatcgttgttgtagtgacgaatacaatcccacatgaggtgcaaaagctgcaatgtcccaaaatcaagactgttgatatttctatgatcctttccgaggctattcgacgcatccacaatggcgaaagcatgtcgtatttgtttcgaaatataggactcgacgattag

SEQ ID NO: 235003 - DNA, 237 bp, synthetic construct
  misc_feature 1..237: note = Description of Artificial Sequence: Synthetic coding sequence
  source 1..237: mol_type = other DNA
atgttttgtgtaacaccccctgaattagagaccaagatgaacattacaaaagggggattggtgctgttctccgcgaacagcaactcttcctgcatggaattaagcaagaagatcgcagagaacaagtcaaccaactcccgcgtgtgcgagggtaagcggtgcttccatcatcccaattgctttgagggcagggagcaccatcatcacggggcacccgatcacggggtctgcatgtag

SEQ ID NO: 235004 - DNA, 678 bp, synthetic construct
  misc_feature 1..678: note = Description of Artificial Sequence: Synthetic coding sequence
  source 1..678: mol_type = other DNA
atggcagggtccagcgaagaggcccctgactacgggcgaggggtggtcatcatggatgactggccgggttacgatttaaatctctttacttacccccagcattactatggtgacctcgagtacgtactcatacctcatgggataattgtcgacaggatcgagaggctcgccaaagatatcatgaaagatataggctacagcgacattatggtgctgtgcgtactgaagggaggctataaattttgtgccgatctcgtggagcacctgaagaacatttcaaggaacagtgaccgttttgtaagcatgaaggtggacttcattagacttaaaagttaccgcaatgaccagtcgatgggagagatgcaaatcatcggcggagacgatctgagcacgctagccggaaagaatgtgctcattgtggaggacgttgttggcaccgggcgtacaatgaaggcattgctgtcaaacatcgagaaatataagccaaatatgataaaggttgcttctctgctggtaaagcgaacgtcccgctcagacggctttcgaccagactatgctggttttgagattccaaatctgttcgtggttggctacgccctcgattacaacgagtactttagggatctgaaccatatctgcgtcatcaacgagcacggcaaggagaagtaccgggtatag

SEQ ID NO: 235005 - DNA, 573 bp, synthetic construct
  misc_feature 1..573: note = Description of Artificial Sequence: Synthetic coding sequence
  source 1..573: mol_type = other DNA
atggcgggaagctcagaggaggccccagactacggtagaggggttgtcattatggacgattggccaggctatgacttgaacttatttacatatccccaacactactacggagaccttgaatacgttctgattcctcacggcattattgtggatcgcatcgagcggctggccaaagatatcatgaaggacatcgggtactcagatatcatggtgctctgcgtcctgaagggtggatacaagttctgcgccgacctagtggagcacctgaaaaatatctctcggaactccgaccgctttgtcagtatgaaagtggactttatacggctgaaatcctataggaatgatcagtcgatgggcgagatgcaaatcatcggaggtgacgatctgagcacattagctggcaaaagtgttcttttcgcaaaagatgtcgtgggaaccggacgcacgatgaaggcgcttctctctaatatcgagaagtataagcccaacatgattaaggtggccagcctgctggtgaagcggacatcgcggtctgacggattcaggccagattctcacatgagacaccagtag

SEQ ID NO: 235006 - DNA, 522 bp, synthetic construct
  misc_feature 1..522: note = Description of Artificial Sequence: Synthetic coding sequence
  source 1..522: mol_type = other DNA
atggctggatcttctgaggaggcacccgattacggccgaggggtcgtaattatggatgattggcccggttacgacctgaatcttttcacatacccacagcactactatggcgatctcgagtacgtgctgatcccccatggaataatcgtcgatcggattgaaagactcgcaaaagatattatgaaggatataggctatagcgatatcatggtcctgtgtgtacttaaaggcggatataagttttgcgccgatcttgtggagcacctcaagaatatctctcgtaattctgaccggttcgtcagcatgaaagtagactttatccggctgaagagctaccgattgagagcccgacttaaacgcaccacgatctgcgaccgcggaggcctggcgttcagccagggctacatgagctcttgtgcgccactgcaggaaagccctaacacgctttggaggggctacctgcaggtgctgatcccatgtttccacatcaggttccagctgcctaggtcagaacagaactag

SEQ ID NO: 235007 - DNA, 573 bp, synthetic construct
  misc_feature 1..573: note = Description of Artificial Sequence: Synthetic coding sequence
  source 1..573: mol_type = other DNA
atggccggtagcagcgaagaggcaccagactacggccgaggtgttgtgataatggacgattggcctggttacgatctcaatctgttcacgtatccccaacactactacggagacctggagtacgtgctgatccctcacggtattatcgtggatagaatcgagcggttggcaaaagacatcatgaaagacattgggtattctgatatcatggtgctttgtgtgctgaagggcggttacaagttctgcgccgatctcgtggagcaccttaaaaacatcagccgcaatagcgatagattcgtaagcatgaaggtggactttattagactgaaatcttatagaaacgatcagtctatgggagagatgcagatcatcgggggtgacgacttgtccacactggcgggtaagaatgtgttgatcgttgaagacgtggtcggcaccggtaggaccatgaaagcgcttctgtcaaacatcgaaaagtataagcccaatatgataaaggtcgccagcttactggtgaagcgcacatcccggagtgatggcttccgccctgatagccatatgagacatcagtag

SEQ ID NO: 235008 - DNA, 1299 bp, synthetic construct
  misc_feature 1..1299: note = Description of Artificial Sequence: Synthetic coding sequence
  source 1..1299: mol_type = other DNA
atggcgaccgccgaggtgttaaatattgggaaaaaactgtacgaaggcaaaacgaaagaggtgtatgagctgttggactctccaggcaaagtgctattgcaatcaaaggaccagattaccgctggaaatgccgcacggaagaatcacttggagggaaaagcagcgatcagcaacaagattacgtcctgtatcttccaattgctgcaagaggccgtgacatcatacaaatccaaccgcatcaaaacagcctttacgcggaagtgcggcgagaccgcttttatagcccctcagtgtgagatgatccccatcgaatgggtgtgtagacggatcgccactggcagttttctgaaacgcaatcccggagtaaaggaaggttataagttctacccacctaaggtggagctgttcttcaaggatgacgctaacaacgacccccagtggtctgaggaacagttgattgccgctaaattctgtttcgcagggctacttattggccagacagaagtggacatcatgtctcatgctacacaggccatctttgaaattcttgaaaagtcctggcttccccagaactgtaccctggttgacatgaaaattgagttcggggtggatgtgactaccaaagagatcgtgcttgctgacgtcattgacaacgacagctggagactgtggcctagtggagataggtcccagcagaaggacaaacaatcatatcgagacttaaaagaagtgaccccagaggggctgcagatggtgaagaaaaatttcgagtgggtcgctgaaagggtggaattgctgctgaagtctgagtcccagtgtagagttgtggttctgatgggcagtacgtccgatctcgggcactgcgagaaaatcaaaaaggcttgtggcaattttggcattccctgcgaactcagggtgacatctgcgcacaaaggccctgatgagacgctgcgtattaaagccgagtacgagggggacggcataccaacagtttttgttgcagtggccggaagatcaaatggtctgggtcctgtgatgagcgggaacacagcctatccggtgatcagctgcccaccactcacgcctgactggggtgtgcaggatgtttggagcagcctcaggctgccctcggggctcggatgttcaactgtgctgagtcctgagggttctgcacaattcgcggcacagattttcggcttgtccaatcatttggtgtggtctaagctccgtgcctcaatcctgaacacctggattagcctgaagcaggctgacaaaaaaatcagagagtgtaatctctag

SEQ ID NO: 235009 - DNA, 1278 bp, synthetic construct
  misc_feature 1..1278: note = Description of Artificial Sequence: Synthetic coding sequence
  source 1..1278: mol_type = other DNA
atggccaccgcggaggttcttaacatcggcaagaagctgtacgaggggaaaacaaaagaggtttacgagctcctggactctccaggcaaggtccttcttcagtcaaaggatcagattaccgctggaaatgccgcacgtaaaaaccatttggaggggaaggccgcaatctcaaataaaattacatcttgtatttttcaactgctgcaggaggccggaataaagacagcgtttacaagaaagtgtggcgaaacagccttcatcgcaccgcagtgtgaaatgatccctatcgagtgggtgtgccggaggatcgccaccgggtcttttctcaaaaggaacccgggagtgaaagaagggtacaaattctaccctcccaaagttgagctgttcttcaaggatgacgcaaacaacgacccacagtggagtgaggaacagttaattgcagcgaaattttgcttcgccggtttgctgatcgggcagaccgaggtcgatatcatgagccacgcaacacaggccatctttgaaatccttgaaaagagttggctgcctcagaattgtactcttgtagacatgaagattgagtttggcgtggacgtgactacaaaagaaatcgttctggccgatgttattgacaacgatagctggagactgtggccttcaggtgaccgctcccaacaaaaagacaagcagtcctatcgagacctgaaagaagtgaccccggaggggctccagatggtgaaaaaaaatttcgaatgggtcgccgagcgggtcgaacttctgcttaagtccgaatcacagtgccgagtggtcgttctgatggggtctacctctgatcttggacattgcgagaagataaagaaagcctgcgggaactttgggatcccatgcgagttaagggtaacatccgctcataaaggaccggatgagacgctcaggattaaggccgaatacgagggggacggcattcctaccgtattcgtcgccgtcgcgggaagatccaacggcctcgggccagtgatgtcgggcaacaccgcctaccctgtcatctcgtgcccgcctttgacccccgactggggagttcaggacgtatggtcgagcctaaggctgccttccggactcggatgttctactgtgctgtcacctgaaggctccgctcaattcgccgctcagatttttggactgagcaatcacctggtgtggtccaagctgagagccagcatactgaatacttggatctcactgaagcaggctgacaagaagattagggagtgcaacctatag

SEQ ID NO: 235010 - DNA, 1278 bp, synthetic construct
  misc_feature 1..1278: note = Description of Artificial Sequence: Synthetic coding sequence
  source 1..1278: mol_type = other DNA
atggcaactgcagaagtgttgaacatcgggaagaaactttatgaaggaaaaactaaagaagtttatgagttgctcgattcgccaggaaaagttctgctccaaagtaaggaccagataactgccggaaacgccgctagaaaaaatcacctggagggcaaggcagcaatcagcaataaaattacatcatgcatctttcagttactgcaggaggctggtattaaaactgctttcacccgcaagtgcggagagaccgctttcatcgctccccagtgcgagatgatcccgattgaatgggtttgccggagaatcgctactggtagctttcttaaacgaaaccctggcgtcaaagaaggatataagttctaccctccaaaggtcgagctgttctttaaggatgacgctaacaatgacccccaatggagcgaggagcagctgatcgccgcaaaattttgttttgccggactgcttataggccaaaccgaggtagatatcatgtctcatgccacccaggccatctttgagattttagaaaaatcttggttgccgcagaactgcacattggtggacatgaaaatagagtttggcgttgacgtgacaactaaggagattgtgctggctgatgtaatagataatgacagctggcggctgtggccttcgggcgaccgctcccagcaaaaggataagcagagctaccgggacttgaaagaggtgacgcccgagggcctacaaatggtcaagaagaacttcgaatgggttgccgagagagtcgaacttctgttaaaatccgaatcacagtgccgcgtggtcgtcctgatggggtccacctccgacttaggtcactgcgaaaaaatcaaaaaggcatgtgggaacttcggtattccgtgcgagctccgagtgacttctgcccataagggtcccgatgagaccttacggattaaggcagagtacgagggtgatgggatcccaacagtgttcgtggccgtagccggacggagcaatgggctggggcctgtgatgtcaggcaatacagcttatccagtgatcagctgtcctcccctgacacctgactggggggtgcaagacgtgtggtcaagcctacggttgccatccggtctggggtgctccacagtcctgagcccggagggctctgcccagtttgcagcccaaattttcggcctgtccaaccatctggtgtggtctaagctacgggcttcaattttgaacacgtggatcagtttaaagcaggcggataaaaaaattcgcgaatgcaatttatag

SEQ ID NO: 235011 - DNA, 4017 bp, synthetic construct
  misc_feature 1..4017: note = Description of Artificial Sequence: Synthetic coding sequence
  source 1..4017: mol_type = other DNA
atgtcccccgtgctgcatttttacgtacggccttccggccatgaaggcgcagccccaggccatacccgacgcaagctgcagggcaaactgccagaactgcagggggttgaaaccgaactgtgctataacgtgaactggacggctgaggcacttcccagcgctgaggaaacgaagaaattgatgtggctgttcgggtgtccccttctgctggatgacgtggcgagagagtcttggttgctccctggttctaacgaccttctgctggaagtcgggccaaggctcaacttctccacccctacctccactaatatcgtgtcagtatgtcgcgcaacgggactcgggcctgtggaccgggtcgaaaccacaaggaggtaccgtctgtccttcgctcaccctcctagtgctgaggttgaagccattgcactggccacattgcacgacagaatgaccgagcagcattttccgcacccaattcagagtttcagcccagaatcaatgcccgaacctctcaacggacccatcaatatcctaggtgaaggtcgcctggcacttgaaaaggcgaatcaggaactgggcctcgctctggactcatgggatctggatttctacacaaagcggtttcaggaacttcaacggaatccctctactgtggaggctttcgacttggcacagtccaattcggagcattctcgtcactggttcttcaaaggccagctgcacgtggatggtcagaagctcgtccactcattatttgaatcaattatgagtacccaggaatcatcgaatcccaacaatgtattaaagttttgcgacaattccagtgcaatccaagggaaggaagttcgattcctgcggccagaagaccctacaagaccctcgagattccagcagcagcaaggccttaggcacgtcgtgtttactgctgagacacacaatttccccacaggagtgtgccctttcagcggcgctactacaggaacagggggtcggattcgcgacgttcagtgcacaggacggggagctcacgtcgtggctggaaccgccggatactgttttggaaatcttcacatccctggctacaatttgccttgggaagacccaagcttccagtatcccggaaattttgctcgacctctggaggtcgcgattgaagctagcaacggggctagtgactacggtaataagttcggggaacccgtgcttgccggttttgctaggtccctcggcctgcagttacccgatggacagcgaagagagtggattaagcctattatgtttagcgggggaatagggtcgatggaagccgatcacattagtaaagaggctccagaacctggcatggaggtggtgaaggttgggggtcccgtttatagaattggggtgggtggaggcgcagcctcaagcgtgcaggtgcagggtgacaacacatccgacctggatttcggtgccgtgcagagaggggatcctgagatggagcagaagatgaatcgggtcatccgtgcctgtgtggaagcgcctaagggtaatcctatatgttctctccacgatcagggcgctggaggcaacggaaacgttctgaaggaattaagcgaccctgcaggcgcaatcatctacacctcccgattccagctgggggacccaacactgaatgcacttgagatctggggagctgaataccaggaatcaaatgctctgctgttgagatctcccaacagggacttcttgacccacgtgagtgccagagagcgctgcccagcttgctttgttgggacaattaccggcgaccggagaatagttctggtggacgacagagaatgtcccgtgcggaggaatggacaaggagacgctccccctacgcctctacctacccccgtcgaccttgagctggagtgggtgctgggcaagatgccaaggaaagagttcttcttacagcgcaaaccacccatgttgcaacccctggctctcccaccaggtctgagcgttcatcaggccttagagcgggttttgcgccttcccgctgtggcatccaaaagatacttgaccaataaggtggatcgatcagtcggcggactggtcgctcaacaacagtgtgtcggccctctgcagaccccactggcagacgtggcagttgtggcactgagtcatgaggagctcattggggcagccactgctctcggtgaacagccagtaaaatccctccttgatccaaaggtggccgcaagattggctgtggccgaggctctgactaatcttgtcttcgcgctcgtcaccgatctgcgtgacgttaagtgttcggggaactggatgtgggctgcaaagctgcctggcgaaggggcagctctggcggacgcttgcgaagccatggtcgccgttatggccgctctaggagtcgcagtcgacgggggaaaagattcactgtctatggccgctagagtggggactgaaacggtgcgagcaccgggatcccttgtaatatccgcgtacgcagtctgccccgatattactgccacggtgacacccgacctgaaacacccggaaggcaggggacacctcctgtacgtggccctctccccaggacagcaccgccttggcggaactgcactggcccagtgcttcagtcagctgggggaacatccccctgacctcgatctgcccgaaaacctggtcagggccttctctattacccagggcctgctgaaagaccgcttgttatgttcaggccacgacgtatccgatggtgggctagtgacgtgcttactagaaatggcttttgccggtaactgcggcttacaggttgacgtacccgtaccacgcgtagacgtgctgtcggtcctattcgcggaggaacctggcctggtgctggaggtccaagagccagacttagcccaggtgctcaagcgctacagagatgccggactgcattgcttggagctcgggcacacaggagaagcaggacctcacgccatggtgagggtctctgtgaatggggcagttgtgttagaagaacctgtgggtgaactgcgcgctttgtgggaagagacttctttccaattagatagactacaggctgagccgagatgcgttgctgaagaggaaagaggcctaagagaaagaatggggccttcttattgcctgcctccaacttttcctaaagcttcagttccacgtgagccagggggaccctccccacgggttgctattcttcgggaggaagggagtaatggagaccgggaaatggcagatgcttttcacctcgccggatttgaggtctgggacgtcaccatgcaggatctttgttccggggctatagggttggacacattcaggggcgtcgccttcgttggaggcttttcttatgcagatgtgctaggtagcgctaagggttgggccgctgcggtgacgtttcatcctagagcaggagctgaattacgcagattccgcaaacgacccgacactttcagccttggggtgtgcaacgggtgccaattattggcacttctcgggtgggttggcggagacccaaacgaggacgccgctgagatgggcccagactcacagcctgctcggccaggtctgctgttgcgccacaacctgagtggcaggtacgaaagtagatgggcgtccgtccgggtcggaccagggcctgccctcatgctgaggggcatggaaggcgctgtcttgccagtgtggagcgcccatggagaaggctacgtagccttctcctcccccgaattacaggcgcagatagaggccaggggactggctccactccattgggctgatgatgatggcaacccaactgagcaataccccctaaatcccaatggctcaccaggtggagtggccggaatttgcagctgtgacggacgccatctggctgtcatgccccacccagagcgggcagtaagaccatggcagtgggcttggcgacctcctcccttcgataccctgactacatccccttggctgcaacttttcatcaacgcccgaaattggacactggaaggatcctgttag

SEQ ID NO: 235012 - DNA, 2745 bp, synthetic construct
  misc_feature 1..2745: note = Description of Artificial Sequence: Synthetic coding sequence
  source 1..2745: mol_type = other DNA
atgttctccggcggaattggttccatggaggctgatcatatttccaaggaagctcccgagccgggaatggaggtggtcaaagtgggtggaccagtctatcgcataggcgttggcggaggcgctgctagctcagtccaggttcaaggagacaatacaagcgatttagacttcggcgcagtgcagcggggtgatcccgagatggagcaaaaaatgaaccgcgtgatcagagcctgtgtggaagcccctaaagggaaccccatctgtagcctgcacgatcagggtgccggtggtaatggcaatgtgcttaaagaactcagcgaccccgctggggcaataatttacacatctaggttccagcttggcgaccctaccctcaacgcgctggaaatttggggcgctgagtaccaggagtccaatgctttgctgctgcgttcacctaaccgagatttcctcacccacgtctccgctcgtgaacgatgcccagcctgtttcgttggtacgattactggtgataggcggatcgtgctggtcgacgaccgggaatgccccgtgaggcgaaacggccagggcgacgcgcctcctacaccactgccaacacctgtagaccttgagctggagtgggtactggggaagatgccacgcaaagaattcttcctgcaacgaaagcccccaatgctgcagccactggccttgccacccggtctgagtgtacaccaggctctggagcgggtcttgaggctcccagcagtcgcatcaaaacggtacctgaccaacaaggtggatagaagtgttggcggtttagtggcccaacaacagtgtgttggtcctctccagaccccactggctgacgtcgctgtggtggcacttagtcatgaggaactcattggggctgctacagctctgggggaacaacctgttaagagccttctcgatcccaaagtcgcagccagactcgcggtggcagaggctctgactaaccttgttttcgctcttgttacagacctgagggacgtgaagtgcagtggcaattggatgtgggctgctaagctacccggagaaggtgcagcactggcggacgcgtgcgaagctatggtcgccgtgatggccgcactcggcgtggctgtggatgggggaaaggattctctgagcatggcagcgcgagtaggcaccgagacggtccgggctcccggatccctcgtgatttctgcctacgctgtatgccccgacataactgctaccgtcacccccgacctgaagcatccagaagggaggggtcatctgctgtacgtagcattaagccccggacagcacagacttggcggtaccgcgctggcacaatgcttctcccagctgggcgagcaccctccggacctggacctgcctgaaaatttggtgagggcctttagcattacccagggcctcttgaaggacaggttgctgtgctccgggcacgatgtgtccgatggcggactggttacttgcctgttggagatggccttcgcaggcaactgtgggttacaggtggatgtccctgtaccaagggtagacgtcctaagcgtcttattcgccgaggagccaggtctagtgctcgaggttcaagagcccgatctcgcgcaagtcttgaagaggtatagggacgctggcctgcattgtctcgaattaggtcacacaggcgaggccggaccccacgccatggtccgggttagcgtcaacggagcggtggtgcttgaggagccggtaggggagttgcgggcactctgggaggagacatcgttccagctggaccgcttacaggccgagccccgatgtgtcgctgaagaagagcggggactgcgggagaggatgggccctagctattgtctgccacctacctttcctaaggctagtgtcccccgtgagcccggaggtccatccccaagagtggccatcctacgcgaagaaggctccaacggcgacagagaaatggccgacgccttccacttagccggtttcgaagtctgggacgtgactatgcaggatttatgctctggagcaataggactggataccttcaggggtgtggctttcgtgggtggattctcgtatgccgatgtattgggatccgccaagggatgggccgcagctgtgaccttccatccaagagcaggagccgaattgcgtagattcagaaagcggccagacactttttctttgggggtctgcaacggatgtcagctgctggccttgctcggctgggtaggaggagatccaaacgaagatgcggcagagatgggaccagatagccaacccgctagaccagggttgttgctccggcataatctgtcaggacggtacgagagccgatgggcctctgtccgagtagggcctgggccagccctgatgctccgcggaatggagggcgcagtgctgcctgtttggagcgctcacggcgagggctatgtggctttcagctctccagagctccaggcgcagattgaggcccgaggccttgctcctctacattgggctgacgatgacgggaacccaaccgaacagtatcccttaaaccctaacgggagtccaggtggcgttgccggaatttgctcttgtgatggaaggcacctggccgtaatgccccaccctgaaagagcggttaggccctggcagtgggcttggcggccacccccttttgatactctcaccacaagcccttggctgcagttgttcatcaatgccagaaattggacccttgaagggtcatgctag

SEQ ID NO: 235013 - DNA, 2244 bp, synthetic construct
  misc_feature 1..2244: note = Description of Artificial Sequence: Synthetic coding sequence
  source 1..2244: mol_type = other DNA
gtgaaaggagagcggaggatagttttggtcgatgatagagagtgccctgtccgcagaaatgggcagggagacgcaccaccgacacctctgccaacacctgttgacctggaattggaatgggttctcggcaaaatgcccagaaaagaattcttcctgcaaaggaaacctcctatgttacaaccgcttgccctgcccccaggcctgtcagtacatcaggctctggaacgcgtgctgcggctgccggcagtcgctagtaaaagatacctaacaaataaggtggacaggtccgtcgggggtctggtcgctcagcagcagtgcgtgggaccactgcagacaccgctggctgatgtggccgtggttgctctttcccatgaggagctgatcggagccgctactgcattgggcgagcagcctgtgaaatccctgttagatcccaaagtagccgcaaggctggctgtagctgaagcgctgacgaatcttgtctttgctctagtgacagatctgcgcgacgttaagtgtagtggaaactggatgtgggctgcaaaactgccaggggaaggcgcagcactcgctgacgcctgtgaagcgatggtcgctgttatggcggctctgggcgtggcagtggatggaggcaaagactccctgagcatggcggctcgcgttgggaccgagactgttcgggctcccggaagtctcgtcattagcgcctacgcagtctgtcccgatatcaccgccactgtcacacctgacctaaaacaccccgaaggccgaggccacttactttacgtggctctcagtccgggtcagcaccgcttgggcggaactgcccttgctcagtgtttcagtcagttaggtgagcatcctcccgaccttgatctgcctgagaacctggtaagagccttcagcattacacaggggctgctgaaagacagattactatgctctgggcacgacgtgtctgacgggggactggtgacttgcctgctcgagatggcctttgccggtaattgcggtttgcaggtggacgtgccagttcccagggtggacgtgctgagcgtgttgtttgcggaggagcctggccttgtcttagaggtgcaagagccggatcttgcacaggtgcttaaaagatatcgcgatgccggactgcactgccttgaactcggtcacaccggcgaggccggtccgcacgccatggtgcgcgtgtctgtgaacggcgcagtggtgctggaagagcctgtcggtgaacttcgagctttgtgggaggagacatccttccagctggatagacttcaggctgagcccaggtgcgtggccgaggaggagcgtggccttcgggagcgcatgggaccttcatattgtcttccccctacctttcccaaggcctccgttcccagagaaccaggcggtccctcaccgagagttgctattcttcgggaggagggttcaaatggtgatagagaaatggccgatgcatttcaccttgcgggtttcgaggtatgggacgtaacgatgcaggatctgtgttcaggggcaataggcctggataccttcaggggtgtggctttcgttggcggattttcatatgccgacgttctcggttctgctaagggatgggccgcagcagtcacctttcaccctagagcaggggctgaactgaggcggtttcgcaaaaggcccgatactttctccctgggcgtttgcaacggctgccagctccttgcgctcctcgggtgggtcgggggtgatccgaatgaagatgccgctgaaatggggcctgacagccaacctgcacgcccagggttactgctcaggcataatctgagcggtagatatgaatctcggtgggcatccgtccgcgttgggccaggacccgctctgatgcttagggggatggaaggagcagttttacccgtttggtccgcacatggcgaggggtacgtcgctttctcatctcctgaactccaagctcagattgaggcaagaggcctcgcgcctctccactgggctgacgacgacgggaatcctactgagcaatatccattaaatcccaatggcagcccaggaggagtcgccggaatttgctcctgcgatggcagacacctcgcggttatgccccacccagagcgagctgtgagaccatggcagtgggcttggaggccgccacccttcgatacactcaccacatctccatggctgcagctcttcataaacgccaggaattggacattggaagggtcttgttag

SEQ ID NO: 235014 - DNA, 1302 bp, synthetic construct
  misc_feature 1..1302: note = Description of Artificial Sequence: Synthetic coding sequence
  source 1..1302: mol_type = other DNA
atggctgccagggtgctgattataggaagcggaggcagggaacacaccctggcctggaaactggcacagagtcatcatgtgaaacaggtattagtcgcccctggtaatgccggaacagcctgtagcgaaaaaataagcaatacggccataagcataagcgatcatacggccctggcacagttctgtaaagagaaaaaaatcgaattcgttgtggtgggtcccgaagctcctctggccgcaggcattgtcggcaatctgcgatctgccggtgtgcagtgctttggccctacggctgaggcagcacagctggaaagctctaagcggttcgcgaaggagtttatggatagacatgggattccgacggctcagtggaaggccttcacaaagccggaggaggcgtgctcattcatcctctcggcagacttccctgccctcgtggtgaaggcctctggactggcggctggtaagggagttatcgtggccaagagtaaggaagaggcctgcaaagcggtgcaggaaataatgcaagagaaggcctttggagcagcaggcgaaacaatcgtgatcgaagagctgctcgatggagaggaagtgtcatgcctctgcttcacggacggcaaaaccgtcgcgcctatgccgccagcacaagatcacaaaagattgctggaaggcgatgggggacccaacactggcggtatgggtgcatactgccccgcaccccaggtttcaaacgatctgcttctcaaaatcaaggacactgtactgcagagaacagtggatgggatgcagcaggagggtactccctacaccggtatcctttacgccggaattatgctgaccaaaaacggacccaaggttctcgagttcaactgtcgctttggcgaccccgagtgtcaggtcatcttgccattgctgaaatccgatctgtacgaggtaatccagagcaccctcgatggattgttgtgcacatccctgcctgtttggcttgagaatcatacagcactgactgtcgttatggcgagcaaaggttaccccggagactacaccaaaggcgtggagattacaggattcccggaagcacaggccttgggcttagaagtattccacgccggaacagccttgaaaaatggtaaagtggtgacgcacggtgggagggtgctcgctgtaacagcgatccgggagaatttgatatccgcccttgaggaggcaaagaagggcctggctgccattaaattcgagggagccatatacaggaaggatgtgggcttcagggcgattgctttcctccagcagcctcggtag

SEQ ID NO: 235015 - DNA, 3033 bp, synthetic construct
  misc_feature 1..3033: note = Description of Artificial Sequence: Synthetic coding sequence
  source 1..3033: mol_type = other DNA
atggccgctagggtactgattatcggcagcggcggtagagaacatactctggcttggaaacttgcccagagtcatcatgtgaagcaggtgctggtggctcctggcaacgccggaactgcctgcagcgaaaagattagcaataccgccatctctatctccgaccacacagccctagctcagttttgcaaggaaaaaaagatcgagtttgtcgtggtgggtcctgaggcacctctcgcagccggtatcgtgggcaaccttcgcagcgccggagtgcagtgcttcggaccaaccgcagaggccgcacaactggaatctagcaagagattcgccaaggagtttatggaccgtcatggaatacctactgcccagtggaaggctttcacaaagcctgaagaggcgtgctcctttatcttatccgcagactttccagctttagtggtgaaggccagtggccttgctgcaggcaagggggtcatagtcgccaagtccaaggaggaagcctgcaaggccgtgcaggaaattatgcaagaaaaggcatttggagcggcaggggagacaatcgttattgaggaactcctggacggggaggaggtatcttgcctttgttttacggacggaaaaacagttgcccctatgccccctgcccaagaccataagcgactgttagaaggtgatgggggtcccaacacaggtgggatgggtgcctactgtccagctccacaagtgtctaatgacttgctacttaaaatcaaggatacagtgctgcagcggacagttgacggtatgcagcaggagggcaccccctacacagggatactgtatgccggaatcatgctgactaagaacggcccaaaggttcttgaattcaattgtcggttcggtgacccagagtgccaggtcatactccctttgttgaaatccgacctctatgaggttattcagtcaacgcttgacggactcctgtgcacaagtctgccagtatggttggagaaccataccgcgctgaccgtggtaatggcctctaagggttatcctggagactacactaagggcgtggaaattactggtttcccagaggcacaggccctagggcttgaagtcttccacgccggaactgctttaaagaatgggaaggtggtaacacatggtggccgtgtcctggccgtgaccgctattagggagaatcttatttcagcactagaggaagcaaagaaaggactggcggcaatcaagttcgaaggggcaatctaccgtaaagatgtgggttttcgggctatcgcgtttctgcagcagcctcggtctttgacttataaggagagcggtgtcgatatcgctgcaggcaacatgttggtgaagaaaatccagccactcgccaaggcgacatcacgcagcggctgtaaggtggatctgggcggatttgccggactgtttgacctgaaggcagccggatttaaggatccactgctcgcttcaggcaccgacggagtgggtacaaagttgaagattgcccagctgtgtaataaacacgatacaattggccaggacctggtagctatgtgcgtaaacgatattctcgctcagggcgctgaacccctgttcttcctcgactatttctcttgcgggaaacttgatctgtccgttactgaggccgtggttgccggtattgccaaggcctgtggtaaagctggctgtgctctcttggggggagagacagcggagatgcccgacatgtatccgccaggagagtacgacctggccggattcgccgttggagccatggagcgggatcagaaattgccccaccttgagcggatcacggaaggggacgtcgtggtgggaatcgcttcaagtgggctccacagcaacggtttcagcctcgtacggaagatagtggcgaagtcgagtcttcaatactcatccccggcacctgacggatgtggagatcagaccctgggcgatctgttgctcacgcccacccgtatctactcacactcgttgctcccagtgcttagatctggccatgtgaaagcctttgctcatatcacaggaggcggacttcttgagaacatacctagagtcttacccgagaagctgggtgtggacctggacgctcaaacctggaggatccctcgcgtgttctcttggctgcagcaagagggccacttgagcgaagaggagatggcaagaaccttcaactgcggcgtgggggctgtactggttgtctccaaagaacagactgaacaaattctgcgcgacattcaacaacacaaggaagaggcctgggtcattgggtcagtcgtagctagggccgaaggcagccccagagtaaaggtgaagaacttaatcgaatccatgcaaatcaatgggtctgtacttaaaaacgggagtcttaccaatcacttctcttttgagaaaaaaaaggctcgagttgccgtcttgatatcaggaaccggttccaacctgcaggctctgattgacagtacgagggagcctaactctagcgcccaaattgatattgtgattagcaacaaagccgcagtggccggactggacaaggccgagcgggcaggaatccctacacgggtcattaaccacaagttgtacaaaaaccgcgtagagttcgacagcgcaattgacctcgtgttagaggaattctccatcgacattgtctgtttagccggttttatgcgcatattgagtggccctttcgtgcagaagtggaatggcaaaatgctgaacatacatcctagtcttctgcctagcttcaagggttccaacgcgcatgagcaggctctggagacgggcgtgactgtgacagggtgcactgtgcacttcgtcgcagaggatgtggacgctggacagataatcctgcaggaggctgtcccagtgaaaaggggagatacagtcgcgacattgtccgagcgcgtgaaactggccgaacacaagatcttccctgcagcactgcagctggtggcctctggaactgtccagctcggcgaaaacggcaaaatttgctgggtgaaggaggagtag

SEQ ID NO: 235016 - DNA, 3033 bp, synthetic construct
  misc_feature 1..3033: note = Description of Artificial Sequence: Synthetic coding sequence
  source 1..3033: mol_type = other DNA
atggcggcacgagtcctaatcatcgggtccggaggaagagaacacacactggcatggaaactggcacagtctcatcatgtcaaacaagttctggttgcaccagggaatgctggaacagcctgttcagaaaaaattagcaatacggccatcagcatttctgatcataccgctttggcccagttttgcaaggagaaaaagattgaattcgtggtggtcggcccagaggccccacttgccgctggcattgttgggaatctgaggtcggccggtgttcagtgcttcggaccaacagccgaggcagctcagctggagtcaagtaagcgctttgccaaagagttcatggacagacacgggatccctaccgcacaatggaaagccttcacaaagcccgaagaggcctgctccttcatcctgtccgcagattttcccgctctggtagtcaaagccagtggtctggctgccggaaagggagtaatagtagcaaagtccaaagaagaggcatgcaaggccgtgcaggagatcatgcaggaaaaagcatttggcgcagctggcgaaacaatcgtcatcgaagagctactagatggggaggaagtgagctgtctgtgttttacagatggaaagacggttgctcccatgccaccagcccaggaccataaacggctcctcgagggagacggcggacccaacaccggagggatgggagcttactgtccggcacctcaggtgtccaatgatcttctgctgaaaattaaggacacggtgctgcagcgaacagtagatgggatgcagcaggagggaactccctatactgggatcctgtacgctggaatcatgttgaccaagaatggtcccaaagtgcttgagtttaactgccggtttggggatcctgagtgccaagttattctacccctcctgaagtctgacctttacgaagtcatacagagcaccctcgatggacttctatgcacttctctgcccgtctggctggagaatcacacagccttgactgtggttatggcttcaaaggggtatcctggcgactatacaaaaggcgtggaaatcactggatttcccgaagctcaggcactgggactcgaggtctttcatgctgggaccgcccttaagaacggcaaggttgtcacacacggaggcagagtacttgccgtaacggccataagagaaaacttgatatcagctctcgaggaagccaaaaagggtctggccgctattaagtttgagggagccatctatcgcaaagacgttggtttccgagctatcgcttttcttcagcaacctcgtagcctgacgtataaagagagtggggtcgacatcgccgcaggaaacatgttggtcaagaagatacagccccttgcgaaggcaacctctagaagtggttgcaaagtggacctgggtggctttgccggattgttcgaccttaaggcagccggatttaaggatccccttctggcttccggcacggacggtgtgggcactaaacttaaaatcgcacagctgtgtaataaacatgacaccattggccaggatctggtggctatgtgtgtaaatgacatcctcgcccagggggctgagccactcttcttcctcgattatttctcctgcggaaaactggacctctccgtgacagaggccgtggtggccggaatcgctaaagcatgcgggaaggcaggctgtgccctcttgggcggtgagacagccgagatgcctgatatgtaccctcccggagaatacgatttagcgggattcgccgtcggcgcaatggaaagggaccagaagctgccccacctggagaggatcacggaaggagacgttgtcgttggtattgcttcatccggactgcactccaacggctttagtctcgtgaggaaaatcgtagctaaaagctcactccaatactcaagtcccgctccagatgggtgcggggaccaaactcttggcgatctcctcttaacgcctacacggatttatagccacagcctgctgccagttctgaggagcgggcatgtcaaggcttttgctcacattaccgggggtggactcttagagaatataccacgtgtgctccccgaaaaactcggggtggatttagacgcccagacttggagaatccccagagtcttttcctggctacagcaggaagggcatctctccgaagaggaaatggctagaacttttaattgcggggtgggagcagtcctggttgtatctaaagagcaaactgaacaaattctcagggacatacagcaacataaggaagaggcatgggtgatcgggtctgtggttgcgagagccgagggatcaccacgggtgaaggtgaagaacttgatcgaatctatgcaaatcaacggcagtgttttaaaaaatgggagcctgaccaaccacttttccttcgagaaaaaaaaagctcgcgtggccgtgcttatctccgggactggaagcaacttgcaagccctgatcgactccacgcgtgagccgaattctagtgcacagattgatattgttatttctaacaaagcagctgtcgcgggactggacaaggcagaacgggctggcatccccacccgggtgatcaatcataagctgtataaaaatcgcgtggaatttgatagcgccattgacctggtcctggaggagttctctatcgacattgtgtgtttggcaggatttatgcggattctatctgggccttttgtgcagaagtggaacggaaagatgcttaacatccaccctagtttgctgccatcctttaagggctcaaatgcccatgaacaggcccttgagacaggagtgaccgtaacgggttgtacagtgcatttcgtggccgaagacgttgatgctgggcagattatcctccaggaggccgtgcccgtaaagcgaggggacacagtggcaactctgtctgagagagttaaactggctgagcataagatcttccctgccgctcttcagcttgtggcttcgggaaccgtgcagttgggcgagaacgggaaaatctgctgggttaaggaagaatag

SEQ ID NO: 235017 - DNA, 3033 bp, synthetic construct
  misc_feature 1..3033: note = Description of Artificial Sequence: Synthetic coding sequence
  source 1..3033: mol_type = other DNA
atggcagctagagtgctgatcattggatcaggcggacgggagcacaccctggcgtggaagttagcccagagtcaccatgtcaagcaggtgctcgtggctcccggaaacgcagggaccgcctgttcggaaaagatcagcaatacagcgattagcatcagcgatcacacagcccttgctcagttctgcaaggagaagaagattgagtttgttgtagtgggccctgaggcccctctggcggctggtattgtaggcaacctgcggtccgccggtgtacagtgcttcggaccaacggccgaagccgctcagctggaatcctccaagcgctttgcaaaagaattcatggacaggcacgggatccctacagctcagtggaaagccttcaccaagccagaagaagcgtgcagctttattctttctgctgattttcccgcactcgtagtgaaggcttctggccttgctgctggcaagggtgtgatcgtggccaagtccaaggaggaggcatgtaaagcggtacaggagataatgcaggaaaaggccttcggtgcagccggtgagacaattgtgattgaggagcttctggacggagaagaagtgtcctgtctttgctttacagacggcaagactgtggccccaatgccaccagcacaggaccacaagcgcctgctggagggcgacggtggacccaacacgggtggcatgggtgcttattgccccgctccccaggtctccaacgatctgttgcttaaaatcaaggacactgtactgcagcggactgttgacggaatgcaacaggagggaacaccctacaccggaattttgtacgcagggatcatgctgactaaaaacggtcccaaggtgctcgagttcaactgtagatttggcgaccccgagtgccaggtgattctgccactcctcaagtctgacctgtacgaggtcattcagtctactctggacggattgctttgtactagtctgccagtctggttagaaaaccataccgcgcttactgtggtgatggcctcgaagggctacccgggagactatactaagggcgtggagattacaggattccctgaggcccaggccctgggtctggaggtcttccacgccggaactgctctcaagaacggaaaggtagtaacccatggcggaagagtgctggctgtaaccgctataagagaaaatctgatttctgccttggaggaagccaagaagggcttggctgcgatcaagttcgagggcgcaatttacaggaaggacgttggatttcgtgccattgcattcctgcagcagcctcggagcctaacgtacaaagagagcggcgtagatattgccgcaggcaacatgctggtaaagaagatccaacccctagcaaaagcaacaagccggagtggctgcaaggttgaccttggagggtttgctggcctgtttgacttgaaagccgcaggctttaaagacccactgcttgcgtccggtactgatggagtgggcacgaaactaaaaatcgctcagttgtgcaataaacatgacaccattggccaagatctcgtggcaatgtgcgtcaatgacattctggcgcaaggtgctgaacccttgtttttcctggattatttttcctgcgggaaactcgatctctcagtgactgaagccgtcgtagcaggaattgcaaaggcatgcgggaaggcagggtgtgccctacttggtggtgaaacggccgagatgcctgatatgtatccacccggagagtacgacctggccggtttcgcagtgggcgctatggagagggatcagaaactgcctcacctggaacggatcaccgaaggagacgtggtagtcgggatcgccagctcaggtttgcactcaaatggctttagtctggtgcgcaagatagtcgccaagtcatcactgcaatactctagccccgcaccagatgggtgcggggatcagactctcggggatttgttgctgactcccaccaggatatacagtcactccctgttgccggtccttcgcagcggccacgtaaaagctttcgcccacataacaggaggagggttgttagagaacattccacgcgttctgcctgaaaaactgggcgtcgatcttgatgctcagacctggcggatcccacgcgtatttagttggctccagcaagaaggacacctgtccgaagaagaaatggcccgtactttcaactgcggcgtcggagccgttctggtggtgagcaaggaacagacagagcagatccttagagacatacagcaacataaagaagaggcgtgggtcatcgggtcagtagtcgccagggccgagggcagtccacgagtgaaggtcaagaacctaattgagagcatgcaaatcaacggctcagtgcttaaaaacggatccctcaccaatcactttagctttgagaaaaaaaaggcacgagtggccgttttaatttccggaaccggctctaatctccaggctttgattgatagtacacgcgaaccaaactcctctgcccaaatagatatcgtcatttccaataaagccgctgtggcgggactggataaagctgagcgggctgggatcccaacaagagttattaaccacaagctctacaagaatagggtagagtttgattccgctatcgacctcgtacttgaagagttctctattgacattgtttgtctggcaggtttcatgagaatactttctgggccatttgtgcagaaatggaacgggaaaatgttgaacatccatccctcgcttctcccctcatttaaaggttctaacgcacatgagcaggctcttgagaccggggtaacagtgaccggttgcacagttcattttgttgccgaggatgtagacgccggacagatcattctgcaggaggctgttcccgtaaagcggggagatacggtggctaccctgagcgagcgcgtaaaattggccgagcataaaatatttcctgcagcgttacagttggtcgcttcgggtacagtccaactgggagaaaatggaaaaatttgctgggttaaagaagaatag

SEQ ID NO: 235018 - DNA, 699 bp, synthetic construct
  misc_feature 1..699: note = Description of Artificial Sequence: Synthetic coding sequence
  source 1..699: mol_type = other DNA
atggctgctcgtgtcctcattatcggctccggcggtagggaacacactctcgcatggaagttagcccagtcccatcacgtcaaacaagttctggttgctccaggcaatgctggaactgcttgcagcgagaagatttccaatacagccatctccataagtgatcacacagctctggcccaattttgtaaggagaagaagatcgagttcgtggtagttggaccagaagcacctctcgccgcaggtattgttggaaatctgcgcagtgccggagttcaatgctttgggcctactgcagaagcagcccaactggagtcctccaagagattcgcaaaggagtttatggatagacacggcattcctaccgcgcagtggaaagcttttaccaaacctgaggaagcttgctctttcatcctcagcgccgatttccccgcactggtagtgaaggcctcggggctggcggctggaaagggtgtcatagtggctaaatcaaaagaggaggcatgtaaagctgtccaggagattatgcaggagaaagcgttcggagctgccggagagacaattgtaatcgaagaactgctcgacggtgaagaagtgtcttgcttatgctttacagatggcaaaacggtggctccaatgccgccagcccaggaccacaaacgactcctagaaggcgatggtggaccaaacacagggggatag

SEQ ID NO: 235019 - DNA, 726 bp, synthetic construct
  misc_feature 1..726: note = Description of Artificial Sequence: Synthetic coding sequence
  source 1..726: mol_type = other DNA
atggcggcacgtgtccttatcatagggtctggagggagggaacacaccttggcatggaagcttgcccagagccatcacgtgaagcaggtgctggtcgctccaggaaacgccggtaccgcatgtagtgagaagatctccaataccgctatttctatcagcgatcacaccgcactcgctcagttttgtaaagagaagaagatcgaattcgttgtggttggtccagaggcaccattggccgcaggcattgtgggcaatttgcggtcagcaggagtccagtgctttgggcctacagccgaagccgcacagctggagtcatcaaagcggttcgcgaaagagtttatggatcgccacgggatccctaccgcccagtggaaagcattcacaaagcccgaggaagcctgtagctttatcctcagcgccgatttccctgcgctagtcgtgaaggcctcaggcctggccgcaggaaaaggcgtgatcgtagcgaagagtaaggaggaagcatgcaaagctgttcaagaaattatgcaggagaaggcattcggcgctgcaggagagactattgtaatagaggagctgctagacggggaggaggtctcttgcctgtgtttcacagatgggaagacagtggcacctatgcccccagcacaagaccataagaggctgttagagggagatggtgggccaaacacaggaggcatgggcgcttactgcccagccccacagtag

SEQ ID NO: 235020 - DNA, 417 bp, synthetic construct
  misc_feature 1..417: note = Description of Artificial Sequence: Synthetic coding sequence
  source 1..417: mol_type = other DNA
atggcagccagggtattgataattggttctggtgggagagagcatactttggcgtggaagctggctcaaagtcaccatgtcaaacaggtcctggtagccccaggtaatgctggcaccgcttgttctgaaaagatatctaataccgctatatcaatcagtgatcacactgccctcgcgcagttctgtaaagagaagaaaatcgaatttgtggtcgttggcccagaagcaccactcgcggctggcatagtcgggaatctccgcagtgctggggtccaatgcttcggaccaaccgctgaagcggcacaattggaatcaagcaaacgattcgcgaaggagttcatggaccgtcatgggatccctaccgcccagtggaaagcatttacaaagccagaggaagcgtgttccttcatcttatag

SEQ ID NO: 235021 - DNA, 411 bp, synthetic construct
  misc_feature 1..411: note = Description of Artificial Sequence: Synthetic coding sequence
  source 1..411: mol_type = other DNA
atggcagcccgagttctgattataggcagcggcggaagggagcacacacttgcttggaagctcgcgcagtcccatcacgtaaaacaggttctcgtggccccaggaaacgccggtacggcctgtagcgaaaagataagcaacactgctatctctatcagtgaccacactgcactggcccagttctgtaaggaaaagaagatcgaatttgtggtggtcggaccagaggcgcctctagctgctggaatcgtcgggaatctgcgctcagctggtgttcagtgctttgggcctactgctgaagctgcacaactagaatcctccaaaaggtttgctaaggaattcatggatagacacggtatccccactgcccagtggaaagcatttaccaaacctgaggaggcatgttctttttag

SEQ ID NO: 235022 - DNA, 1689 bp, synthetic construct
  misc_feature 1..1689: note = Description of Artificial Sequence: Synthetic coding sequence
  source 1..1689: mol_type = other DNA
atgctggtgaagaaaattcagcccctggccaaggcaacatcccgttcaggctgtaaagtggacttaggtgggtttgccggactctttgacctaaaggcagctggtttcaaagatcctctgctcgcttcaggcaccgacggggtgggaaccaagctgaaaatagcccaattatgcaataagcacgataccatcgggcaagacctcgttgcgatgtgcgtgaatgacatcttggcacaaggcgctgaacctctgttcttcctggattacttcagttgcggtaagctcgatcttagtgtcacagaggccgtggttgcaggaattgccaaggcctgcggcaaggccggatgcgcactgctaggcggagaaacagcggagatgcctgacatgtatccacccggagagtacgacctagccggttttgccgtgggggctatggagcgggatcagaagctgccccacctggagagaattaccgagggggacgtggtggtaggcattgcgagctctggcctgcacagcaacgggtttagtctagtcagaaaaatcgtagcaaagtcttctcttcagtattcctccccagcgcctgacgggtgtggcgaccaaacactgggcgacctgcttttgacacccacacgaatttactcccatagcctgttgccggttctcaggagcggtcacgtgaaagccttcgcgcacattaccggcggaggactgctggagaacatcccacgggtcctgcctgagaagctaggcgttgatctggatgcccagacgtggagaatcccaagagttttcagctggctgcagcaggagggacatcttagtgaggaagagatggctaggaccttcaattgcggggtaggggctgtcctggtcgtgagtaaagagcagaccgaacagattttgcgagacattcagcagcacaaagaggaagcctgggttataggtagcgtagtcgctagagctgagggttctccacgagtgaaagtcaagaatctcatagaatcaatgcagatcaacggcagtgtcctgaaaaatggctcgctgaccaatcactttagctttgagaagaaaaaggcacgggtggctgtgcttattagcggtactggttcaaatcttcaggccttaatcgattccaccagagagcctaacagctccgcacaaatagacatcgtaatatcaaataaggccgctgttgccggactggacaaggcggagcgggctgggatccctacgcgcgtcatcaaccataaattgtacaagaacagagtggagtttgatagcgcaatcgatctggtgctcgaagagttctccatagatatagtgtgcttggccggttttatgcgtattctgtccggaccatttgttcagaagtggaacggaaaaatgctcaacatccacccctctctgcttccctcctttaaagggagcaacgcccatgaacaagcattggaaaccggggtgaccgttacagggtgtactgtgcacttcgtcgctgaagacgttgatgccggtcagataattctccaagaggctgtgcccgtcaaacgcggtgacaccgtggctactctgagcgagagagtgaagctcgccgaacacaagatctttccagcggctttgcagctggtcgcgagtggcaccgtccagctgggagaaaacggcaaaatatgctgggttaaagaagagtag

SEQ ID NO: 235023 - DNA, 2265 bp, synthetic construct
  misc_feature 1..2265: note = Description of Artificial Sequence: Synthetic coding sequence
  source 1..2265: mol_type = other DNA
atgtccaggcctctttctgaccaggagaagcgaaaacagattagcgttaggggcttggccggagtggaaaatgtcactgagctgaaaaaaaattttaataggcatcttcactttactctcgtgaaggaccgtaatgtggccactcctagagactattacttcgcgttggcccatacagtgagggaccacctggtgggcagatggattcgaacacaacagcactactacgaaaaggatccgaaaaagatttccggcggatggcagatggaggaggcagacgattggctacgctacgggaacccctgggagaaggccaggcctgagttcaccctgcctgtacatttttacggacacgtggagcataccagccagggcgctaagtgggtcgacacccaagttgtcctggctatgccctacgatactccagtgcctggatacaggaacaatgttgtgaacaccatgcggctttggtctgcgaaggcccctaacgatttcaatctgaaagactttaatgtcggcggatatatacaggccgtgttggatcgcaacctggcagagaatatctcaagggttctctatccaaatgataacttcttcgaaggcaaagagttacgacttaagcaggagtattttgtggtggccgcaacactacaggacattatccggagatttaagtcttctaagtttggatgccgggaccccgtgcggacgaactttgacgctttccccgataaagtcgcaattcaactcaatgatactcacccctccctggcgattccggaactgatgcgcattctggtggacttagagaggatggactgggataaagcatgggacgtgacagtgcgaacatgtgcttatactaaccatacagtgttacctgaggcccttgagagatggccagttcacctcctagaaaccctgctgcctagacacctccagataatctacgagattaaccaacggttcctcaaccgggtggccgctgcctttcccggagatgtggaccgcctgcgcagaatgtcacttgtcgaggaaggcgcagtgaagcgcattaatatggcgcatttgtgcattgcaggctcccacgccgtcaacggtgtggccagaattcacagcgaaatcctcaaaaagacaattttcaaagacttctatgagttggagccccataagttccagaacaaaacgaatggaattacacctaggcggtggcttgtgctctgcaatcccggactggccgaggtgatcgctgaaaggatcggggaagattttattagcgatctcgaccagctgaggaaactcctctcatttgtggatgatgaggcattcatccgtgatgtggctaaagtgaaacaggaaaataaactaaaattcgctgcttacctggaacgcgagtacaaagtgcacatcaacccaaattcgctgttcgacatccaggtgaagcgcattcacgaatacaaacgccaactgttaaattgtcttcacgtgataaccctatacaaccgaattaaacgagagcccaataaattcttcgtgccaaggactgtcatgataggaggcaaggccgctcccggataccacatggctaaaatgattatacgtctggtcaccgctatcggcgacgtagttaaccatgacccggctgtgggagaccggctgcgggttatcttcctggagaattaccgtgtgagcctcgccgaaaaggtgatccccgcagcggacttatctgagcagatttctaccgcaggtacagaggctagcggaactgggaatatgaagttcatgctcaatggagctctcacaatcggaactatggacggagcaaatgttgaaatggcagaagaagcgggtgaagaaaacttttttatcttcggcatgagggtagaagatgttgataaattggaccagcggggatacaatgcccaggagtactacgaccgcatccccgagctgcgacaggttatcgagcagcttagttccgggtttttctccccaaagcagcctgacttgttcaaagacattgtcaacatgctgatgcatcacgatcgctttaaggtgtttgccgactatgaggactacatcaaatgtcaggaaaaggtgtcagcactgtataaaaacccacgggagtggacccgcatggtgatccggaatatcgccacttcgggaaagttctcctctgatagaaccatcgcacagtacgcccgagaaatctggggagtggagccttcacgccagaggctgccggcacctgacgaggccatttag

SEQ ID NO: 235024 - DNA, 3633 bp, synthetic construct
  misc_feature 1..3633: note = Description of Artificial Sequence: Synthetic coding sequence
  source 1..3633: mol_type = other DNA
atgcgtagtcgatccaactccggggttaggctggacggatatgcccgtctggttcagcagaccattctctgccaccagaaccctgtcaccggtttgttgcccgcttcatatgaccaaaaggatgcctgggtgagagacaacgtgtatagcattctggcagtgtggggcctgggcctggcatacaggaagaacgccgaccgggatgaggacaaagccaaagcctacgagctcgagcagagtgtagtgaaacttatgcggggtcttctgcattgtatgattcgacaggtcgacaaggttgagtccttcaaatactcccaatccaccaaggacagcttacatgccaagtataacacaaagacgtgtgcaacagtggtcggcgacgaccaatggggacacctgcagctggacgccaccagcgtctatctgcttttcctcgcccagatgactgcttcgggccttcatatcatccattcgcttgacgaagtaaactttatccaaaatctcgtattctatatcgaagctgcttacaaaacagccgattttgggatatgggaaagaggagacaaaactaaccagggcatatccgagctcaatgcatcaagcgtgggcatggctaaagctgctctggaggcactagacgagctggatcttttcggagtgaagggcggaccacagtccgtgatccatgtgttggccgacgaagttcaacactgccagagtattctgaactctttactccctcgagcctctacctcaaaggaggttgacgcatccctgttaagtgtggtgtctttccctgcattcgccgtggaagacagccagttggtcgaactgacaaaacaggagatcatcaccaagctgcaaggacgttacgggtgctgtcggtttctgcgggacggatacaagactcctaaagaggacccgaacagactatactatgagcctgctgagctgaaactgttcgaaaacattgaatgtgagtggcccctattctggacgtactttattttagatggagtatttagtggaaatgctgaacaggttcaggagtataaggaggcattggaggctgtgttgattaaggggaagaatggcgtgcccttacttcccgagctgtattccgtgcctccagacagagtggatgaggaataccagaatcctcataccgtcgaccgagtcccaatgggtaaactgcctcacatgtggggccagtccctgtatatactgggatcactgatggcggagggcttcttggctcccggagaaatcgaccctttaaatagacggttcagcactgtgccaaagcccgatgtggtcgtgcaggtatccatcctcgccgagactgaggagattaagaccatcttgaaggacaagggcatctacgtagagaccatcgccgaagtataccccatccgagtccagcccgctaggatcctcagtcacatctattcatcactgggctgtaataaccgtatgaaactgtccgggagaccttatagacacatgggcgtcctaggaaccagcaagttatatgatattaggaaaacaatatttaccttcaccccacaattcatcgatcagcagcagttctatcttgctcttgacaataaaatgattgtagagatgctgcgcaccgacctgagctacctgtgtagtcgctggcggatgacgggacagccgacaatcaccttcccaatcagccatagtatgctcgatgaggacgggacgagcctgaattcttctatcctggccgctctgagaaaaatgcaggatggctattttgggggtgcccgagtgcaaaccggcaagctgagcgagtttttgactacctcttgctgtacacacctgtcttttatggatcccggtcctgaggggaagctctattcagaagactatgacgataactatgactacctggagtcagggaattggatgaatgactatgattcaacctcacatgcccgatgcggggacgaagttgcccgttatctggatcatctattagcccatactgcgcctcatcccaaactcgcaccaacatcgcaaaagggcggactggacaggttccaagcagcagtccagaccacatgcgatctgatgagcctggtgaccaaagccaaggaactacacgtgcagaatgtacatatgtatttacccaccaaactgttccaggcctcccgtccaagcttcaatctgcttgatagcccccacccccgtcaggagaatcaggtgccctctgttcgcgtagaaattcacctcccaagagaccagagtggagaggtggatttcaaagcgctcgtcctacagctgaaagagacaagtagcctgcaagagcaggccgacatcctgtacatgctgtacaccatgaagggtcctgattggaatacggagctatacaacgaaaggtcggctactgtacgggagctactgacagaactttacgggaaagtgggcgagattcggcactgggggcttatccggtatatatccggcattctgaggaagaaggtcgaggcccttgatgaggcctgtactgatttactaagtcaccagaaacacctgacagtgggactgccccctgagcccagagagaagacaattagtgctccgttgccctatgaagcactgacgcaactcatcgatgaagcatcggagggggacatgtcaatatcaattcttacccaggagatcatggtttacctggccatgtatatgaggacacagccaggtctctttgccgagatgtttaggctcagaatcgggttgatcatccaggtaatggctactgagctggcccacagcttacgttgctccgccgaagaggccaccgaggggctgatgaatctctccccaagcgcgatgaagaacctcctgcatcatatcttgtcaggaaaggagttcggagttgagcggtcagttagacctaccgatagcaacgtgtcgccagcaatcagcatccacgagattggcgctgtcggtgcaaccaaaaccgaacgaactggaattatgcaattgaaatcggagattaagcagtctcctgggacaagcatgaccccatcctccggctccttcccctctgcatatgatcaacagagcagcaaggatagccggcagggccagtggcagaggagacgcagactggatggagctctgaatagagttccggtcgggttttatcaaaaggtctggaaagttctccagaaatgtcacggactttctgttgaaggattcgtcttgccaagttctaccacacgcgagatgactcctggggaaatcaaattttccgttcatgttgaaagcgtcttgaatagggttccgcagcctgagtatcggcaactgttggtagaggccatcctagtcctaactatgttggccgatattgaaattcacagtatcggaagcattattgccgtggagaagatcgtacacattgccaatgatttattcctccaagagcagaagaccctgggtgccgacgatactatgctggccaaagaccctgcctctggaatttgcacgcttctgtatgattcggccccatccggacgcttcggcacaatgacttaccttagtaaagccgctgccacctacgtgcaggagttcctcccccactctatttgtgccatgcagtag

SEQ ID NO: 235025 - DNA, 3723 bp, synthetic construct
  misc_feature 1..3723: note = Description of Artificial Sequence: Synthetic coding sequence
  source 1..3723: mol_type = other DNA
atgcggtcacggagtaactcaggggtgcggctggatggatatgcacggctggtgcaacaaacgatactgtgccatcaaaatccagtgactggcctgctcccagccagttatgatcagaaggatgcctgggtacgcgataatgtgtatagcattctggctgtctggggtctgggcctcgcttaccggaagaacgctgatagggatgaggataaggccaaggcttacgagttggaacaatccgtggtgaagctcatgaggggtctgctccactgcatgattagacaggtcgacaaggtggaaagctttaagtactcacagagtaccaaggatagtttgcacgccaaatataatacaaagacctgcgccactgttgttggcgacgatcagtggggccacctacagctcgatgcaacgtccgtgtatctgctgtttctggcccagatgacggcttctggcctacacataatccatagtctagacgaggtgaatttcatacagaatctggtgttctacatagaagcggcatacaagacggccgattttgggatctgggaaaggggcgacaagaccaaccaaggaatcagcgagcttaatgctagctctgtgggcatggctaaggccgcactggaggctctggacgaactcgatctctttggggtgaaggggggtccacagtctgttattcatgttttagcagacgaagttcagcactgtcagagcattctaaattccctcctgccacgtgccagtacttccaaagaggtagacgcttccttgctgagcgttgtatccttccccgcatttgctgtggaggattctcaactggtggaactcaccaagcaggagatcattacaaagcttcagggtcgctatgggtgctgccggtttctgagggacggttataagacgccaaaggaagatcctaaccggctttattatgaaccagccgaacttaagctgttcgagaatattgagtgcgaatggccgctattttggacgtactttatcctcgatggcgtgttcagcggaaatgctgagcaggttcaggagtacaaggaggcgctggaagctgtactgatcaaaggaaagaatggggtacccctgcttccggaactctattcagtgcctccagatcgcgtggatgaggaatatcagaatccccacaccgtggaccgggtgcccatggggaagttaccccatatgtggggacagagtttgtacatattgggctctcttatggctgaaggatttttggcgcctggcgagatcgaccctctgaaccggagattcagcaccgtgcccaagcctgatgttgtggtgcaggtgagtattctcgcggagaccgaggaaataaaaactatcctcaaggataagggcatctatgtggagactattgcagaggtgtaccccatccgcgtccagccggctcggatcctctcccacatttactcatcactgggatgcaacaatcgaatgaaactgtccggaagaccctacagacatatgggcgtgctgggcacttccaaattatacgatatacgcaaaaccattttcactttcaccccacagttcatcgaccaacagcaattctatctggccctggataacaagatgatagtcgaaatgctcagaactgacctttcctacctgtgctccagatggcgaatgactgggcagccaacaatcacattcccaattagccacagcatgctggacgaagacggaacatccctgaatagctctatccttgctgctttgcgcaaaatgcaggatggctattttggaggagctagggtacagactggcaaattgtccgagttcctcactacatcctgttgcactcatcttagcttcatggatcctggaccagagggaaaactttacagtgaggactatgatgacaattatgattaccttgaaagcgggaactggatgaatgactatgatagcacctcacatgcacgatgtggagatgaagtagccaggtacctcgaccacctactggcccacaccgccccacacccgaagctggcccctacttcccagaagggtgggctcgacagattccaagccgcagtccagactacatgtgatctcatgagcctggttacaaaggccaaagaactacacgtgcagaacgtgcatatgtatctgcccactaagctcttccaagcgagtagaccttcttttaacttgcttgacagtccacaccccagacaggagaatcaagtgcctagtgttcgtgtagagatccatctccctagagatcagagtggcgaggtcgactttaaggccctggtcttacagttgaaggaaaccagttcccttcaggagcaggccgacattctctatatgctttataccatgaaaggacccgactggaacactgagctgtacaacgaaagatccgccaccgtgcgggaactgctcacggagctctacgggaaggttggggagatccggcactggggtcttattcgttacatatccggaatcctgagaaaaaaggtcgaggctctcgacgaagcctgtacagaccttctcagccatcagaagcaccttaccgtgggactccctcctgagccccgagagaagaccatctcggccccactgccatacgaggctctcacccagcttattgacgaggcatctgagggcgacatgtcaatcagcatcttgacccaggagatcatggtttatctggctatgtacatgcgaacccagcccggattgtttgcagagatgtttcggctccggattgggttaatcatccaggtgatggccaccgagctcgcccacagcctgcggtgtagtgctgaggaagctacagaaggattgatgaatttgtccccctcagcaatgaagaatttgctccaccatattctgtccggtaaagagttcggtgttgagagatcagtcaggcctacggattccaatgtgtctcccgcaatcagtatccacgaaattggggcagttggcgctaccaagacagagcgcacagggattatgcagcttaagtcagaaatcaaacaagttgagttccggagactctcaatttcggccgaaagccagagcaatggcggtcatcccttaggaatcgacctgatgagccctagcttcatgagccctggaacatccatgactccttcctccggatcatttcccagcgcatatgatcagcagtcaagcaaggactcccgccaaggccaatggcagcgacgcaggaggttagacggggcactgaaccgcgtaccggtaggattctaccagaaggtctggaaagtacttcaaaagtgtcacggtctgtccgtggagggctttgtgcttcctagtagcaccacccgggaaatgacgcccggtgaaataaagttttccgttcatgtggagagcgtgttgaacagagtgccacagcccgagtacaggcagctgttggtagaggcaatactggtcctaaccatgctggccgacatcgagattcacagcattggcagcatcatcgctgtggaaaagattgtccacatcgctaacgatctgtttctccaagagcagaagacattgggcgctgatgatacaatgctggctaaagacccagcatcaggtatctgtacacttctctatgactcagcgccatctggcagattcgggaccatgacatacttatctaaagccgctgctacgtatgtgcaggagttcctaccacacagcatctgtgctatgcagtag

SEQ ID NO: 235026 - DNA, 3672 bp, synthetic construct
  misc_feature 1..3672: note = Description of Artificial Sequence: Synthetic coding sequence
  source 1..3672: mol_type = other DNA
atgcgctcgcgtagcaacagtggggtgcgcctggacgggtacgcccgtttagtgcagcaaacgattctctgccaccagaaccccgtcaccggcctgctccccgcttcctacgaccaaaaggacgcttgggtcagggataatgtctactctatactggctgtgtgggggcttgggcttgcctacagaaaaaacgccgacagggatgaagacaaagctaaggcctatgaattggaacagtccgttgtcaaattgatgagaggactcctccattgcatgatccgtcaggtcgacaaggtcgaaagcttcaaatactctcagagtacaaaagactctctccatgccaaatacaacactaaaacctgtgcaacagtggtcggtgacgatcaatggggccatctgcaactagacgcgacgagcgtttatcttctgtttctcgcgcagatgacagcctctggcctccacatcattcatagtttagacgaggtcaacttcatccaaaacctggtcttttatattgaggcagcatataaaaccgctgatttcggcatctgggaacgaggggacaagactaatcaggggatatcagagctgaacgccagcagtgttgggatggccaaagcagccctggaagctctggatgaactggacctttttggagtgaaagggggaccacagtcggtgatccatgtgctagcggacgaagtccaacactgccaatcaattctcaactctttgctgccaagagcaagcacaagtaaggaggtcgacgcttccctgctgagcgtggtttcctttcccgcattcgcagtagaggatagccagctggtcgagctcaccaaacaagagatcataacaaagcttcagggtcgctacgggtgttgtcgttttctgagagatggttataagaccccaaaggaggaccccaatcgtctgtactatgagcccgctgaactcaagttgtttgaaaatattgagtgtgagtggcccctgttttggacatatttcatcctcgacggggtgttcagtggcaatgccgagcaggtgcaggaatacaaggaagctctcgaggctgtcctcatcaaagggaagaacggggtgccactcctgccggaactgtactccgtcccccctgatagggtggacgaagaataccagaatccccacactgtcgaccgggttcctatgggcaaactgccccacatgtggggccaatccttatacattctgggctcacttatggctgagggcttcctggcaccgggagagatcgacccgctcaacagaagattcagcaccgtgcctaaacccgatgtagtagtgcaggtctccatcctggcagaaaccgaggagattaagactattctgaaggacaagggaatttatgttgagaccatcgcagaggtgtatcccatcagagtgcaacccgctaggatcctttcccacatctattctagtttgggctgtaataacagaatgaagctcagcggaaggccttacaggcacatgggggtgctcggtaccagtaaactctatgacattaggaaaacgatctttacttttactccgcagttcatcgaccagcaacaattctatttggctctggataataagatgatcgtggagatgcttcgcacagacctgagttacctatgttcacgctggaggatgaccggccagcctacgatcacattccctataagccattcgatgcttgacgaagacggaacttcacttaacagtagtattctggctgccctgcgcaagatgcaagacggctacttcgggggagcacgagtacagacaggcaagctgtctgaattcttgacgacaagctgttgcacccacctaagcttcatggatccaggacccgagggtaagctgtactccgaggactatgacgacaactacgattaccttgagtccggcaattggatgaacgattacgactcgacctcccacgccaggtgcggcgatgaggtggcgagatatctggatcatcttctggctcacactgccccacaccccaagttggctcccaccagtcagaaagggggactggatcggtttcaggcagctgtgcagactacttgcgatctgatgagtctggtcacgaaggcgaaagaactccatgtccagaatgtccacatgtacctgccaacaaagctttttcaggcatccaggcccagcttcaatttactcgattccccgcatcctcggcaggaaaaccaagtgccaagcgttcgggtagagatccatctgcctagagatcaatcaggcgaggtcgattttaaggcactagtcctccagctaaaggagacctcgtctctgcaagaacaggccgacattctttacatgctgtatactatgaaaggacccgattggaacaccgagctgtataacgagcggtccgccaccgtccgtgaacttctcacagaactttacggaaaggtaggcgaaattcggcattggggcctgataagatatatatctggcattcttaggaaaaaggtggaagccctggacgaggcttgcacggatcttctatcccaccagaagcacctcacagtgggtttgcctccagaaccgagggagaagaccatatccgctccacttccttacgaggccctgacacagttgattgacgaagcgtcagagggtgatatgtctatttcaatacttacccaggagatcatggtttatctggctatgtacatgcggactcagcctggcctcttcgccgaaatgttccgtctgcggataggactgattattcaagtaatggctaccgagctggcccatagcctgcggtgtagcgctgaggaagctacggagggtcttatgaatctcagtccttcagctatgaaaaacctcctgcaccatattctgtctggcaaagagttcggggtcgaacgctcagtgaggcccactgacagcaatgttagtccagccatctccatacatgagattggcgctgtgggcgctacaaaaacagaaaggacaggaatcatgcagctgaaaagcgaaatcaagcaggtggaatttcgacgactgagcatctccgccgaatcgcagtctccgggaacctcaatgaccccaagctccggaagtttcccatctgcctacgatcagcagtcatccaaggactcacgccaagggcagtggcagcggaggagaaggcttgatggggctctaaacagagtgccagtcggattttaccaaaaagtgtggaaggtacttcagaaatgccatgggctgtcggtggaaggctttgtgctaccttcaagtacaactcgggaaatgacacccggagagatcaaattctctgtgcacgtagagtcagtcctaaacagagttcctcagccagagtatagacaactgctggtcgaggcaattctggtcttgaccatgctagccgacatcgagattcacagtatagggtccatcatagccgttgaaaagattgtccatatagccaacgatcttttcttgcaggaacagaaaactctaggcgcagatgacaccatgctggctaaggaccccgctagcggtatctgtactctgctgtatgacagtgccccatctggcagattcggcaccatgacgtacctaagtaaggccgctgcaacgtatgtacaagagtttctgccacactcgatttgtgctatgcagtag

SEQ ID NO: 235027 - DNA, 3546 bp, synthetic construct
  misc_feature 1..3546: note = Description of Artificial Sequence: Synthetic coding sequence
  source 1..3546: mol_type = other DNA
atgcggtcacgatcaaactcaggggtccgtctggacggctatgctaggcttgtgcagcagacaatcttatgccatcagaatcctgtgaccggcctgctgcccgcaagctacgaccaaaaggatgcctgggtccgggacaatgtgtacagcatactggctgtctggggcctcgggctggcatatagaaaaaacgccgatcgggacgaagacaaagctaaagcctacgagctggagcagtccgtggtgaagttgatgagggggctgctccactgtatgattcgtcaagtggataaggtcgagtcctttaagtactcccagagcactaaagatagcctgcacgccaagtataacactaagacatgtgcaactgtggtgggcgatgaccagtgggggcatttgcagctggatgctactagcgtttatctgctcttcctggcccagatgactgccagtggactccacatcatccatagcctcgacgaggttaatttcatccagaatcttgtgttttacatcgaggctgcatataaaacagccgacttcggtatctgggaacggggtgacaaaaccaatcagggcattagtgagctgaacgcaagcagcgtagggatggccaaagcagcactcgaggcattagatgagctggacctgtttggtgttaaaggagggccacagtcagtgatccatgtcctggccgatgaagtgcaacattgtcagagcattctgaactctcttttaccacgcgcatccacttcaaaggaagtggatgccagcctcctaagcgtcgtgagctttcccgcttttgccgtagaagactcgcagctggtcgagctgaccaaacaggaaataattaccaagctacaggggcgatatggttgctgtcggttcctgagggacggatataaaactccgaaagaggatccaaacaggctgtattatgagccagcagagctaaagttgttcgaaaacatcgagtgcgagtggcctctgttctggacctattttattctggacggcgtattcagcggtaatgcagaacaggtccaggagtataaagaagcactggaggctgtcctgattaagggcaaaaacggtgtgccactgctcccagagctctattcagtcccgcctgaccgggtggatgaggagtatcagaacccccacaccgtggatcgagtccccatgggcaagttgcctcacatgtggggccagagtctttatatcttgggatctctgatggcagaaggttttctggcacctggcgagatcgaccctctcaaccgtaggtttagtacggtcccgaagccagatgtggtcgtgcaggtgtctattctggctgagactgaagagataaagactattttaaaagacaaagggatttatgtggagaccatcgccgaggtgtaccccatccgtgtgcagcctgccaggatcctctcccacatctattcctccttaggctgtaataatcgaatgaagctgagcggccgaccctataggcatatgggggtgctgggtaccagcaagttgtacgatattaggaagacaatattcaccttcacccctcagttcatcgaccagcagcaattttatttggcactcgacaacaagatgatcgtggaaatgctgcgcactgatctgagctacctctgtagcaggtggcgcatgaccgggcagcctaccattacattccccatttcccattcgatgctggatgaagacggaaccagcctgaactcaagtatactggctgccctcagaaaaatgcaggatggctatttcggaggggcaagagttcagacaggcaagctgagcgagtttttaacgactagttgctgtacacacctctccttcatggatcccggtcccgaggggaagttatatagtgaagactacgacgacaactatgactacctggaaagcggcaactggatgaacgactatgatagcacgtcacacgacgtgcatatgtacctacctacgaagctttttcaagctagccgtccatcatttaacctgcttgactctccgcatcccagacaggagaatcaggtccccagcgtgcgtgtggagatccacttacctcgggaccaatccggcgaggtagattttaaagccttggtgctacagctgaaagaaacatcctcactacaggagcaggctgatattttatatatgctctataccatgaagggtcccgattggaacacagagctgtataacgagaggagtgccacagtaagggaactgctaacggagctgtatggtaaggttggggagattagacactggggcctgataagatacatttcaggaatcctcaggaaaaaggttgaagcgctcgacgaagcttgcacagacctccttagccatcagaagcacctgaccgtaggattgccccctgaaccacgggagaagaccatctctgcccctctgccgtatgaagcccttacacagctcatcgacgaggcctccgagggcgacatgtctataagtatcttgactcaggaaattatggtctatctcgccatgtacatgagaactcagcccggattattcgctgagatgtttcgtttgcggatcggcttgattatacaggtgatggctacagagctagcccatagcctcaggtgtagcgcagaggaagctactgaggggctgatgaacttatcaccctcagccatgaagaaccttctgcaccatatcctctccggcaaagagttcggtgtggaaaggagtgtgagacctacagatagtaacgtgtcaccggcaatttctatacacgaaattggcgcagtcggggcaactaagacagaacggacaggcatcatgcagcttaagtccgagattaaacaggtagagtttcggagactatcaatttcagcggagtctcagtcaaacggtggtcacccgcttggcattgacctgatgtcccccagtttcatgtcccctggtacatcaatgaccccttcctccggatcctttccttcagcctacgaccaacagagctcaaaggattcaagacagggccaatggcagagacgcaggcgccttgatggtgctctcaaccgggtgccggttgggttctatcaaaaagtttggaaagttctccagaaatgccacggactcagcgtggaaggattcgtacttccaagttccaccaccagggagatgacccctggagagatcaaattctctgtgcacgttgagagtgttctgaacagagtcccccagcccgagtatagacagctcctggtggaggccattctggttttaaccatgctggcagacatcgaaattcactccatcggcagcataatcgcagtcgagaagattgtccatatcgcaaacgacctgtttttgcaggaacagaagaccctcggggctgacgataccatgttggctaaggaccccgcatccggcatttgcacgctactctatgattcggcaccaagcggcagattcggaaccatgacttatctatccaaagccgcagctacctacgtgcaggaattcctgccccactccatatgtgctatgcagtag

SEQ ID NO: 235028 - DNA, 3456 bp, synthetic construct
  misc_feature 1..3456: note = Description of Artificial Sequence: Synthetic coding sequence
  source 1..3456: mol_type = other DNA
atgaggagccgatctaattcaggagttaggttagacggctatgcccgacttgtgcagcagacgatactgtgccaccagaatcccgtgacaggcttgctcccggcatcttacgaccagaaggatgcatgggtgcgggacaatgtctactctattctagcagtgtgggggctgggcctggcctacaggaagaacgccgaccgcgacgaagacaaggccaaagcttacgaactggagcagagcgtggttaaactgatgaggggactgctgcactgtatgattcgccaggtggacaaggtggagtcatttaagtatagtcagagtaccaaggactccttacatgccaagtacaacaccaagacatgtgctaccgtggtcggggatgaccaatggggtcatctacagcttgacgcaacctctgtatatcttttgttcctcgcccagatgaccgcctctggcttacacatcattcactctctcgatgaggttaatttcatacagaatttagtgttctacattgaggctgcatataagacagctgactttggcatctgggaaagaggcgacaagactaaccagggcataagtgagttgaacgcctcatcagtcggtatggccaaagcggcactggaggctctcgatgagcttgacctcttcggggtcaaaggcggacctcagtctgtaattcatgttctcgctgatgaagtccagcactgtcagtctatcctgaactccctcttgcctagggcgagcaccagtaaagaagtggacgcatcgctgcttagcgtcgtcagtttcccggctttcgccgtggaggattcacagctcgttgagctcaccaaacaggaaatcattacaaaacttcagggcaggtacggctgttgccgctttttgagggatgggtacaagaccccgaaggaggatcccaataggttatactacgagcccgcagagctcaagttgttcgagaatatcgaatgtgagtggccgttattctggacttattttatcttggacggcgtgttttccggaaatgccgaacaggtgcaggagtataaagaggctctggaagccgtactgattaaaggaaaaaacggagtcccactgctgcccgagctttattccgtgccccctgacagagttgacgaggaataccagaatcctcatacagtggatcgggtgcccatggggaagctaccccacatgtgggggcagagcctctacatcctgggcagcctgatggctgaaggtttcctggcaccaggagagatcgaccctctcaaccgtcgctttagcacagtcccgaagcccgatgtggtggtccaggtgtctatcctggccgaaaccgaggaaattaagactattctgaaagataaggggatttacgtggagaccatcgctgaggtataccctattagagtgcagccggcaagaatcctctctcacatctactctagcctcggctgcaataaccggatgaaactatccggacgcccatacagacacatgggggtgcttggaacttccaaactctacgacatccgcaagactatattcacattcacccctcagtttatagaccaacagcaattctacttggccttagataacaagatgattgttgagatgcttcgtacagacttgtcttatttgtgtagccgttggagaatgaccggtcagcctactataacatttccaatcagtcatagcatgctcgacgaggatggaacgtctcttaattctagcatcctcgctgctctgcgaaagatgcaagacggttattttggcggagcccgtgtccagaccgggaagctcagcgaattcttaaccacaagctgttgtacacacctgagcttcatggacccaggacccgaaggaaagctctatagcgaggattatgacgacaactatgattacctggagagtggcaactggatgaatgattacgattctacttctcacgatgtccatatgtatctaccaaccaagctgtttcaagcatcccgcccttcttttaatttgttggactccccacacccgagacaagaaaaccaggtccctagtgtccgcgtggaaattcacctgccccgtgatcagtccggcgaggtggattttaaggcactcgtattacagttaaaggagacgagctccctgcaagagcaagcagacatcttgtacatgctgtacacaatgaaggggccagattggaataccgagttgtacaatgaacgatcggcgaccgtgagagagctacttacggagctgtacgggaaagtgggagagatcaggcactgggggctgatccggtatatctctgggatacttaggaagaaggtggaggcgctcgatgaagcgtgcacagatctcctgagccatcaaaagcatctgacggtgggactccctcccgagcccagagagaagactatttccgcccctctgccctatgaggccttgacacagctaattgatgaggcttccgaaggggacatgtcgatctctatcctgacacaggaaatcatggtctacctggcaatgtatatgcgaacacagcccggtctcttcgccgaaatgtttcgactgcgcatcggacttattatccaggtaatggcaaccgagttagctcactcactgagatgtagcgccgaggaagccacagaggggctaatgaatctgagcccttctgctatgaagaatctgctccatcatattctctccggcaaagaatttggtgtcgaaagaagcgttcgacctaccgatagtaacgtctctcccgctatttcaatccacgaaattggcgctgtaggagctactaagacggaacggaccgggattatgcagcttaaatccgagattaagcagtccccaggaaccagtatgacaccatcaagtggttctttcccatctgcatacgatcagcagtccagtaaggatagccgacaaggccagtggcagaggcgccgacgtttggacggagccctgaaccgggtgcccgtggggttctaccagaaagtgtggaaggtgttgcagaaatgtcacggattgtccgtagaagggttcgtgctcccatcatcgacaaccagagaaatgactcccggagaaattaaattttccgtgcacgtagagtcagtcttaaaccgggtgccccagccagaataccgccagctgttggtagaagctatcctggtccttacaatgttggcagacattgagatccatagtatcggcagtatcattgcagtggagaagattgttcacatcgcgaatgacttgtttcttcaggaacaaaagaccttaggtgcagacgacaccatgcttgctaaagaccccgcaagcgggatctgcacacttctttacgattccgccccatccggaagattcggcaccatgacttatctgtcaaaagccgctgcgacctatgtccaggaattcctgcctcattcaatttgcgctatgcagtag

SEQ ID NO: 235029 - DNA, 1164 bp, synthetic construct
  misc_feature 1..1164: note = Description of Artificial Sequence: Synthetic coding sequence
  source 1..1164: mol_type = other DNA
atgacccgagacgaagccctgcccgattcccattcagcccaagatttctatgaaaattacgagcctaaagagatactgggtcgcggtgtctcaagcgttgtgcggaggtgcattcataaacccacttcccaggaatacgccgtgaaggttatcgacgtgactgggggaggctccttctcacccgaggaagttcgggaactccgtgaggcaaccttaaaggaagtcgatatcctcagaaaggtgagcggccacccaaatatcatccagcttaaagatacctacgagaccaatacctttttctttctggttttcgatcttatgaagagaggagagttgttcgattacctaactgaaaaggtgaccctgagcgaaaaggaaacacggaaaattatgagggctcttcttgaagtcatctgcaccttgcacaaactcaatatagtccaccgtgatctgaaacccgagaatattcttctggatgataacatgaacataaaactgaccgactttggcttctcttgccagctcgagccaggggagagactgcgcgaagtctgcggcactccaagctatctggcccctgagatcattgaatgttctatgaatgaagatcacccgggatatggcaaggaggtggatatgtggtcaacaggagtaatcatgtacaccttattggctggatcaccacccttctggcacagaaagcagatgctgatgttaaggatgatcatgtctggaaactaccagttcggcagtcctgaatgggatgactattcagacacagtcaaggatctcgtatctcggtttcttgtggttcagccacagaaccggtatactgccgaggaagctctggcccaccccttttttcagcagtatctggtggaggaggtccgccactttagcccccgagggaagtttaaggtgatcgccctcaccgttctggcctctgtgcgcatttattatcagtatcgccgagtcaagcccgttacacgcgaaatcgtgattagggatccatacgcactccgtcccctgaggcgactcatagatgcatacgcttttcgcatctacggacactgggtgaaaaagggacagcagcagaacagagcggcactgtttgaaaacacaccgaaagctgtgctgctcagcttagccgaggaagactattag

SEQ ID NO: 235030 - DNA, 1260 bp, synthetic construct
  misc_feature 1..1260: note = Description of Artificial Sequence: Synthetic coding sequence
  source 1..1260: mol_type = other DNA
atgactcgagacgaggctctgccagactcacactcggctcaggacttttacgagaattatgagcctaaagagatcctaggccgtggagtctcgagtgtggtccgccgatgtatccataagccgacgagccaggagtacgctgttaaagtaattgacgtgaccgggggagggtccttctcgcccgaagaggttcgagagctccgagaagcgacactcaaggaggtagacatcctccggaaggtgtctggccatcccaacatcattcagcttaaggacacctatgagacaaacacctttttttttctggtgttcgatctatgggaagatacagacaccatggaaatggaacagaaatggtgtctcggctgggattctcccaaaagcaccaacttccgcgcacagggtagggccaggatgaaaaggggggagctgttcgactacctgactgagaaagtcacccttagtgagaaggagacccgtaagatcatgcgagccctcctcgaagtgatctgcacactgcataagctgaatattgtgcacagggatcttaaacctgagaacatcctgctggacgataatatgaacattaagttaaccgacttcggattttcatgccagcttgagcctggagaacgtctgagagaagtttgtggcacgccaagctatctggcaccagaaatcattgaatgcagtatgaacgaggatcatcctggatatggcaaggaggtggatatgtggagcaccggagtgataatgtacactctgctcgcagggtcgccgccattttggcacagaaagcagatgttgatgctgagaatgatcatgagcggcaattatcaattcggaagccctgaatgggacgactactcagacacagtaaaagatcttgtctcccgatttctcgtggttcagcctcaaaacagatataccgctgaggaggccctggcccacccgttcttccagcagtatcttgtggaggaggtacggcacttctcgcctagaggcaaattcaaggtcatcgccctgactgtcctcgcctccgtgaggatctattaccagtatcgaagagtcaagcccgttacgagggaaattgtgattagagacccctacgctctgcggcctctgaggcgcttaattgatgcgtatgcatttcgcatatacggccactgggtcaaaaaaggtcaacagcagaaccgcgctgccttgttcgagaacaccccaaaagccgtccttctctctttggcagaggaagactactag

SEQ ID NO: 235031 - DNA, 1002 bp, synthetic construct
  misc_feature 1..1002: note = Description of Artificial Sequence: Synthetic coding sequence
  source 1..1002: mol_type = other DNA
atgcacccccaggcccacgagcccggagtgaggcgggagggacatcgacgccatagatggcggcagctccagccaggtggaggcgctggagccgctagaagccacgccgagggaggcggtcaccccgctcaagggctgcgggcaccacagcatcagatgaaaagaggcgaactgttcgactatctcactgagaaggttactctatctgagaaggagaccaggaaaattatgcgcgcattgctggaggtcatctgtacactgcataagctgaacattgtccacagggatctgaagccagaaaacattctgttggacgataacatgaatatcaagttaactgattttggttttagctgtcagctggaaccaggcgaaagactgcgggaggtgtgcggaacgcccagctacttggcccctgaaatcatcgagtgttccatgaacgaggatcatccgggttacggaaaggaagtcgatatgtggtccacaggcgtcatcatgtatacccttctcgcaggtagtccgcctttttggcataggaaacagatgttaatgctcaggatgataatgtccggcaattatcagttcgggagcccagagtgggatgattacagcgacactgtgaaagacttagtgagtaggtttctggtagtgcagccgcagaaccgctacaccgctgaagaggctctggcacaccctttttttcaacagtacctagtggaagaggttcgtcatttcagcccgagggggaaatttaaggtgatcgctctgaccgtgttggcttctgtgcgaatctactatcagtaccggagggtgaagcccgtgactcgcgagatcgtgattagagacccatatgcactccgaccactgcgcaggctcatcgatgcctacgcctttcgtatctacggacattgggttaagaaggggcagcagcagaaccgtgccgctttgtttgagaatacaccaaaggcagtccttttgtctttggccgaggaggactattag

SEQ ID NO: 235032 - DNA, 2529 bp, synthetic construct
  misc_feature 1..2529: note = Description of Artificial Sequence: Synthetic coding sequence
  source 1..2529: mol_type = other DNA
atgagcaggcctctgagtgaccaggagaagagaaagcagatttctgtccgaggtctggctggagtcgagaatgtgactgagctgaagaaaaattttaataggcaccttcactttacactggtgaaggatagaaacgtggccacgccgagggactactactttgcattggctcatactgttcgcgatcacctggtcggtagatggatcagaacgcagcagcactattatgaaaaagatcctaagcggatttattacctctccctggaattctatatgggcagaaccctccagaacacaatggtgaacctggctctggaaaacgcatgcgacgaagccacctatcaacttgggttggacatggaggaattggaggaaatcgaggaagacgccggactgggcaacggcggattaggtaggctggcagcatgctttttagattccatggcgacgttgggtctggcagcatatggctatggaattcgctacgagtttgggatcttcaatcagaaaatctcagggggatggcagatggaggaagctgatgattggctgagatacggaaatccttgggaaaaagctcggccagagtttacgttgcctgttcacttttacgggcacgtggagcatacttcacagggtgctaaatgggtggacacccaggtcgtgcttgctatgccttatgacacaccagtgccgggttacaggaataatgtggttaacacaatgcggttatggtccgcaaaggctcccaatgactttaatctgaaagattttaatgtggggggatacatacaagctgtattggatcgcaatttggcagagaatatcagccgagtgttatacccaaacgacaatttctttgaaggaaaggaactgcgtctgaagcaagagtatttcgtcgtagcagccacccttcaagatattattcgacgatttaaaagttccaagttcggctgccgcgaccccgtcaggacaaatttcgacgcgttcccggacaaggtggctattcagttaaacgacacacacccttccctggcaattcccgagctgatgcggatcctggttgatctggagcgcatggactgggataaggcttgggacgtgaccgttaggacctgcgcctacactaatcataccgtcctccccgaagcacttgaacggtggcctgtgcatctgcttgagactttattaccaaggcacctgcaaataatttacgaaatcaaccagcggttccttaaccgggtcgccgctgctttccctggcgatgttgaccgcctgcggcgaatgagtctcgttgaagaaggcgctgtcaaacggataaatatggcacacctgtgtattgctgggtcccacgcagtgaacggcgtcgccagaattcattccgagattctgaagaaaactattttcaaggacttttacgagttggaaccccacaagtttcagaacaagacaaacgggatcacgccgagacggtggcttgtcctctgtaatcctgggctggccgaagtgatagcggagcggatcggcgaggactttatttccgatctcgatcagttgcggaaacttctgtcgtttgtggatgacgaggccttcatccgggacgtagctaaagtgaaacaggaaaataagttaaaattcgccgcttatctggagagggagtataaggtgcacattaatccaaatagcctctttgacatccaagtgaagagaatccacgaatacaagcgtcagcttcttaactgtctccatgtgatcaccttatacaacagaattaaacgcgagcccaacaagttttttgtgcctcggactgtaatgatcggaggcaaggctgctccaggctatcacatggcaaaaatgattatacgtcttgtcaccgccatcggcgacgtagtgaatcatgacccagccgtcggtgacagactgcgggtgatatttctcgagaactaccgagtgagcctggctgagaaggttatccccgctgccgacctttcagagcagatcagtactgccggaaccgaggcttccggcactggcaacatgaagttcatgctcaacggtgctctgactatcgggacaatggatggcgctaatgtggaaatggctgaagaggccggagaggaaaatttctttatctttggcatgcgcgttgaagacgtcgacaagctagatcagaggggatataacgcccaggagtattatgacaggatcccagaactccgccaggtgattgaacagcttagttcaggatttttcagccctaagcaacctgacctattcaaggacatcgtgaatatgcttatgcaccacgatcggttcaaggtatttgcggactacgaagactacatcaagtgccaagagaaggttagcgccttatataagaatccccgagagtggacccggatggtgattagaaatatcgccacaagtggaaagttttcatctgatcgtacaatcgcgcagtacgcaagagaaatatggggcgtagagccgtcacgccaaagacttcccgcacctgatgaggccatttag

SEQ ID NO: 235033 - DNA, 2499 bp, synthetic construct
  misc_feature 1..2499: note = Description of Artificial Sequence: Synthetic coding sequence
  source 1..2499: mol_type = other DNA
atgtccagacccctgagcgaccaggagaaacgtaaacaaatctccgtccggggactggccggagtcgagaacgtcacagagctcaagaaaaactttaaccggcatctgcacttcacactggtgaaagaccgcaacgtggctacacccagggattactatttcgcacttgcgcacactgtgcgcgaccatttagtcgggagatggattcggacacagcagcactactacgaaaaagatcccaaacgcatctactatctctccctcgagttctacatgggcagaacactacagaataccatggtgaacctcgcactagagaatgcctgtgacgaggccacatatcaggtgggactgggcagattagctgcctgctttctcgacagtatggccacacttgggctggccgcttacggctacggtatccgctatgagttcgggatttttaatcagaagatatccggcggttggcaaatggaggaggccgatgactggctacggtacggtaatccatgggagaaagccaggcccgagttcactttgcccgtacatttctacgggcatgttgaacatacttcccagggcgcaaagtgggttgacactcaggtggtgctggcaatgccctacgacacacctgtcccgggttacagaaataacgtggttaacacaatgagactttggagcgcgaaagctccaaatgatttcaacctaaaagacttcaatgtggggggatacattcaagccgtcttagacaggaacctggctgaaaacattagcagagtgttgtatccaaatgacaactttttcgagggcaaagaactacggctgaagcaggagtatttcgtcgtggcggcaaccctgcaagatattatcagacgctttaagtcatcaaaattcggttgccgcgaccccgtgaggaccaactttgacgctttcccagataaggtcgctatccagttaaatgacactcacccgtcactggccattcctgagctgatgagaatcctcgtcgacctggagcggatggactgggataaggcttgggacgtgacagttaggacatgcgcctacactaaccacacagtgctaccagaagcactggagaggtggccggtacacctcctggagacactgctgccccgacatctgcagatcatttacgaaataaatcagcggtttctgaatagagtagcggctgcttttccaggggatgtcgatcggctgcgacggatgtctctggtggaagagggcgctgtgaagcggattaatatggcacacctatgcatagcaggctctcacgctgttaacggagtggcgaggatccactccgaaattctgaagaagacaatctttaaggatttctacgaacttgagccccataagttccaaaataagaccaacggaattacacccaggcggtggctcgtcttgtgtaatccaggattagctgaggtcattgccgagaggatcggcgaagatttcattagcgacctagaccagctgcgtaaactgctctcattcgtggatgatgaggcatttataagggacgttgcaaaggtaaaacaggagaacaaattgaagttcgccgcatatctggaaagggaatacaaggtccacatcaacccaaattccttgttcgacatccaagttaaacgtattcacgagtacaaacgacagctgctgaattgcctgcacgtaattacactgtacaaccggatcaaaagagaacctaacaaatttttcgtgcctaggacagtgatgatagggggtaaagcagcacctggttatcacatggccaagatgattatccgtctggtgaccgcaattggcgacgtcgttaatcatgatcccgctgtgggggatcgccttagggtgatctttttagagaactatagggtgtctctcgcagaaaaggtgattccggctgcggatctttctgaacagatttcaacagcaggcactgaggcctctggaaccggaaacatgaagttcatgctaaacggtgcactgactatcgggactatggacggcgctaacgtggagatggcagaggaagccggagaagagaatttcttcatctttggtatgagggttgaggatgtggacaagctggatcagcggggttacaacgcccaagagtattacgacaggattccagagctacggcaggtcatcgagcagctttcgtccggctttttttctcctaagcagcctgatctcttcaaggacatagtcaatatgcttatgcatcacgaccgcttcaaagtgtttgccgactacgaagactatatcaagtgtcaggagaaagtttctgctctgtacaagaaccccagagagtggacccgaatggtgattcgcaatattgccacctctggcaaattttcttctgatcggaccatagctcagtacgcccgtgaaatttggggggtggaaccttcccgccagcgcttgccggctcccgcaccacacgcggagggaggcgtgctggagctggacctgtag

SEQ ID NO: 235034 - DNA, 1425 bp, synthetic construct
  misc_feature 1..1425: note = Description of Artificial Sequence: Synthetic coding sequence
  source 1..1425: mol_type = other DNA
atggccaccaattgggggagcctgctgcaggacaaacaacaactggaagagcttgctagacaggccgtcgaccgggcacttgctgagggtgtgttgctgagaacaagccaagaacccacgtcatcggaagtcgtgagctatgctccattcacattgttcccgagtctagtgccctcagcactcttggagcaagcatacgccgtgcagatggacttcaacctgctcgtggatgcggtaagccagaacgctgcgtttctggagcagaccctgagtagcaccatcaaacaagatgactttacagcccgattgtttgacatacacaagcaggtgttgaaggaaggtatcgcccagactgtgtttctgggcctcaaccggtccgactatatgtttcagcggagcgccgacggctccccagcactcaaacagattgagattaacaccatctctgcatcctttggcggacttgcgagccggaccccggcagttcacaggcacgtgctctccgttctgagtaagacgaaggaggcaggaaaaattctaagcaacaacccctctaagggattagccctcgggattgcgaaggcatgggagttgtatggttccccaaacgccctggtgctgcttatagcacaggaaaaggagcgcaatatttttgatcagcgcgcaatcgagaatgaactgctcgctaggaacatccatgtgatccggaggacttttgaggacatctcagaaaagggaagcttggatcaggacaggcggctgttcgttgatggccaggaaatcgccgttgtctattttagggacgggtatatgccaaggcagtactcactgcaaaactgggaagccagactgctgctcgaaagaagccacgctgctaaatgtcctgacatcgccacccaattggcaggcaccaagaaagtacagcaggaattgtctaggcctggtatgctggagatgctccttccgggacagccagaggctgtcgctagacttagagccacgttcgccggactgtacagcctggatgtgggagaagagggtgatcaagctatagcagaggctctggccgctccatctcgattcgtgttgaagcctcaaagggagggtgggggaaataatctgtatggagaagagatggtccaagctctgaagcagcttaaggactcagaggaacgagcttcttatatcttgatggaaaagatagagcctgagccttttgagaattgcctcctgaggccgggaagcccagcgagagtcgtacaatgcatttcggagctggggatttttggcgtgtatgttagacaagaaaagaccttggtgatgaataagcatgtcggccatctgctcaggacaaaggcaatagagcacgccgacggcggtgtcgcggctggcgtcgccgtgctcgacaacccttatccagtctag

SEQ ID NO: 235035 - DNA, 738 bp, synthetic construct
  misc_feature 1..738: note = Description of Artificial Sequence: Synthetic coding sequence
  source 1..738: mol_type = other DNA
tgaaaacaccatcacaccgtgccaccatctgtgacacccaaggcactcgacaggagccctccatgtcctgagatgttcacccgcgcagcccctgggtatcatatggccaaactgattatcaagctggtaacctcgattggagacgtcgtaaatcatgatccagtggttggagatcggctgaaagtgatttttttggagaattaccgcgtttcgctcgcagagaaagtgatcccggcagctgacctaagccagcagatttccaccgccggtacagaggccagtggcacggggaacatgaaatttatgctcaacggtgctttgaccataggcaccatggatggcgctaacgttgagatggccgaagaggccggagcagagaatctcttcatctttggcctcagggtagaagatgtcgaggctctagatagaaagggctataatgcacgagagtattatgatcatctgccagaactgaaacaggccgtggaccaaattagtagtggattcttctctccaaaggagcctgattgtttcaaggacattgttaacatgttgatgcaccacgaccgcttcaaggtcttcgctgattacgaggcttatatgcaatgccaggcccaagtcgatcagctgtacagaaacccgaaagagtggactaaaaaggtcatacggaacatagcttgcagcggcaaatttagcagtgaccgcaccatcaccgaatacgcgagagaaatctggtag

SEQ ID NO: 235036 - DNA, 975 bp, synthetic construct
  misc_feature 1..975: note = Description of Artificial Sequence: Synthetic coding sequence
  source 1..975: mol_type = other DNA
atggacgcccctagacaggtggttaactttggcccaggacccgctaagcttccccacagtgtgctgctggagattcagaaggagctgctagattataaaggggtaggaatctctgtactagagatgtcacaccggtccagcgacttcgctaaaattatcaataatacagaaaatctagtgcgcgagttactggcagtcccagacaactataaggtgatattcttgcaagggggaggctgtggccaattttctgcggtcccgcttaatcttataggacttaaagctggcagatgcgccgactacgttgtgacaggagcatggagtgccaaggccgcagaagaggccaaaaagtttggcaccatcaatatcgtacaccctaagctgggaagttacaccaagatccccgatccctccacctggaacctcaacccggatgctagctacgtatactactgcgctaatgaaaccgttcacggcgtggagttcgattttatcccggacgtcaagggtgccgtgctggtgtgtgacatgtcttcgaacttcctttccaagccagtggatgtgagcaagttcggagtcattttcgccggtgcacagaaaaatgtaggctccgctggggttacggtcgtgattgtgcgagatgatcttctagggttcgctctgagggaatgtccctcagttctggagtacaaggtgcaggctgggaacagctccctctacaataccccaccgtgcttcagcatatacgttatggggttggtgctggaatggatcaagaataatgggggagcagctgcaatggaaaaactcagttcaatcaagtctcaaacaatttatgagatcattgataacagccagggcttttacgtcagtgtgggaggcatccgcgcttcgctctataatgccgtgactattgaagatgtgcagaaactggcggctttcatgaagaagtttctggaaatgcaccaactatag

SEQ ID NO: 235037 - DNA, 1113 bp, synthetic construct
  misc_feature 1..1113: note = Description of Artificial Sequence: Synthetic coding sequence
  source 1..1113: mol_type = other DNA
atggacgcgccaagacaggtcgttaatttcggtcctggccctgccaagctcccccacagcgtgttactggagattcagaaggaacttctggactataagggcgttggcatatctgtcctcgaaatgtctcacagaagctcagattttgcaaaaatcatcaataacaccgagaatctggtgagagaactgctcgcagttcccgacaattacaaagtcattttcctacagggcggaggttgtggtcagttctcggcagtcccattgaacctcattggactaaaggccggacgctgtgcagactacgtggtgacaggtgcatggtccgccaaggcggctgaggaagctaaaaagttcggcaccatcaatatcgttcatcccaagctcgggagctataccaagattccggacccctccacctggaacctaaatcccgatgcaagctacgtgtactactgcgccaacgaaaccgttcacggagtggagtttgacttcatccctgatgtgaagggagccgtcctggtgtgcgatatgagcagtaattttctgtctaagcccgtcgacgtgagtaagttcggagtgatctttgctggagcccagaaaaatgtgggctctgctggagtcaccgtggtgatcgtaagagacgacctcctagggtttgcactgagagagtgcccgagcgtgttagagtataaagtgcaagcagggaattcctccttgtacaacacccccccttgctttagcatctacgtgatgggcctggtcctggagtggatcaaaaacaatggcggagctgccgctatggagaagctcagctctattaaatcccaaactatttatgagataattgacaactcacagggattctacgtctgtccagtagaaccccagaaccgctcgaagatgaacatcccattccgtatcgggaatgcgaaaggggacgacgctctggaaaaaaggttcctggacaaggctttggaattgaacatgctatcacttaagggacatcgcagcgtgggcggaatccgtgcttccctttacaacgcagtgactatagaagatgttcagaaactggccgcttttatgaaaaaatttttggagatgcaccagctgtag

SEQ ID NO: 235038 - DNA, 585 bp, synthetic construct
  misc_feature 1..585: note = Description of Artificial Sequence: Synthetic coding sequence
  source 1..585: mol_type = other DNA
atgtccagtaattttctgtcaaagcccgttgacgtatcaaagtttggcgtgatatttgccggtgcccagaagaatgtggggtctgccggagtaaccgtagtgattgtgcgcgacgatctgctgggcttcgccctgcgggaatgccctagcgtgttggaatataaagttcaagctggcaattcatccctctacaatacaccaccttgtttcagtatatatgtaatgggacttgtgctcgagtggattaagaataacgggggtgccgcagctatggagaaactctccagcattaaatctcagactatatatgaaatcattgacaacagccaaggattctatgtctgtcccgtggagcctcagaaccggagtaaaatgaacattccatttcgtatcggcaatgcaaagggagacgatgccttggagaagagatttcttgacaaggcattggaactgaacatgctgagcctaaagggccatcggtcagtggggggtatccgagcctccctttataacgccgtcacaattgaggacgtgcagaaactcgctgcattcatgaaaaagtttctagagatgcaccagctgtag

SEQ ID NO: 235039 - DNA, 1050 bp, synthetic construct
  misc_feature 1..1050: note = Description of Artificial Sequence: Synthetic coding sequence
  source 1..1050: mol_type = other DNA
atgtcttcgctctctggaaaagtacagactgttctgggactggtggagccgtccaagctcggtcggactctgacacatgaacacctcgcaatgacgtttgattgctgttattgcccacctcccccatgccaagaggctatttccaaggagcctatagtgatgaaaaacctgtattggattcagaaaaacgcatactcgcacaaagaaaatttacagctgaaccaggagaccgaggccatcaaggaagagctactttattttaaggccaacggaggtggggcactagttgagaatacgacaactggaatctctcgggatacccagacacttaaaaggctagcagaagagacaggcgtccacattatcagtggggcaggtttctacgtggatgcgacccattcttctgagaccagggccatgtcagttgaacagttgaccgatgtgcttatgaatgaaattctgcatggtgccgacgggacgagtatcaagtgcggcatcatcggagagattggctgcagctggccactcaccgaatcggagcggaaggtgctgcaggccaccgcccatgctcaggcccagctggggtgccccgtcattatacatccaggtagatcctcccgggcacctttccagattattcgaattctgcaagaagccggagccgacatttccaaaacagtgatgagccacctggatcgcacaatcctggataagaaagagctgttggaatttgctcagttgggttgttatttagagtatgacctgttcgggaccgaactgctgcattatcagcttggcccagacatcgatatgccggacgacaataaaaggattcgccgtgtgcgtctgttggtggaagaaggatgcgaagatagaatccttgtagcccatgatattcacacgaagacaaggctgatgaagtatgggggacacggctattctcacatcttaaccaacgtggttcccaagatgctgttgagaggcattaccgaaaatgttctcgataagatcctgattgaaaacccaaagcagtggctgacattcaagtag

SEQ ID NO: 235040 - DNA, 1050 bp, synthetic construct
  misc_feature 1..1050: note = Description of Artificial Sequence: Synthetic coding sequence
  source 1..1050: mol_type = other DNA
atgtcatcacttagtggtaaagtgcagactgtgctcggactcgtggaaccatcaaagcttggaagaaccttaacgcatgaacacctggccatgaccttcgactgctgctattgcccaccgcctccgtgccaagaagccatcagcaaagaacccatcgttatgaagaatctctactggatccaaaagaacgcttatagccacaaagaaaacttgcagcttaaccaggagactgaagccatcaaggaggaacttctatacttcaaggctaacggcggaggggctctggtcgaaaatacgaccaccggaatcagtagagacacccagacccttaagaggctggccgaggaaactggggttcacatcatcagcggcgcagggttttatgtggacgctacccacagcagcgagactcgagccatgtcagtggaacaactcaccgacgtactgatgaatgagatattgcacggggctgacgggacaagcattaaatgtggcattattggcgagattggctgctcgtggccgctgacagagtccgaacggaaggtcctgcaggctactgcccacgcccaagctcagctcgggtgccccgtcatcatccaccctggccgatccagccgggcaccttttcaaataatcagaatactacaggaggcgggagcagatatcagcaagaccgtcatgtcccacctggatcggaccattctggataaaaaggagctcctggagttcgcgcagctggggtgctacttggaatacgacctgttcggtactgagcttctccactaccaactagggccagacatcgatatgcctgacgataataaaagaattaggagggtacggcttctggttgaggagggatgcgaagatcggattttagtggcgcatgatatccatactaaaacacgactgatgaagtatggaggccacggatactcacatattttgacaaacgtggttcccaagatgctattacgtggcatcaccgaaaacgtgctggataagatactgatcgagaaccccaagcagtggctgacctttaaatag

SEQ ID NO: 235041 - DNA, 1050 bp, synthetic construct
  misc_feature 1..1050: note = Description of Artificial Sequence: Synthetic coding sequence
  source 1..1050: mol_type = other DNA
atgagttctctgtccggaaaggtccagactgtgttgggactggttgagccctccaagctgggaaggaccctcacccatgagcacttggcgatgacctttgattgctgttactgtccacctcctccgtgccaggaggccatttccaaggagcctattgtaatgaaaaacttatattggattcagaaaaacgcatacagccacaaggagaatctgcaattaaaccaagagacggaggctatcaaagaagagctgctgtactttaaagccaatggaggaggcgctctagtggagaacacaacgaccggcatttccagagacacccaaacactgaagcggctggccgaagagaccggagtgcacattatctctggggctgggttctatgtcgatgctacgcacagtagcgagacgcgggcaatgtctgtagaacagcttactgatgtcctgatgaacgagatactccatggcgctgacggcacatccataaagtgtggcatcatcggagagattggatgcagctggcccctgaccgagagtgaacgaaaggtcctacaagccacagcccacgcgcaggcgcagctgggctgtccagtgatcatacaccctgggcgtagctctcgggctccgttccagattatccggatccttcaggaggcaggcgctgatatttccaaaacggtgatgagccacctcgatcggaccattttagacaaaaaggaactccttgagttcgctcagctgggttgctatctcgagtacgatttgttcggaacggagctgctccactatcaattgggtccggatatcgatatgcccgatgataataaacggatacgtagggttagattgctggttgaggagggctgcgaggataggatcctggtcgcgcacgacattcacaccaagactagactcatgaaatacggcggacacgggtactctcacatccttactaatgtggtcccgaagatgctgctaagggggatcaccgagaatgtacttgacaagatacttatcgagaatcccaaacagtggttgacatttaagtag

SEQ ID NO: 235042 - DNA, 909 bp, synthetic construct
  misc_feature 1..909: note = Description of Artificial Sequence: Synthetic coding sequence
  source 1..909: mol_type = other DNA
atgagcagcctgagcggcaaagtgcagactgtcctaggcctcgtggagccaagcaagctggggcgtacgctgacccacgagcacctggccatgaccttcgattgttgctactgtccccctccaccctgccaggaggcgatcagcaaggaacctatagtaatgaaaaacctgtactggatccagaaaaacgcatacagtcataaggagaatcttcaattaaatcaggaaaccgaggccatcaaggaggagctcctgtacttcaaagccaacggaggcggagcactggtggaaaatactacaaccgggatcagtagagatacacaaaccctcaagcggctcgctgaagagactggagtgcacatcatctctggagcagggttttatgtggatgcaacgcactccagcgagacacgagctatgagcgtggagcaactgacagacgttctcatgaatgagatcttacatggcgctgatggcaccagtattaaatgtggcataattggagaaattggatgttcttggcctctgaccgagagtgagagaaaggtcctgcaggccacagctcacgcacaggcgcagctgggttgtcccgtcattatccaccctggccgatcttcccgcgcacccttccaaataatccgcatactgcaggaggcaggcgcagatatttctaagacggtgatgagtcacctcgatcgcgttagactgcttgttgaggaggggtgtgaggatcgcatactagtagctcacgacatccacaccaaaactcgtctaatgaagtacggagggcatggctattcccatatcttgacaaacgtggtccctaagatgttgttaagagggatcacagagaacgtactggataagatcctgatagagaatcccaagcagtggctcaccttcaagtag

SEQ ID NO: 235043 - DNA, 1050 bp, synthetic construct
  misc_feature 1..1050: note = Description of Artificial Sequence: Synthetic coding sequence
  source 1..1050: mol_type = other DNA
atgtcctctttgagcggcaaagtgcaaactgttctagggctcgtagagcccagcaagcttggacggaccttgactcatgaacacctggctatgacatttgattgctgctactgtccaccccctccatgtcaggaagctattagcaaggagccaatcgtaatgaagaacctgtactggatccagaagaacgcttactcccataaggagaacctgcagttaaatcaggagaccgaggcgattaaggaggaactgctctacttcaaagccaatggcggaggtgctctggttgagaatacaactacgggcatttcccgggacacccagaccctgaaacgcttggcggaagaaaccggagtccacatcatctccggtgcaggcttttatgttgacgccacccactcaagcgagacgagggcaatgtcagtggaacaactaaccgacgtgctcatgaatgaaattttgcatggcgctgatggaacctccatcaaatgcgggattattggggaaataggttgttcctggcccctgactgagtccgagcggaaggttctccaggcaacagcgcatgctcaggcgcagctagggtgccccgtcatcattcaccccggacggtccagtcgagcccctttccagattatccgcatactccaggaggcaggtgcagacatatcaaaaacggttatgagccacctagaccgcaccatccttgataagaaggagcttcttgagtttgctcagcttggttgctacctcgagtatgacctgtttgggaccgagctcctccactaccagttaggtcccgacattgatatgcccgacgacaacaaaagaatccgcagggtccgcctgctggtcgaggaaggatgtgaagacaggatccttgtggcccacgatattcacactaagacaagacttatgaagtatggtgggcatggctactcccatatcctcacaaacgtagttccaaagatgctactgcggggaatcacggaaaatgtattagataaaatactcatcgaaaacccaaagcaatggttgaccttcaagtag

SEQ ID NO: 235044 - DNA, 753 bp, synthetic construct
  misc_feature 1..753: note = Description of Artificial Sequence: Synthetic coding sequence
  source 1..753: mol_type = other DNA
atgttctccttacctctgagtttgccactttgcgaagacacggctttccttcctagcaaatgctgctcgagccataagaccatcaaacaggccagaactttaattatgatatttctcgccagcggcacccattttcagacgatgctcaagtctaagcttaatgtcctaaccttgaagaaagagccactcccagccgtgatttttcacgaacccgaggcaatcgagttatgtacgaccacgccactcatgaaaacccgcactcacagcggatgtaaagtgacctatctggggaaggtctccactaccggcatgcagtttctgagcggatgcacagaaaaacctgtcatcgagctgtggaagaagcatacacttgccagagaagacgtcttcccagctaacgcacttctggagattcggccatttcaggtctggttacatcatctcgatcataagggagaggccactgttcatatggataccttccaggtggcccgaatcgcgtactgcaccgcggatcacaacgtgtctccaaacatctttgcctgggtttatcgggagattaatgacgatctgtcttatcagatggactgccatgctgttgagtgcgaatccaaactggaagccaagaagttagcccatgcaatgatggaagcctttcgaaagaccttccactccatgaagtcagacggccgaatccacagtaattctagcagtgaggaagtaagccaagaactggagagtgatgatggttag

SEQ ID NO: 235045 - DNA, 747 bp, synthetic construct
  misc_feature 1..747: note = Description of Artificial Sequence: Synthetic coding sequence
  source 1..747: mol_type = other DNA
atgcccagaatcgccggaaaccacctcatgctagaagaaagtaggacctgttcatccccagagctcctggatggagtgtggccatgccagcctctgcattttggcttacccgcttcggagatgcatttccagactatgctcaagagcaaactgaacgtgctcactctgaaaaaagagcccctgcctgctgtcatattccacgagcccgaggccatagagttgtgcaccacgaccccattgatgaagacccggacacacagtggctgcaaagtcacctacttgggaaaggtgtcaaccactgggatgcagtttctcagtggctgcactgaaaagcccgtcatcgagttgtggaagaagcacactctggctagagaagacgtgttcccagctaatgccctcctggaaatccgccctttccaggtatggctgcatcatctggatcacaaaggcgaggccactgtccacatggatacctttcaggtagccaggatcgcttattgcactgctgaccacaatgttagtccaaatattttcgcctgggtgtaccgagagatcaatgatgatttgagctaccagatggactgccacgccgtcgagtgcgaaagcaagcttgaggcaaaaaaacttgcacacgcgatgatggaggcctttaggaagacttttcactccatgaagtccgacgggaggatccattcgaactcgtcttcagaagaggtgtcacaagaattggagtcagacgatggatag

SEQ ID NO: 235046 - DNA, 654 bp, synthetic construct
  misc_feature 1..654: note = Description of Artificial Sequence: Synthetic coding sequence
  source 1..654: mol_type = other DNA
atgtggcagcctgccactgagcgccttcagcacttccagaccatgctgaagtctaagttaaatgttctgaccctgaagaaagaacctctgccggcagtgatttttcacgaaccggaggctatcgaactgtgtacaactacacctctgatgaagactcggacacacagtggctgcaaggtgacctacctgggcaaagtctccacaaccggaatgcagttcctgtctggctgtaccgaaaagccggtcatcgagctgtggaaaaagcataccctggctcgcgaggacgtgtttccagcaaatgcgcttcttgagattcgacctttccaggtttggctgcatcatcttgaccataaaggtgaggctacagtacacatggacacctttcaagttgctcgcattgcttactgcacagccgaccataacgttagccccaatattttcgcgtgggtttaccgggaaattaacgatgatttaagttaccagatggattgtcacgcggtggagtgcgagtccaagctggaagccaaaaaactggctcatgccatgatggaagcttttagaaagaccttccattcaatgaagtcagatggcaggatccacagcaattccagcagcgaagaagtgagtcaagaactcgaatccgacgacggctag

SEQ ID NO: 235047 - DNA, 507 bp, synthetic construct
  misc_feature 1..507: note = Description of Artificial Sequence: Synthetic coding sequence
  source 1..507: mol_type = other DNA
atgtggcagccggctaccgaacgcctgcaggttacctatctcggcaaagtttcgaccaccgggatgcagttccttagcggttgcacagaaaaacctgtgatcgaactgtggaagaagcataccttagcccgagaagatgtgttccctgccaacgctctcctcgagattaggccatttcaggtctggctgcatcacctggaccacaaaggtgaagccacagttcatatggacaccttccaggtggccagaatcgcctactgcacggccgatcataacgtatcacctaacatctttgcttgggtctatagggaaataaatgatgacctgagttaccagatggattgccatgcagtggagtgtgagagcaagctggaagctaagaaactggctcacgccatgatggaagcttttaggaagacgttccactccatgaagtcggatgggcgaatccactccaattcttcatcagaggaggtttctcaggagctcgaaagcgatgatgggtag

SEQ ID NO: 235048 - DNA, 753 bp, synthetic construct
  misc_feature 1..753: note = Description of Artificial Sequence: Synthetic coding sequence
  source 1..753: mol_type = other DNA
atgttttctcttcctttgagtcttcctctctgcgaggacaccgcctttctgccttccaagtgctgcagcagccataagactattaaacaggccagaactctgatcatgatattcttagcctccggaacacactttcagactatgctcaagagtaaattaaatgtcctgactctgaaaaaggagcctctgcccgcagtgatattccacgagccagaagctatagaactttgcacgaccacacccctcatgaagacacgtacccactctgggtgcaaggttacgtacttgggcaaggtcagcaccacgggaatgcaatttctttctggctgtacggaaaaaccagtgattgagctctggaaaaaacataccctggccagggaggatgtgttccctgccaacgctcttcttgagataaggccttttcaggtttggctgcatcaccttgaccataagggagaagcaaccgtgcacatggatacatttcaggttgctcgaattgcctactgcaccgctgatcataacgtctctcctaatatctttgcgtgggtgtacagggagatcaatgacgatctgtcctaccaaatggactgtcacgcggtggagtgtgaaagcaaactcgaggccaagaaactggcccacgccatgatggaggctttccggaaaaccttccacagcatgaaaagtgacgggaggatccattcaaatagctcatcggaggaagtctctcaggagctcgaatccgatgacggttag

SEQ ID NO: 235049 - DNA, 1017 bp, synthetic construct
  misc_feature 1..1017: note = Description of Artificial Sequence: Synthetic coding sequence
  source 1..1017: mol_type = other DNA
atggagcagctccgcgcagcagcacggctgcagatcgttcttgggcacctgggaaggccttccgctggggcagtggtggctcaccccacgagcggcacaatctcttctgcctcatttcacccacagcagtttcaatataccctggataataatgtgctgactcttgaacagcgcaagttttatgaagagaatggcttcctggtaattaaaaatctggtgccagatgcggacatccagagattccgaaacgaatttgagaaaatatgtcgtaaagaggtgaagccattagggctaactgtaatgagagacgttacaatctctaagagcgaatacgccccttcagagaaaatgattacaaaggtgcaagatttccaggaggataaggaactgttccgctactgcactctgcctgaaatacttaaatatgtggagtgctttacgggacctaatattatggcgatgcacacaatgttaattaacaaaccacccgacagcgggaagaagacaagccgacacccgttgcatcaagacctgcactacttcccgtttagaccaagcgacctcattgtctgtgcatggaccgctatggaacacatctctaggaacaatgggtgtctcgtggtgctgcctggcacacacaaaggatcacttaaaccccatgattaccccaaatgggagggcggtgtaaacaaaatgttccatggcattcaggactacgaagagaataaagccagagttcatcttgtgatggagaagggcgacacagtattttttcaccccttgctgatccacggctctggtcagaacaagacccagggttttcgtaaggctataagctgccacttcgcctccgccgattgccactatatcgatgtcaagggcacctcacaagaaaacatagagaaggaggtggttgggatcgcccacaagtttttcggagctgaaaattctgtgaacctgaaggatatctggatgtttagggctcgcctagtaaaaggcgagcgcacaaatctgtag

SEQ ID NO: 235050 - DNA, 717 bp, synthetic construct
  misc_feature 1..717: note = Description of Artificial Sequence: Synthetic coding sequence
  source 1..717: mol_type = other DNA
atgagagacgttacaatctctaaaagtgagtatgccccttccgagaagatgatcactaaagttcaggatttccaagaagataaggaactgttccggtactgcaccctacctgagattctgaagtatgtcgagtgtttcaccgggccaaacatcatggccatgcacaccatgctcatcaacaagccaccggattccggaaaaaaaactagcagacacccattgcaccaggatctccactatttccccttccgccctagcgacctcatcgtctgtgcctggaccgctatggagcatattagcaggaacaatggatgcttagtggtgctgcctggcactcacaaaggcagtctcaagccacatgactaccctaagtgggaggggggtgtaaacaaaatgtttcatgggatacaggattacgaagagaataaggccagagtgcatcttgtgatggaaaaaggagataccgtgtttttccatcctctattaatccacgggtctggacagaacaaaacacagggttttcggaaggcaatcagctgtcactttgcctccgcagactgccattatatcgacgtgaaggggacgagccaggaaaacattgaaaaagaagttgttggcatcgctcacaagttctttggggcagaaaattccgtgaacctgaaagatatatggatgttccgggcacggctggtgaagggcgagaggacaaatctgtag

SEQ ID NO: 235051 - DNA, 15429 bp, synthetic construct
  misc_feature 1..15429: note = Description of Artificial Sequence: Synthetic coding sequence
  source 1..15429: mol_type = other DNA
atgggtaacgaagcctcactggaaggcgaggggctcccagaaggcctggcagccgctgcagctgccggtggcggagcctccggcgcaggatccccaagtcacaccgcaatcccagctgggatggaggcagacctgtcgcagctaagtgaagaggagcgcaggcaaatagcagcagttatgagtagagcccaggggctgcccaagggatcagtcccccctgctgctgccgaaagtccctccatgcacagaaaacaggagctcgactcttcccacccgccaaagcagagcggtcgaccaccggatcctggtcgccctgcgcagccaggtttgagcaagtcccgaaccacagataccttccggagcgaacagaagttaccaggacggtcgccaagtacaatatccttgaaggaatcaaaaagccgcacagacctcaaggaggagcacaaaagctctatgatgcctggctttctgtccgaggtgaacgccttatccgcagtgtccagtgtggttaataagtttaacccctttgacctgatatccgattcagaagcgagccaggaggagacaacgaagaagcaaaaagtagtgcagaaggagcagggcaagccagagggaatcatcaaaccacctctccagcagcagccacccaaacccatccccaagcagcagggcccaggtagggatcccctgcagcaggacggcacccccaaatcaatctcaagccagcaaccagaaaagataaagtcacaacctccaggcactggaaaacccattcagggccctactcagacaccgcagacagaccacgcaaagctcccacttcaacgtgatgctagcaggccccaaaccaagcaggctgacatagtaaggggagagtcagtgaagccttccctgccatctccaagtaagcccccaattcagcagcccacacccggtaagccacctgcccaacaacctggccacgaaaaatctcaacctggaccggcaaagccacctgcacagccctccgggctgactaagcccctggcccagcaacctgggactgtgaaacctccagttcagccccctggtactactaaacccccagcccaaccactcggtcctgctaagcctcccgcacagcagacaggttctgagaaacctagctctgagcagcccggacccaaggctctggctcagcccccaggtgtaggaaaaacccccgctcagcaaccaggccctgccaagccccctactcagcaagtcggcactcccaagcccctcgcacagcagcccggactccagagcccggctaaagcccctgggccaacaaagaccccagtccagcagccgggacccggaaaaatcccggcacaacaggcgggtccaggcaaaactagtgcgcaacagacaggtcccaccaagcccccaagtcagcttcctggcccagcaaagccacccccacagcaacccggaccagctaagccccctccacaacagccgggatctgccaagccaccatcgcagcaacctggcagcactaaacctcctcctcagcagccaggaccagccaaaccttcaccacaacagcctggatccacgaagcccccttcgcaacagcccggttctgctaaaccatccgcccagcagccatctcctgccaaaccaagcgctcagcagagtacaaaacctgtcagccaaacggggtccggcaagcctctgcagcccccaaccgtgtctccatctgccaagcagccccctagccagggcctccccaaaacgatttgccctctctgcaatacgacagagctccttttgcacgttcctgagaaggccaactttaacacctgcaccgaatgccagacgacagtatgttcactgtgtggattcaatccgaatccacacctgaccgaggtgaaggaatggctatgcttgaactgccagatgaagcgagccctcgggggagatcttgccccagtgccatcatccccgcagccaaagctgaagactgctcccgtgaccactactagtgccgtgtctaagagctctccacagccccagcaaacatccccaaagaaggacgccgctccgaaacaggacttgtcaaaggccccagaacctaagaaaccacctccgcttgtgaagcaacctacactccacggatccccctcagccaaggctaaacagccccctgaggcggactcgctgtctaaacccgctccccctaaggagcccagcgtcccttctgagcaagataaggcaccagtggcggacgacaagccaaagcagccaaaaatggttaaacccactaccgaccttgtctccagctcctctgccaccacgaaacctgatatccccagctcaaaggtacagtctcaggcagaggagaaaaccacaccgcctctgaagacagactcagccaagccctcccagagctttccaccaacaggggaaaaggtcagcccattcgatagcaaggcaatccctcgtcccgcaagcgattcaaagatcatttcccacccaggccctagctcggaatctaaagggcaaaagcaggttgatccagttcaaaagaaggaagaacccaaaaaggctcagacaaagatgagccccaagcccgacgctaagcccatgccgaagggctcacctacgcctcctggaccacgccctactgccggtcaaaccgttcccactcctcaacagtcaccaaagccacaagagcaaagtcggaggtttagtctgaatctcgggtctatcactgatgctcccaaaagtcagcccaccacaccccaagaaactgtgactggcaagttatttgggttcggggctagcattttctcacaggcctcaaacctcatctcgacagctggacagcctggaccccacagccaaagtggcccaggcgcacctatgaagcaggcccctgcgcctagtcagccacccacgtcccaggggcctcctaagagcactggacaggctccgccagctcctgccaaatctattccagtgaaaaaagagacgaaagcgcctgcagccgaaaaactagagcctaaagccgaacaggctccgacagtgaaacgaaccgagaccgaaaagaagccccctccaatcaaagattccaagagcctcaccgccgagccccagaaggccgtgctgcccaccaagctcgaaaaaagcccaaaacccgaatcaacttgtcccttgtgtaaaacggaattgaacataggctccaaggaccctcccaacttcaatacatgtaccgaatgcaagaaccaggtttgtaacctttgtggatttaatcccacacctcacttgacggagattcaggagtggttgtgtctgaactgtcagactcagcgagccatctctgggcaactaggcgatattcggaaaatgccacctgctccgtcaggcccaaaggcatccccgatgcccgtgcccaccgagtcttcttctcagaagactgccgtgcccccacaagttaagctagtgaagaaacaagaacaggaagtgaaaactgaagctgagaaggttattttggaaaaagtaaaagagacactcagtatggaaaagatccctcctatggttacaactgatcagaagcaggaggagagtaaacttgagaaggataaggcctcagcacttcaagagaaaaagccactgcccgaggagaagaagctaatacctgaggaggaaaagattaggtcagaggaaaagaagcccttgttagaagagaagaagccaacccccgaagataagaaacttttacctgaagccaaaaccagtgccccagaggaacaaaagcacgatttgcttaagtcccaggtacagatcgctgaggagaagctcgaaggtcgggtcgctccaaaaacggtgcaggagggaaagcagcctcagaccaagatggagggtttaccgagcggcacgccacagtctctacctaaggaggatgacaaaacgaccaagacaatcaaagagcaaccccaaccaccatgcaccgccaagcccgaccaagttgagcccggaaaagaaaagactgaaaaagaggacgacaagtcagatacttcctcttcccagcagccaaaatccccccagggtctgagtgatacgggctattctagcgacggcattagttcaagtctaggagaaattccctctttaattcctacagatgagaaggatattctcaaggggttgaagaaggatagcttcagccaggagagcagtccatcctcgccctctgatttggccaagctagagagtaccgtgctcagcatcctggaagctcaggccagtacccttgcagatgagaagtcggagaagaaaacacagccgcacgaagtctcccccgaacagccaaaggaccaggagaaaacacagtccctgagtgagacgctcgagattaccatcagcgaagaagagatcaaagagagccaggaggagcgaaaggacaccttcaagaaagactcacagcaggatataccttcctctaaggatcacaaagagaaaagtgagtttgtggatgacatcacaaccagaagagagccatacgattccgtggaggaaagcagtgagagtgaaaattctccagtgccacagagaaaaaggcgcaccagcgttggctcgtcatcctcggacgagtacaagcaggaggatagccagggttccggcgaggaggaggatttcatccgcaagcagataattgaaatgtccgccgatgaggatgctagcggatctgaggatgacgagttcattaggaaccagttgaaagagatctcttccagcactgaatctcagaagaaggaggaaaccaagggcaaagggaagatcacggccggaaaacaccggagactcaccagaaagtctagcacatccattgacgaggatgctggcagaagacattcatggcacgatgaggacgatgaggccttcgacgagtcccccgaactgaaatatagagaaaccaagagccaagagagcgaggagctggtggtgaccggtgggggtggtctgcgcagatttaaaaccattgagctgaactcaaccatcgctgacaaatactctgccgaaagttcgcaaaaaaagactagtttgtattttgatgaggagccagaactcgaaatggaatcactcacagacagtcccgaggataggtctcgcggtgaggggtcttcgtcactccatgcaagctcattcacacctggcacctcccccactagcgtttcaagtctggatgaggacagtgactcgtcaccatctcataaaaaaggcgagtcgaagcaacagcggaaggcgagacaccgtccccatggtcccctgttgcctaccattgaggacagctctgaagaggaggaacttcgcgaagaggaggagcttctaaaggaacaagagaaacaacgggaaattgagcagcagcagcgaaagtccagcagcaagaaaagcaagaaagacaaggacgagctgagagcccagcgcaggcgggagagacccaaaacaccccctagcaatctgtctccgattgaagatgctagccctacggaagagctgcgacaggccgctgagatggaggagttgcataggtccagctgtagcgaatactccccaagcattgaatctgaccccgaaggcttcgaaatctcaccagagaagattatcgaagttcagaaggtttataaactgccaacagccgtctctctgtattctccgactgatgaacagagcatcatgcaaaaagaggggtcgcagaaagccctgaaatctgcagaggagatgtacgaggaaatgatgcataagacccacaaatacaaggcttttcccgctgccaatgagcgcgacgaagtgttcgagaaagagcctctctacggtgggatgttgattgaagactacatttacgagagtctcgtcgaagacacttacaatgggtccgtcgatggcagccttctgacaagacaggaagaagagaacgggttcatgcagcagaagggtagggaacagaagatccgcctgtccgagcagatctacgaagatcctatgcaaaaaattaccgatcttcaaaaggagttctacgagttagagtcactgcacagcgtggtccctcaggaggacatagtgtccagttcatttataattcccgaatcacatgagatcgtcgacttgggtacaatggtaaccagcacggaagaggagcgcaaacttcttgacgccgatgccgcatacgaggagttgatgaagcggcagcagatgcagctcacgcccggttcgtcccccactcaggcccctatcggtgaagacatgactgagtccactatggatttcgatcggatgccggatgcctccctcacaagctcagtattatcgggtgccagcctgactgactcgactagcagtgccaccctgtccatccccgatgtcaagattacacaacatttctcaacagaagaaattgaggacgagtatgtgactgactacacacgagagatccaggaaatcatcgcgcatgagtccctcatcctcacctattcagaacccagcgaatcagcaacaagcgttccacccagtgataccccttctttgaccagctcagttagcagtgtatgtaccacggactccagctcacctattacaacactggactctatcacgaccgtttacactgagccagtggacatgattactaaattcgaagactctgaggagatcagctcaagcacttacttccctggctccatcattgactatcccgaggagattagcgtgtccctagatcgtaccgcaccacctgatgggagggcctctgccgatcatatcgtgatctctctgtcagacatggcgtcatctataattgaatccgtggtgcctaagcctgagggtccagtcgccgacaccgtgtccacagatctgctgatttctgaaaaggaccctgtgaaaaaggccaaaaaggaaaccggaaatggcataatcttagaagttctggaagcctacagggacaagaaagagctagaggctgagcggacgaaatcaagcctttccgagaccgtgtttgaccatccaccatcctctgtcatcgcactgccaatgaaagagcagctgtcgactacctacttcacctctggcgagacatttggccaggaaaagcccgcaagccagctgccctctggcagcccaagcgtgagttcacttcccgctaagcccaggccatttttccgttctagcagtctcgacattagcgctcagccccctcccccacctcctccacctcctccacccccacccccacctccgcctccaccgcctccgccacttcctccaccaacaagccccaagcccacaatcctgcccaagaagaagctgactgttgccagccccgtaactaccgctacccctctgtttgacgcagttaccacactggagacaaccgcagtgttacgctccaacggcctacccgtcacaagaatatgcacaacagctcctccgcctgtccccccaaaacctagcagcatcccctccggattggtgtttacacatagacctgagccaagcaaacctcccatcgcccctaaaccagtgatcccgcagctgcccaccactacccaaaagcctaccgatattcatcccaagcccacaggcttgtcactaacctccagcatgactctcaacctcgtaacaagcgccgactataaacttccaagccctacatctcctctgtctccacactctaataagtccagcccacgcttctcaaagagcctcaccgaaacttatgtggtgatcaccctgccgtccgaacccggaacaccaacagatagcagtgcttctcaggctatcactagttggccccttggcagtccctcaaaggatctagtatctgtggagccggtgttttcagtagttcccccagtaaccgcagtggagatccccatatcaagcgagcaaaccttctacatctctggagctctccagacatttagcgcgactcctgttacagccccttcgagttttcaggctgctcccacaagtgtgacccaatttctaactaccgaggtgtccaagacggaggtctccgccactcgctcaacggccccttctgtgggcctctcttccatcagtattaccattcctccagaacctttggcactggataatatacatttggaaaagcctcagtacaaggaggacggaaagttgcaactcgtgggggacgttatcgacctgagaacagttcctaaagttgaagtaaaaacaaccgataagtgcattgatttgagcgcctctactatggacgttaagaggcaaattacagccaacgaggtctatgggaaacagatcagtgctgtgcagcccagtattatcaacctgtccgtcactagttcgattgtgactcccgtgagcctggctactgagaccgtcacctttgttacatgtactgctagcgcttcctacaccacgggcaccgagagtctggtgggtgctgagcacgccatgactactcctctccagctgaccacaagtaagcacgcagaacctccatataggatcccctcggatcaagttttccctatcgcaagagaggaagcaccaattaacctgagcttgggtacaccagcccatgctgttacactcgctattaccaagcccgtcaccgtgcccccagtgggcgtaacgaacggatggacagacagtacggtatcccaaggtatcacggacggcgaagtggtcgacctgtctacaactaagtcacataggactgtcgtcaccatggacgaatccactagctccgtgatgacaaagattatcgaggatgagaaaccggtggatctaaccgccggacgcagagccgtgtgttgcgacgtggtgtacaaactgccatttggaagatcttgcactgcccagcaacctgctaccacattaccagaggacaggtttggttatagggatgaccactaccagtatgatagatctggaccctatggctatcggggaattggtggaatgaagccaagcatgagcgatacgaatctcgctgaagccggtcactttttttacaaaagcaaaaatgcatttgactatagcgaagggacagacaccgccgtggacctcacatctgggcgagtgactacgggggaggtcatggactattcttctaagacaacaggcccatatcctgagacgaggcaggtaatttccggggcaggaatctctaccccccagtactcaacagctagaatgaccccaccccctggcccacagtactgtgtaggctctgtcttgcgtagttctaacggagtggtttacagctccgtcgctactccaacacccagtacattcgcaataaccacgcagcccggaagtatcttcagtaccaccgtgagggatttgtcaggaattcatacagcagacgccgttacttccctgccagccatgcaccatagtcagcccatgcctcgttcctactttattaccactggcgcttcagaaaccgacatcgcagtgaccggaatcgatatttctgcatccctgcaaaccatcacaatggagagccttactgctgagactatagactcagtgccaacgttgacaactgccagcgaagtgtttcctgaggtcgtaggtgatgagtcggctctgctgatagtacctgaggaggacaaacaacagcagcaattagatctagagagggaactgctggagctggaaaagataaagcagcagaggtttgctgaggaactcgagtgggaacggcaggaaatacagcgattccgggagcaggaaaaaatcatggtgcagaaaaagctcgaggagcttcagagcatgaagcagcacctgctcttccaacaggaagaggagcgccaagcccagtttatgatgagacaggaaaccctcgcgcagcaacagcttcagcttgagcagatccaacagctgcagcagcagctccaccaacagttggaagaacagaagattcggcaaatttaccagtataattacgaccctagcgggaccgcttccccacaaaccactaccgagcaagcgatcctggaaggtcaatatgccgcactggaaggttcccagttttgggccactgaggacgccaccacaaccgcctccgcagtggtggccatcgaaatcccacaatcacaggggtggtatacggtgcagtccgacggtgtgacacagtacatcgcccctcctggaatcctgagcactgttagcgagataccgttgactgatgtagtggttaaagaagaaaagcagcctaaaaaaaggtcaagcggagctaaggtaaggggacagtacgatgacatgggagaaaatatgaccgatgacccgaggagttttaaaaaaattgtggactctggggtgcagacggatgacgaggacgccaccgaccggtcctacgtctctcgcaggcgcaggacgaagaaatccgtggacacctcggtgcagactgacgatgaagatcaggatgagtgggatatgcccacgagaagtcgtagaaaagcacgcgtgggcaagtatggtgactcaatgacagaagctgacaaaacaaaaccactctcgaaggtgtcttcgattgctgtccaaaccgttgctgagatctccgtccaaacagagcctgtcggaacaattcgcacgcctagtatcagagcacgtgtggacgcaaaagtggaaatcataaaacacatatcagctccggagaagacctacaaaggcggaagtctcggctgccagacagaggccgactcagacacacagtccccacagtacctctctgcaacaagtccaccaaaggacaaaaagcgccctactcctctggagatcggctattctagccacctgcgggctgactcgacggtccagctcgcccctagccccccaaagagtcccaaggtcctgtatagtcctatttcccctctatcgcccggaaaagccttggaatccgccttcgtgccttatgagaagccactgcccgatgatatctctccacagaaagttttgcatccagatatggcaaaggtgccgcctgcctctccaaaaacagccaagatgatgcagcgcagcatgagtgatcccaaaccactcagccccacagccgatgaatccagtcgggctcctttccagtacaccgagggatatacgacgaaggggagtcagacaatgacaagcagtggcgcacaaaagaaggtgaaaaggactctgccaaacccgccaccagaagagatcagcactggcacgcagtcaacgtttagcacaatgggcactgtctcccgacgcagaatttgtcgaactaatacaatggctcgtgctaaaattctgcaagacatcgacagagagctagatcttgtggagcgggaaagtgccaaattgaggaaaaagcaggccgagctggacgaagaggaaaaggagatcgacgccaagttgaggtacctggagatggggatcaacagacgcaaggaggccctgctgaaagaacgcgaaaaacgcgagcgcgcataccttcaaggagtagcggaagatagggattacatgagcgactctgaggtgtcaagtacccgcccaacccgcattgaatcccagcacggcatcgaacgtccccgaacagcacctcagacagagttctcacagttcattcctccccagacccaaaccgaatctcagctggtcccccctacgagtccatacacccagtaccaatacagcagccccgctcttcccacacaggcgcctactagctacacacagcagagccacttcgaacaacagactctctatcaccagcaggtgtctccgtaccagacccaacctacctttcaagctgtggctactatgtcttttacaccacaggtgcaacccaccccgaccccccaaccatcttaccaactcccatcccaaatgatggtgatacagcagaagcctagacagaccaccctctatttggagccaaaaatcacctccaattacgaagtcatccgcaaccaacccctcatgattgcacctgtctcgacagataatacatttgctgtcagtcatctgggtagcaaatataactccttggacctcagaattggacttgaagaacgcagctctatggcctcatcacccatctcatccattagcgctgacagcttttacgcagacatagatcatcacacaccaaggaattatgtgctgatagacgacatcggtgaaatcactaagggcacagcggctttgtcaaccgcgttttcgttgcatgagaaagacttaagcaagaccgataggctgctgaggactacagagactagaagatctcaagaggtaaccgatttccttgcaccgctgcaaagctcatctcgcctgcactcctacgtaaaagccgaggaggatccgatggaggatccgtacgagctcaagctgctcaaacaccagataaaacaggaattccgaagaggaactgagagccttgatcatctggctggactgtctcattattaccacgccgacactagctacagacatttccctaaatctgagaagtacagtatctcccggctgaccctcgagaagcaggctgctaagcaattaccggctgctatcctgtaccagaaacagtcaaaacacaagaagagcctgattgaccctaagatgagcaaatttagcccaatccaggaatctcgtgacttggagccagattattcctcatatatgacaagctctactagcagtatcggtgggatttcaagtcgcgcaagactgttgcaggacgatatcacgttcgggctgagaaaaaacatcactgaccagcagaagtttatgggtagcagcctggggacaggacttggcaccctggggaatacgattaggtcagccctgcaggatgaggcagacaagccatacagttctggttcacggtcccgtccctcctccaggcccagctcagtgtatgggctggatctatcaatcaagcgagactccagctcttcaagcctcaggcttaaggcccaggaagcagaggccttggacgtttccttttcccacgccagctcaagtgcaagaactaaaccaactagcttgcccatctcgcaaagcagaggcagaatccccatcgtggcccagaattctgaagaggaaagcccactgtctccagttggccagcctatgggcatggcacgggcagcagctggcccactgcccccaatctccgctgatacccgcgatcagttcggatctagccattccctgcctgaagtgcagcaacatatgcgggaggagagcagaacgagagggtacgaccgagacattgcctttattatggacgattttcagcatgccatgagtgacagcgaggcatatcatctgagacgagaagaaacggattggttcgataagccacgtgaaagccgcctggaaaacggccacgggctcgaccggaaactgcctgaacgcctggtgcatagcaggcccctgtcgcagcatcaggagcaaatcatccagatgaacggcaagacaatgcactacatctttccacatgcgaggatcaaaatcactcgcgattccaaagatcacacagtatccggcaatgggctgggcataaggattgtgggaggaaaggaaatcccgggtcacagtggcgagatcggcgcatacatcgcgaaaatcctgccaggcggttccgcagaacagacagggaaactgatggagggcatgcaggttttggaatggaacggtatacccctcacctccaaaacttacgaagaggttcaatccatcatctctcagcaaagtggggaggcagaaatttgtgttaggttggacctgaacatgctaagcgactccgaaaattcccagcatctcgaactgcacgagccacccaaagccgtcgataaggcaaaatcccctggtgtagacccaaagcagctggccgctgaactacaaaaggtgagcctgcagcaatcccccctggtgctgtcctcagtggttgaaaagggctcacatgtgcattctggcccaacgagcgcgggatctagctccgtgccatcacctggacagcccggttctccgagcgtcagcaagaagaagcatggctcctccaaacccaccgatggaacaaaggtcgtgtctcaccctatcacaggggagatacagttgcagatcaattacgatttggggaatcttatcatccacatcttacaagctcgcaatttagttccgagggataataacggatatagtgatccctttgtgaaggtatacctgctccctgggaggggacaggtaatggtggtacagaacgcttcagcggagtataagcggaggactaagcacgttcagaaatctcttaatccagaatggaaccagacagtgatctataaatctatctcaatggaacaactcaagaaaaaaactttagaagtcaccgtgtgggattacgatagattttcgagcaacgatttcttaggagaggtgcttatcgacttaagttcaactagccacttggacaacacgccgagatggtacccgctaaaggagcagacagaatccatcgaccacggcaagtcccattcttcccagtcttcccagcagtcccccaaaccatccgtcatcaagagccggtcacacgggatttttccagaccccagcaaagacatgcaggtgcctacaattgagaagtctcattcctcccccggatcatcgaagagttccagcgaaggccatctcaggtcccacggccctagccgatcgcaatccaaaacatccgttactcagacccacctggaagatgccggagccgcaatcgccgcagccgaggctgcagtgcagcagctgcggattcagcccacgaaacccccaaaccaccggcctgcagagtcttccgtctccaccggtagctctggttctagctttggttctggatactcggtcgatagcgaaggctcctcgtcgaccgcaggcgaaaccaacctcttccctataccaagaattggaaagatgggtcaaaatggacaggaaccagtgaaacagccgggagtaggtgttggcctggcagatacagaagccaagacccaggtcatgggagaaattaaaattgcactcaagaaggagatgaaaacagacggggagcaattgatagtggagatactccagtgcaggaacatcacctataaatttaagtcgcccgatcatctacccgatctctacgttaaaatctacgtgatgaatatctccacccagaagaaggtgattaagaaaaaaactcgggtgtgtcggcatgacagggagccctcttttaacgaaacctttaggttttccctctctccggctgggcacagcctgcaaattcttctgttcagcaatggagggaagttcatgaagaagaccctgatcggcgaagcctgcatttggctcgataaggtcgatctgcgaaagcgaattgtcaattggcacaagctgctcgtgtcgccgacccagacccattaa

SEQ ID NO: 235052 - DNA, 1269 bp, synthetic construct
  misc_feature 1..1269: note = Description of Artificial Sequence: Synthetic coding sequence
  source 1..1269: mol_type = other DNA
acgaaagtttggaattctaatgggctgggaatacgaatcgtgggcggaaaagagattcccggacattcgggggagatcggggcatatatcgccaagattcttccagggggatccgctgaacagaccggtaagctcatggaagggatgcaagtgttagagtggaatggtattcccctgacctctaagacctatgaggaagtgcaatcaatcatcagccagcagtctggcgaggcagaaatctgtgttcgcctggatctgaatatgctctctgatagtgagaattcacaacacctggagctacatgagcctcccaaagctgtagataaagccaaaagcccaggtgtcgaccccaagcaattagcagccgaattgcagaaagtcagtctccagcagtcaccactcgtgctgtcttccgttgttgagaaggggtctcacgtccattctgggccaactagcgctggttcttcgagtgtaccatcccccggacagcctggcagccctagtgtgtccaaaaaaaagcacggctccagcaagcccacagacgggacaaaagtcgtcagccatcccatcaccggcgaaattcagttacaaatcaactacgatctggggaacctaattatccatatcctgcaagcaaggaacttggttcctcgtgataataatggctacagcgacccgtttgttaaagtctacctcctgcccggacgaggtgctgaatacaagcggagaactaagcacgttcaaaagagcctgaatccggaatggaaccagaccgtcatctacaaaagtatttctatggagcagctcaaaaagaaaactctagaagtgactgtgtgggattacgaccggttcagctccaacgattttttgggggaggtgctcatcgaccttagcagcacatcccacctcgacaatactcctagatggtaccctctgaaagaacagacagagagcatcgatcatggtaaatcccactcctctcagtcaagtcagcagagccccaaaccttccgtgatcaagtctcgctcccatggcattttccctgacccatcaaaggacatgcaggtacctactattgagaaaagccactcctcccccggtagcagcaagagctcctccgagggccatctccgttctcatggcccatcaagaagtcaaagcaagacaagcgtgacccaaacacaccttgaagatgcaggcgctgccattgccgctgcagaagcagcagtacagcagctccgaattcagcctagcaagaggaggaaatag

SEQ ID NO: 235053 - DNA, 14808 bp, synthetic construct
  misc_feature 1..14808: note = Description of Artificial Sequence: Synthetic coding sequence
  source 1..14808: mol_type = other DNA
atgggcaacgaggcatctctggagggtgaagggctgcctgagggtctcgctgccgctgctgcagcaggcggtggagcctccggcgcagggagcccatcccacaccgctattccagcgggtatggaggcagatctttcacaactcagtgaagaggaacgtcggcaaatagctgcagtgatgagtagagcccagggcctgccaaaaggaagcgtgccgcctgccgctgcagaatctcctagcatgcatagaaaacaggaactcgactcctcccacccaccaaagcagagcgggaggccgccagacccagggaggccggctcagcctggtctgagcaagagtcgtacaactgacaccttccgctcagagcagaagttgcctggccgaagtccaagtactattagcttgaaagaatcaaagtcacggacagatctgaaggaggagcataagagctctatgatgcccggatttctgagcgaagtgaacgcgttgtcagccgttagctccgtagtaaataaatttaaccctttcgacctgatctctgactctgaggcctctcaggaagagacaacaaaaaagcagaaagttgtccagaaggaacaaggaaaacctgaaggtataatcaaacctcccttgcagcagcagcccccaaaacccattccgaaacaacagggacccggtagagatcctcttcaacaagatgggacccctaagtcgatcagtagccagcagcctgaaaaaatcaaaagccaacccccaggaactgggaagccaatccagggcccaacccaaactccccagaccgaccacgctaaattgccactccaacgtgacgcctctagacctcagaccaagcaggcagacattgtccgaggggaatcagtcaagcctagcttgccaagcccctccaaaccgcctattcagcagccgacccccggaaagccacccgctcaacagcctggacatgagaaatctcagcctggccctgccaagcctcctgcgcagccttccggtttgactaagcctttggcccagcaaccaggcactgtcaaaccacctgtgcagccgcctgggaccacaaagcctccagcccagccgctcggaccagctaaaccaccagcgcagcagaccggtagcgagaagccttcttcagaacagccaggtcccaaggcgttagctcagcccccaggcgtgggcaagactcccgctcagcagccaggcccagccaaacccccaacacagcaggtcggaactcctaagcccctggctcagcagccagggctccagtcacccgctaaagctcccggacccacaaaaaccccggtccagcagccgggacccggtaagattcccgctcagcaagcgggaccagggaagaccagtgctcagcagacaggcccaaccaaaccgccaagccagttgccaggtccagcgaaaccaccgccacagcagccgggtccagcaaaaccgccaccacagcagccgggatcagcaaagccgcctagccaacagccaggcagtaccaagcctccaccgcagcaacctgggccagcaaaacccagcccccaacagcctggaagcactaaaccacccagccagcagcccggttcggctaaacctagtgcccaacagccaagcccagccaagccatctgcacaacagagtacgaagcctgttagtcaaactggatctggtaaaccactacagccacctactgtctccccttctgccaagcaaccgcctagtcagggattacctaagactatctgtccgttatgcaacactactgagctgttgctacacgtccctgagaaagcaaactttaatacatgcaccgagtgccagactaccgtgtgttcactgtgcggatttaacccaaatcctcatttaactgaggtaaaagaatggttgtgccttaattgccaaatgaaacgggctttggggggagacctggccccagtccctagcagccctcagcctaagttgaagaccgcacccgtgacaaccacgtctgcagtgtccaaaagttctccccaacctcagcaaacaagccccaagaaagacgcagccccaaaacaggatctcagcaaagcacccgaaccaaaaaagccccctcctctagtaaagcaacctaccctgcacgggtcgccatctgcaaaggcgaagcagccaccggaagctgatagcctgagcaaacctgcccctccgaaggaaccttccgtcccatcagagcaggataaagcacctgtcgcagatgacaagccaaagcagccaaagatggtcaagcctaccactgacctcgtgtcatcctctagtgccactactaagcctgatattcctagttcaaaggttcaaagtcaggcggaggaaaagactactcccccactgaagacggattctgcaaaaccctctcagtcatttccaccaaccggagagaaggtgtcgccattcgatagcaaagccattccaaggcccgcttctgatagcaagataatatcccatcctgggcctagcagcgaatccaaagggcagaagcaggtcgacccggtgcagaagaaggaagaacccaaaaaagcacagactaagatgtctcccaaacccgatgccaagccaatgccaaagggaagcccaacacctccgggtcctaggcccacagccggacaaaccgtaccgacaccgcaacaatcccccaagccccaggagcaaagcaggaggttttcgctgaatctcggcagtatcactgacgccccaaagtctcaaccaaccacaccccaagagacggtgactggaaagttgttcggctttggggcttccatcttctcccaagcctctaacctgatcagtactgctgggcagccagggccacattcccagtctggtcctggagctccaatgaagcaagccccagctccatcccagccacccacttctcagggtccaccaaagtccacaggacaggcaccccctgcaccagccaagtccatcccagtaaagaaggagaccaaggcccctgcagccgagaagctggaaccaaaggcagagcaagccccaactgtcaaaaggactgaaaccgagaaaaagcctccccctattaaggactctaaaagcctgacagccgagccacaaaaggccgtgttaccaaccaaactcgaaaaaagtcccaaaccagaaagcacctgtccgctgtgtaaaactgaattaaatattggctctaaggaccctcccaattttaacacctgcactgagtgtaaaaaccaagtttgcaacctgtgcggatttaaccccaccccccacctgactgagattcaggaatggttgtgtctcaattgtcagacacaacgtgccatctctggacagctgggtgacattcggaagatgcccccagctccttcagggccaaaagccagtccaatgcctgtccccaccgaaagctcctcccagaagaccgctgtcccaccacaggtgaaactggtgaagaagcaggagcaggaagtaaaaaccgaagcggaaaaggttatcttagagaaggtgaaagagaccctgagcatggagaaaattcctcccatggtgaccaccgatcagaaacaggaagaaagcaagctggagaaggacaaggcgtccgcattacaggaaaaaaagccactccccgaggagaaaaaactgattcctgaagaagagaagatccgcagcgaggaaaagaagccactgttagaggagaagaaacccactcccgaggataagaaactgttgcctgaagccaagacaagcgctcccgaggaacagaaacatgacttgcttaagagccaggtgcaaattgctgaggaaaaactagaaggtcgcgtggctcccaaaaccgtccaggagggcaaacaacctcaaactaagatggagggcctgccgagcggaacacctcaaagcctgcccaaggaggacgacaagaccactaagaccatcaaagaacaacctcagccaccctgtactgctaaaccagaccaggtggagccaggtaaggaaaagacggagaaagaagatgataaatcagacactagctcgagccagcagcccaagtcaccccaagggctctcagatacaggatattcctctgatggcattagctcatcgctcggtgaaatccccagtttaatcccgactgacgagaaggacatcctgaaaggcctgaagaaggactctttttctcaagaatcaagcccctccagcccttcggatctggccaagctcgagagcaccgtactgtccattctggaggcacaggcctcaactctggctgacgagaagtcggaaaagaaaactcagccgcacgaggtgtccccagagcagcccaaagatcaagaaaagacccagtccttgagcgaaactctggaaatcactatcagcgaggaggaaattaaagagtcccaggaggagagaaaagacacattcaagaaagatagccaacaggatatcccctcttccaaggaccataaggagaaatctgaatttgtcgatgatatcacaacccgtagagagccatacgattcagttgaggaaagctccgaatcagaaaactcacccgtgccacagcggaaacgccgaactagcgtcggttcctctagcagcgatgagtacaagcaagaggactcacaaggctctggtgaagaagaagatttcattcgaaaacagatcatcgaaatgtccgctgacgaagacgcctctggatctgaggacgatgagtttataaggaatcagctgaaagaaatctcaagctcaacagagagccaaaagaaggaagagactaaaggcaagggaaagatcacggcgggaaagcacaggaggctgacccgaaagagtagtactagcatcgacgaggatgcaggcaggcgacattcttggcacgacgaagacgacgaggcctttgatgagtctcctgagctcaagtaccgcgagacaaaaagccaggagagcgaggagctggtggttacaggaggagggggtctgcgtcggtttaaaaccatcgagctgaacagtacgatagccgacaaatactcagcagagagctctcagaagaagacatctctttactttgacgaggaaccggaattagaaatggaatccctcaccgacagtcccgaagatcgcagtcggggagagggtagctccagtcttcacgcttctagctttacaccgggtacaagccccaccagtgtgtcatccctggacgaagactccgattcatccccgagccacaaaaagggggaatcaaagcagcaaaggaaagcaagacatcggccacatggacccctgcttccgacaatcgaagatagcagcgaggaagaggaattgagggaagaagaagagctgctgaaggagcaagagaagcagcgggaaatcgagcaacagcagaggaagtcctctagcaagaagtccaaaaaggataaagatgagctgcgcgcacaaagaaggcgggagagaccgaaaacgcccccatcaaacctctcccccatcgaggatgccagtccgacagaggagctgagacaggcagctgagatggaagagctgcaccgcagtagttgttcagaatacagcccaagtatagagtccgacccagaagggttcgagatttctccagagaagatcattgaggtgcagaaagtgtacaaacttccgactgcggtgagtctgtacagtcccacagatgagcagagcattatgcagaaagagggaagccagaaggctctgaagagcgctgaagaaatgtacgaagagatgatgcacaagacccacaagtacaaggccttccctgctgccaatgagcgggacgaagtgttcgagaaagagcccctgtatggtggaatgctgattgaggactacatttatgagagcttggttgaagatacgtacaacgggagcgtagatgggagcctgctgacacggcaggaagaggaaaatggatttatgcagcaaaagggtagggagcagaagattaggctaagtgaacagatctatgaagaccccatgcagaagattaccgacctccagaaggagttctacgaactggagtctcttcactctgtcgtgccacaggaggacatcgtgagttcaagttttataatccctgagtctcatgagatcgtggaccttggtacaatggttacaagcactgaggaggagcggaagctcctggatgcagacgccgcatacgaagagctgatgaagcgtcagcaaatgcagctgactcctggatcatcccctacccaggcgccaatcggcgaagatatgaccgagtcaacgatggactttgatagaatgcccgatgccagcttgacctcgtcagtgctgtccggggcttctcttaccgattctacttcttcagctaccttatctatcccagatgttaaaatcactcagcacttctcaacggaagagattgaggacgagtacgtcacagattatacgcgggagatccaagaaattattgcccacgagagccttatactgacttatagcgagccatccgaaagtgcaaccagcgttccaccttcagatacccccagcctgaccagttcagtgagtagcgtgtgtactaccgattctagttctccaattacaaccttggattcgattaccacagtgtacaccgagcctgttgacatgattacaaagttcgaagattccgaagaaatcagctctagtacctatttccctggcagcattatagactatccagaagagatttccgtcagtttggaccgtacagcgcctcctgacggcagggccagcgctgatcatatcgtcattagcctgagtgatatggcatccagcataattgaatcagtggtgcccaagccagaggggccagtggccgacactgtttcaactgacctgctaataagcgaaaaggatcccgttaaaaaggctaaaaaggagactggaaatggtattattctcgaagtacttgaggcctatcgggacaagaaggaactggaggccgagagaacaaaaagcagcctgagcgagacagttttcgaccatcctccaagttccgtgattgcgctgcctatgaaagaacagctgagcaccacctactttacgagcggcgaaacatttggccaggaaaagccagcctcacagttaccttcaggaagcccctctgttagtagcctgccagctaaaccgaggccattttttcgctcctcaagtctggacatctccgctcagcccccaccacccccaccgcctccaccccctcctccaccacctccacccccacctcctccacctccacttccccctccaaccagcccgaagcctacaatcttacccaagaagaagttaacggtcgccagtcctgtgactacagctaccccattatttgacgccgtcacgacactggaaacgacggcagttctgaggagcaatggcttaccagtaaccaggatatgcacaaccgcccctccaccagtgccacccaagccatcctctattccctctggcttggttttcacacatcgccctgagccctcaaaaccaccaatcgcccctaaacctgtgatcccccagctaccaacaaccacccaaaagcctaccgacatccaccccaaacctacgggccttagcctgacgtcgagcatgaccctcaacctggtgacgtccgccgactataagctgcccagccccacttctccactttccccccattccaacaagtcctccccaagattcagtaagtcactaaccgagacatacgtggttatcaccctgcccagtgagccaggcactccaaccgatagttcagcatctcaggcaataacatcatggcctttgggaagcccttccaaggacctggtttctgtggagccggtgttcagcgtggtacctcctgtgaccgccgtcgaaattccaatctcctctgagcagacgttttacatctccggagccttacagaccttctcagcaacgccggtgactgcgccaagctcctttcaagctgcccctacatcagtgacccagtttttaactaccgaagtgtccaaaaccgaggtgtccgccactcgaagcaccgcgccatccgtcggcctgagctctattagtataaccattccgcctgagcccctagctctcgacaacattcatttggagaagccacaatacaaggaggacgggaagttgcagctcgtgggcgatgtaatcgatctgaggacagtgcccaaagtggaagttaaaaccaccgacaagtgtatcgacttgtccgcatcaaccatggatgtcaaaaggcagatcaccgccaatgaggtgtatgggaagcagatctcggctgtgcagccctccatcattaacctgtccgtgaccagctccatagtgacacctgtgagcctggctaccgaaacagttacattcgtaacctgtactgctagtgccagctatacgactggtacagagagccttgttggagctgagcatgccatgaccacccccctgcagttgactacttcaaagcatgctgagcctccctaccgcatcccatcggatcaggtgttcccaattgctagggaggaggctcccataaatctgtcactaggcacccccgcacatgctgttaccctggccatcaccaaacctgtcaccgtgccgccagtgggggtaacgaatggctggactgactccacggtgtcccaaggcattacagacggcgaggtggtagacctcagcaccaccaaatctcacagaaccgtagtcacaatggatgagtccactagttccgtcatgacaaaaatcattgaggacgagaaaccagtggatctgaccgccggaaggagagccgtgtgctgtgacgttgtgtacaagctgccatttggtaggtcttgcacagcacagcaaccagctacaaccttgcctgaggacaggttcggatacagggatgatcattaccagtacgatcgatctgggccatacggctatcgtggaatcgggggtatgaaaccctccatgtccgacacgaatctcgccgaggctggtcattttttttataagtccaagaatgcttttgactactcagagggaacggatacagccgtcgacctcacctccgggagggtgactaccggggaagtgatggattactcgtcaaagaccaccggtccctaccccgagacacggcaggtcatctccggagccggaatcagcacaccacagtacagtactgcgcgaatgaccccccctcccggtcctcagtactgtgttgggtccgtgttgcgctcaagcaacggcgtggtgtactcttctgttgcaaccccaactccatctactttcgcaattaccacccagccgggatcgattttcagtacaactgtgagggatctcagcggaatccacacggctgatgccgtcactagtcttccagcgatgcaccactcacagcctatgccaagaagctactttatcactactggggctagcgagaccgacatcgctgtgaccggcattgatatttctgccagcctgcagacaataacgatggagagcttgaccgccgagacgatcgattccgtccctaccctaactactgccagcgaggtgttccctgaggtcgtgggagacgaatccgcactgctgatcgtgcccgaggaagataagcagcagcagcagttagatttagaacgcgagttgctggaactcgaaaaaattaaacaacagcgatttgcagaggaattggagtgggagcgccaggagattcaacgctttagggagcaggagaaaattatggtgcaaaagaagttggaggagctgcaatcaatgaagcagcatttactcttccagcaggaggaggagagacaggcacagttcatgatgcggcaagagactctcgcgcaacaacagctacagctggagcagattcagcaactgcagcagcagctgcatcagcaattggaggagcaaaaaatccggcagatttatcaatacaattacgaccctagtggaacggcttctccccagacgactacagaacaggctatcctggaagggcaatacgccgctttggaagggagccagttctgggccacagaggatgccacaacaaccgcttcagccgtagtcgcaatcgaaatcccacagtcccaggggtggtataccgtgcagagcgacggggttacacaatacattgcgccacctggtattcttagtacagtttccgagattcctctcacagacgtggtggtgaaggaagaaaagcaacctaagaagcgctcctccggcgctaaagtccgaggacagtatgacgatatgggagagaacatgactgatgacccgcgttcctttaaaaaaatcgtggatagcggagtccagaccgacgatgaagatgctacagaccgtagctatgtatccagacggaggcgaaccaagaagtccgtggatacatccgtccaaacagacgacgaggaccaagatgagtgggacatgcctactagaagccggaggaaggctcgggtcgggaagtatggcgattctatgactgaagcggacaaaacaaagccactgagtaaggtgtccagtatcgccgtccagaccgtggccgagatctcggtgcaaactgagccagttggcaccatccgcacgcccagcattcgggcacgggtggatgccaaggtagaaatcatcaagcacattagcgcgccagagaagacttacaagggaggctctctgggatgccagacagaggcagactcagacacgcaatccccacagtatctatcagccacttcaccacctaaggataaaaagaggcccactcccctggagatcgggtatagctcccatcttagggccgactccactgtccaactggcaccatccccacccaagtcacctaaagtgctttattcaccaattagcccacttagccccggaaaagcactagaatctgcatttgtgccatacgagaagccgcttcccgacgacatctccccccagaaagtgctgcatcctgatatggccaaggtgccccctgccagcccgaaaaccgccaagatgatgcagcgcagtatgagtgaccccaagccactgtcacccactgccgacgagagtagccgggcaccattccagtacactgagggttacaccaccaaagggagtcaaacaatgaccagtagtggcgcacagaaaaaagtcaaaaggaccctgcccaatcctccacccgaagagatctcgacagggacccagagcacgttctctacgatgggaaccgtgtccaggaggcgcatttgcaggactaacacaatggccagggcgaagatcctgcaggacatcgatcgggaactggacctggtggagcgagaatcagctaaactccgaaagaagcaagccgaattggatgaagaggaaaaggagatcgacgcaaaacttaggtatttagagatgggtatcaaccgacggaaggaggcgctgctaaaggagagagagaagcgggagcgcgcatatttgcagggagtcgcggaggacagggattatatgtctgactctgaggtgtctagcactcgccctactcgcattgagtcacaacacggaattgagcgcccacgcactgccccacagactgagttctctcagttcatcccaccccagacccagacagagagtcaattggtccctcccacatcaccatacactcaatatcagtactcttcacccgctctgcctacacaggctcccactagttatacacagcaatcccactttgagcagcagaccctatatcaccaacaagtctcaccatatcagacccaaccaacattccaggccgtcgccaccatgtctttcacaccccaagtgcagcctacccccacaccacagccctcctaccagcttccttcgcagatgatggttatccagcagaagccgcgtcaaacaacgctctacttagagccgaagattacatcaaattatgaagtgatccgtaatcagccactaatgatcgctccggtgagtaccgacaatacctttgcagtgtcacatctgggatctaagtataactccctggatttacgcatcggccttgaggagcgaagttcaatggccagcagtcctatttcatccatttctgctgactctttctatgccgatatcgatcatcacactccgagaaactatgtactgatagacgatatcggtgagattacaaaggggacagcagctttgtctaccgcctttagcttacacgaaaaggatctgtccaaaacagaccggcttcttcgcacaactgagacaagacggtctcaggaggtgacagactttctcgccccactccaaagctcttcacggttgcactcatatgtgaaagcagaggaggaccccatggaggacccttatgaacttaagctactgaaacaccagatcaagcaggaatttagacgaggcaccgagtccctggaccacttagccggtttgtcgcactactaccacgccgataccagttatagacatttccccaagtctgagaaatattcgatcagtcgcctcacacttgagaagcaggcagctaagcagctgccagctgcgatcttgtaccaaaaacagagcaaacataaaaagtctctcatcgacccaaaaatgtccaaatttagcccgattcaagaatcaagagaccttgaacctgattacagcagctatatgacaagcagcacgagtagcattggcggaattagctctcgcgctagacttctgcaagacgatatcacctttggcctgaggaaaaacataaccgatcagcagaaattcatgggctcgagcctggggacagggctgggaacgctcggaaatactatcagatccgccttacaggatgaggccgacaaaccatattcttctgggtcccgctctagacccagcagcagaccttcatcggtttacggcttggacctaagtattaaaagggactcttcctctagttcgctgaggctgaaggcccaggaagccgaggccctggacgtttcattcagccatgcctcttctagcgcccgaactaaacctacgtcgctgcccatctcccagagtagaggcagaatccctattgttgcacagaactctgaggaagaatccccactgtctccagtaggccagcccatgggcatggccagggccgcagctggaccattgcctccgatctctgcagatacccgcgaccagttcggctcttcccactctcttcccgaggtgcagcagcatatgcgggaggagagccgaacccgcggatatgaccgcgacattgcttttattatggatgacttccagcatgctatgagtgactctgaggcctaccatctgagacgcgaggaaaccgattggttcgacaagccacgggagagcagattagagaacggacacggactggaccggaaactgcctgagaggttggtgcattccaggcccttatcacagcatcaagagcagatcatccagatgaacggcaaaactatgcactatattttcccacacgcacgtattaaaattaccagagactctaaagaccatacagtttccgggaacgggttaggcatccgtattgtcgggggaaaggaaatccccggtcactccggagagattggggcatatatcgccaagatactgccaggtggttctgccgaacagaccggtaaactgatggaaggcatgcaggtgctcgaatggaatgggatccccctcacatccaagacgtatgaagaggtccagtctattatctcccagcagtccggcgaggctgagatctgtgtgagactggacctcaatatgttgagcgactccgaaaattctcaacacctggagctgcatgaaccgcctaaggctgtcgacaaggcgaagtcacctggggtggatccaaagcagctcgccgcagagctccagaaagtatccttgcagcagtcgcccttggtccttagcagtgtcgtggaaaaaggaagtcacgtgcactctggacctacctcagctggaagttccagcgttccgagtcccggtcagcctggctcacctagcgttagcaaaaaaaagcatgggtcttccaaacctaccgacggcaccaaggtggtgagccaccccatcacgggtgaaattcagctgcagatcaactatgaccttggaaatttgattatccacatcctccaggcaaggaacttagtgcctagggataacaacggctattcagacccatttgtcaaagtgtacctcctgccaggtcggggacaggttatggtggtccagaacgcctccgcagagtacaaacgtcgaaccaagcacgttcaaaagtctctgaaccctgaatggaaccagactgttatctacaagagtataagtatggagcagctcaagaaaaaaactctggaggtgacagtctgggattatgatcggttttcctctaatgactttctaggagaggtgctcatagatctgagcagcaccagccacctggataatacaccaagatggtatcccctcaaagagcagacagagtctatcgaccacggaaagagccattcctctcagagtagccaacagtctcctaaaccaagcgtgatcaaatcaaggtcacacggcattttcccggatccatcaaaagacatgcaggtccccactatcgagaaatctcacagcagccctggtagtagcaaatccagctccgaggggcatctgaggtctcatggaccctccagaagccagagtaaaacctccgtgacccaaacacatctcgaggatgcgggagccgcaattgcagctgcagaagcagccgtgcaacaactgcggattcaaccaagtaagagaagaaagtag

SEQ ID NO: 235054 - DNA, 10908 bp, synthetic construct
  misc_feature 1..10908: note = Description of Artificial Sequence: Synthetic coding sequence
  source 1..10908: mol_type = other DNA
atggggaatgaggcctccctcgaaggggaaggactgcccgagggactggctgccgctgctgccgctgggggaggcgcttccggtgcaggaagcccatcccataccgcaataccggcaggcatggaagctgatctgagtcaactctcagaggaagagagaagacagatagcggcagtgatgagtagagcccagggtttgcccaagggcagtgtccccccagctgcggcagagagcccctcaatgcacaggaaacaggagctggattcttcccacccaccaaagcagtccggcagaccccctgatcctgggaggcccgcacagccgggactgagcaagtcaaggacgactgacacattccgcagtgaacagaaattgccaggacgaagccctagtacaatcagcctcaaggagagcaagtctcgcactgatctgaaagaagaacacaaatcctccatgatgcccggatttctatcagaagtaaacgccctcagcgctgtgtccagcgtggtcaacaaatttaatcccttcgatctcattagcgactctgaggcatcccaggaagagaccaccaagaagcagaaggtggtgcagaaggaacagggcaagcccgagggcatcataaaaccgcctcttcaacagcagcctcccaaaccaatccctaagcagcaaggtcctgggagggatccactgcaacaggatgggacaccaaagtcaattagttcccagcagccagagaagatcaaaagtcagcctcctgggaccgggaaaccaatccaagggccaacacagacaccacaaactgaccacgcaaaattaccacttcagcgggacgccagtcgtccgcagactaaacaagccgacatcgtgcgaggggagagcgtgaagccaagtttgcccagtcctagcaaaccaccgattcagcagccgaccccagggaagccccctgcccagcaaccaggccacgaaaagtctcagccaggcccagcaaagccccctgcccagccttcaggcctcactaaacccttagcacaacagcccggtaccgttaagccgcctgtccagcctcctgggacaacaaaaccacctgctcagccccttggccctgccaaaccacccgcacagcagaccgggtctgaaaagccctcttcggagcagccaggcccaaaggcactggcgcagccaccgggtgtcggtaagacacctgcgcagcaacctggacccgcaaagcctccaactcaacaggttggcacccccaaaccactcgcccagcagcctggccttcagagcccagccaaagcccctggaccgacgaaaacccctgtgcagcctaagcccccaagccaacaaccaggatccaccaaaccccctccacaacagccaggtccagcaaaaccaagccctcaacagccgggatccactaagcctccgagtcagcagccaggctctgctaaaccttctgcgcaacagccctcacccgctaagcccagtgcacagcagagcaccaaacctgtgtctcagaccgggtccggtaagcccttgcaacccccaacagtgagccccagtgccaaacagccccctagccagggcctgcccaagactatctgccccctgtgcaacacgaccgagttgctgctgcatgtgcccgagaaagccaatttcaacacttgcaccgagtgccagacgactgtgtgcagcctgtgcggcttcaatcctaaccctcacctgaccgaagtcaaagaatggctgtgtctcaattgccagatgaaacgagcacttggtggcgatctcgcgcctgtgccctctagcccccagccaaagctgaaaacggccccagtcactacaaccagcgcagtcagcaaatcatcccctcagccacagcagacctcgccaaagaaagatgcggcacccaagcaggacttgtctaaggccccagagcccaaaaagccacctcctctggtgaagcagcctaccctgcatggatcgccaagcgctaaagcgaaacagccccctgaggccgattctctgagcaaaccggctcctcccaaggaaccctccgttccctctgagcaagacaaggccccagtggccgacgataaacccaagcagccgaagatggttaaaccaactacagacctcgtctcttcctctagcgccaccaccaaacccgacatcccctctagcaaagtgcagagccaggccgaagaaaagacaaccccaccattaaagacagacagcgcaaagccaagccaaagtttccctcccaccggagagaaagttagcccgttcgatagcaaggccatcccaaggccggcttctgattccaaaatcatttctcatcctggcccttcctctgaatccaagggccagaagcaagtggaccccgtccaaaaaaaggaggagcccaaaaaagcacagactaaaatgagccctaaaccagacgccaaacctatgccaaagggttcgcctaccccccctggccctcgtccaaccgctgggcaaacagtgcccacaccacagcagagcccaaaaccacaggaacaatcccgaaggttttcactgaatctggggagcataacggatgcaccgaagtcacagcccaccactccccaggaaaccgtgacaggtaagctgtttggattcggtgcatcaatctttagccaggcaagtaatttgatctccactgccggtcagcctggtcctcactcccaatcgggcccaggggctcctatgaaacaagccccagcccctagtcagcccccaaccagtcaaggaccacccaaatcaacgggccaggctccccctgcacccgctaagagcattcctgtgaagaaggagacaaaggcgccagctgctgaaaaacttgaacccaaggctgagcaggcacccacagtcaaaaggactgaaactgagaaaaagcctccaccaataaaggattctaagtctctgacagcggagccgcagaaagctgtgctccccacaaaactggaaaaatccccgaagcccgaaagtacctgccctctttgtaaaaccgagttgaatatagggtctaaagacccccctaactttaatacttgtacagaatgtaagaatcaggtatgcaacctttgcgggttcaaccctacacctcatttaaccgaaaattgtcagactcagagggccatctcggggcaattgggtgatattagaaagatgccacccgctccttccggtccgaaggctagtcctatgccggtgccaaccgagtcatcaagccagaaaaccgccgttccaccccaggtcaagctggtgaaaaagcaagagcaggaggtgaagaccgaagcagaaaaagtaattttagaaaaggttaaggaaactctctctatggagaaaatccctccgatggtaacgacagaccagaagcaggaggagtctaaactggaaaaggataaagctagcgccctacaagaaaaaaagccgctccccgaagagaagaagcttatccctgaggaggagaagatcagatctgaggaaaagaagccactcctagaagaaaagaaaccaacgcctgaggataaaaagcttctgcccgaagcaaagacctctgcacctgaagaacagaagcacgaccttctcaagagccaagtgcagatcgctgaggaaaaactggaaggccgtgtggctccaaaaacagttcaagagggaaagcaaccacagactaaaatggaaggcctgccttccggaaccccacagtccttgccaaaggaagatgataagaccaccaaaaccatcaaggaacagcctcaaccgccatgcactgcgaagccggatcaggagaaggaggatgataaatccgataccagttccagccaacagcccaagtccccacaggggttatctgataccggctatagctccgacgggataagctcatctttaggagagattcctagtctcatccctacggacgaaaaagacatcctgaagggacttaagaaggattccttcagccaggaatcaagcccaagctcacctagcgacctggcgaaacttgagagcacggtcctcagtatcctggaagcccaggctagcactctagccgacgagaaaagtgagaagaagacacaacctcacgaagttagtcctgagcagcccaaggaccaggaaaagacgcaatccctttccgaaactctggagatcaccatcagcgaggaggaaatcaaggaaagtcaagaagaacgcaaagacacgtttaaaaaggatagccagcaggatattcctagcagcaaagaccataaggagaagagcgagttcgtagacgatataactacccgacgcgagccatacgattcagtagaggaatccagtgaaagtgagaattcccccgtgccccaacgcaagagacggacaagcgtgggctctagttcttccgacgagtataagcaggaggacagtcaggggagtggggaagaagaggacttcatccgcaagcagatcattgaaatgtccgcagatgaggatgcatcggggtctgaggacgacgagttcattcgtaatcagctcaaggagatctcctcctctactgagagccaaaagaaggaggaaacaaaagggaagggcaaaattaccgccggaaagcaccgaaggctgacaaggaaatctagcacttccatagatgaggatgccggacgcaggcacagttggcatgacgaggacgacgaagccttcgacgagtcgcctgagctgaagtaccgggagactaagtctcaggagtcggaggagctggttgtgacaggcggtggcggattacggagattcaagactattgaactcaactcgacaatcgccgacaaatatagtgcagagagcagccagaaaaagacttcactttattttgatgaagaacctgagctggaaatggaatccctgacagactctcccgaggacaggagtagaggagaaggatcatcttccctgcacgccagttctttcaccccaggtacatctccaacgtccgtctctagcctggatgaggattcagattcaagcccaagccataagaaaggcgagagtaagcagcagcgcaaggcccgacatcggcctcacggtcccctgctgccaacaatcgaggattcatcggaagaagaggaactgcgagaggaagaagagctgctgaaggaacaggagaagcaacgagagatagaacaacagcaacgcaaatctagctccaaaaagtcgaagaaagacaaggacgagctccgtgcacaaagacgtcgagaacggccaaagacacccccttctaatctctccccaatcgaagacgccagtcccacagaagagcttcgccaagcagcagaaatggaggagctgcatcgatcctcctgctcagaatattcaccatctatcgagtctgatcccgaaggattcgagatatcacctgagaaaattatagaggttcagaaggtctacaaattaccaacagctgtgagcctgtatagccctactgacgagcagtcgattatgcaaaaggagggatcccagaaggccctgaagtcggctgaggaaatgtacgaggagatgatgcacaagactcataaatataaagctttccctgccgctaatgagagggatgaggtgtttgaaaaagagccactctacggagggatgcttatcgaagactatatatatgagagccttgtggaggatacctacaatggaagcgtggacggctccctgctgacccggcaggaagaggagaacggctttatgcagcagaaaggaagggagcagaaaatcagactctcagagcaaatttatgaagaccctatgcagaagatcactgatttacagaaagagttctacgagctggagtctctgcacagcgtggtgccccaagaggatatagtcagctcctcatttatcattcctgaatcacatgaaattgtggacttaggcactatggtcacctccacagaagaagagcgaaagcttctcgacgcggatgctgcgtatgaggaattgatgaaaagacagcagatgcagttgacacccggatcctccccgacccaggcccctatcggggaagatatgaccgagtcgaccatggacttcgaccgtatgcctgatgcctccctcacctccagcgtcctgtctggagccagcctgacagatagcactagctccgcaacattgtctattccggacgtgaaaatcacacagcactttagcacagaagagatagaagatgagtacgtcacagactataccagagagatacaggaaattattgctcatgaatctctgatcctcacctatagcgagccctccgaaagtgcaaccagcgtgcccccaagcgacacccctagcctgacatcctctgtgtcaagcgtgtgtacaaccgattcatcaagtcccatcaccacactggacagcatcacaacagtgtacacggagcctgtggacatgattaccaagttcgaggattctgaagaaatctcctcttcgacgtatttcccaggaagcataatcgattacccggaggagatatctgtgtctctcgacagaacggccccaccagatggcagggcttctgccgaccacatcgttatttccttatccgacatggcttcttctatcattgagtctgtggtcccgaaacccgagggtcctgtcgccgatactgtgagtacagacctcctcatctccgagaaggaccctgtcaaaaaagccaagaaggagactggcaacgggattatcttagaggttctggaggcctatagagacaagaaagagttagaagccgagagaaccaagagctcactcagcgagacagtattcgaccacccccctagttctgtgattgctttgcctatgaaggagcagctgagcacaacatatttcaccagtggagagacctttgggcaggaaaaacccgctagccaactcccttcagggagtccctcggtgtcgtccctgccggctaagccgcgaccgttttttcgaagctctagccttgatatctctgcccagcctccgccacctccaccgcctcctccgcctccccctccgcctccaccaccccctccacctccaccattaccacccccaacctccccaaagcctacaatcctccctaagaagaagttaacagtggcctctcctgttactactgcaacaccactttttgacgcagtcaccacacttgagacaacagctgtgcttcgaagcaatggactccccgtgacacgaatttgtacaactgccccaccccctgtcccacctaagccaagttctataccctccggcctggttttcacgcaccggccagaaccctcaaagcccccaattgcccctaagccggtgatcccccagctgccaaccactactcagaaaccaacagacatccatcctaaacccaccggcttgagtctaacctctagtatgacactgaacctagtcacctcagctgactacaagctgccatcgccaacctcacctttgagcccccatagtaataagagttccccacgcttcagcaaaagtcttactgagacatatgtggtcatcactctaccctctgagcccggtacacctaccgactctagcgcgtcacaggcaattacgtcttggccactgggatcgccctccaaggatctggtcagcgtggagcccgtgttctctgtggtgccacctgtgaccgcagtggagatccccatctcctcagaacaaaccttttacatttctggagccctgcagaccttctccgcaaccccagtcacagctccctcctccttccaagctgcccctacaagtgtgacccagttcctgactactgaggtgtctaaaacagaggtctccgcaacaaggtctacggcaccttctgtcggcctgagcagtattagcatcactatcccgccagagcccctcgccctcgataacatccacctcgagaaaccccagtacaaagaggacggaaaactccaactggtcggagacgtcatcgacctgagaacagtcccaaaagttgaggtcaaaacgacagataaatgcatcgacctcagcgcatcaaccatggacgtgaagaggcagatcaccgcaaacgaagtatatggaaaacagatctccgccgttcagccaagcattattaacttatctgtgacttcctccattgtgaccccagttagcttggctactgaaactgttacctttgtcacatgtacagcgtcggcctcctatactactggaaccgaatcccttgtgggagccgaacacgctatgaccactccgctgcaattgacaaccagcaagcacgccgagcccccatatagaatcccctccgaccaggtgttccctatcgcaagggaggaggctcccattaatttgagtctgggtactcctgcccatgcagtgacattggctataaccaagcccgtaacagtccctccagttggagtgactaacggttggactgacagcactgtctcccaaggaatcaccgacggtgaggtagtggatctcagtaccacgaaatctcaccggacggtcgtgactatggatgagtccacttcctccgtgatgacaaaaattattgaggatgagaaaccggtggaccttaccgctggacgcagggcggtctgctgtgatgtagtttataagctgccattcgggaggagttgcacagcacaacagccggcaaccactctcccggaagatcgtttcggatacagggatgaccattatcaatatgaccgcagcggcccatacggataccgaggcatcggtggaatgaagccttccatgagcgatactaatttggccgaggccggtcatttcttttataagtctaagaatgcctttgactattcagaaggcacggacacagctgttgacctgacaagtggcagagtcacaaccggggaagtgatggattacagttcaaagaccactggtccctacccagagacccggcaggtgatcagtggcgcaggcattagcacaccgcaatacagcactgccaggatgacacccccacccggaccgcagtactgcgtagggtcagtactgaggtcatccaacggggtcgtgtattcatctgtggctacccctacaccctctaccttcgctatcaccacacagccaggaagcattttttccacaacagtgcgagatctgtctgggattcacactgctgatgcagttacatccctgccagccatgcaccatagccagcccatgcccagatcttactttataacaacgggagcgagcgaaactgacatagctgttaccggaatcgatatctccgccagcttgcagactatcacgatggagtctctcactgctgagaccatcgactcagtgcccacactgaccactgcatctgaggtattccccgaagtggtgggggatgaaagcgctttgttgattgtccccgaagaagataagcagcagcagcagttggacctggagcgtgagctcttagagttagaaaagattaagcagcagaggttcgccgaggagctggagtgggagaggcaagagattcagcggtttcgagaacaagaaaaaattatggtacaaaaaaaactcgaggagttgcagtccatgaagcagcaccttctgttccaacaagaagaagagaggcaggcacagttcatgatgaggcaggagaccctcgcccagcaacagctgcagctcgaacagatccagcagttgcaacagcaattacaccaacagttagaagagcagaagatccgacaaatatatcagtacaattacgatcctagcggaactgcctccccacagacaactacggaacaagccattctggagggtcagtatgcagcactggaaggcagccaattctgggcaacagaagatgcaaccaccacagccagtgccgtggtggcaatagagatcccgcagagtcagggatggtatactgtacagagtgacggagtcactcaatacattgctcctcccggaattctgagcactgtaagtgagatccctttgacagatgttgttgttaaggaggagaaacaacccaaaaagcggagttctggcgctaaggtgcgcggacaatacgatgatatgggtgaaaacatgactgatgatcccagaagcttcaaaaagatcgtggactcaggagtccaaacagatgacgaggacgccactgacaggagttatgtgtctcgccgacggaggacaaagaaatctgttgacacttctgtgcaaacagacgacgaagatcaggacgaatgggacatgcctacccgttccagacggaaagcccgtgtggggaagtacggtgactccatgactgaggccgataagaccaagcctttatccaaggttagctctattgccgtacagaccgtggctgagatttccgtacagaccgagcccgtcggcaccattcgcacaccatccattagggctcgcgttgatgccaaagtggagatcatcaagcacattagcgccccagaaaagacttataaaggaggcagccttggttgtcagactgaggctgacagcgacacacagtcaccgcaatatttatctgccacatccccacctaaagacaagaagcggcctacgcccctggagatcgggtatagcagtcatctgagggctgacagcaccgtccagctggctccctctccgccaaaatctcccaaggtgctctactcccccatcagtcccttgagtccaggcaaggccctggagtctgccttcgttccatatgaaaaaccccttccagacgatatctccccgcaaaaggtgctgcatcctgacatggccaaagtgccccctgcctctcccaaaaccgctaaaatgatgcagcggtcaatgagcgaccccaaacctctgagcccaaccgcagatgaatcaagcagagcaccattccagtacacagagggctacacgtat

SEQ ID NO: 235055 - DNA, 1635 bp, synthetic construct
  misc_feature 1..1635: note = Description of Artificial Sequence: Synthetic coding sequence
  source 1..1635: mol_type = other DNA
atggagaagttgcaggaacaccttatcaaagctaaagcattcacgatcaaaaagacattggagatctacgtcccaatcaagcagttcttctataatctgatacatccagagtatagtgccgtgactgacgtctatgtgctgatgttcctcgctgacactgtcgatttcatcattattgtcttcggcttttgggcctttggaaaacattccgcagctgctgacatcacgtcttcattgtctgaagaccaggtgcctggcccattcctggtaatggtgctgatccaattcggcacaatggtggtggacagggcactgtacctgagaaagactgtgttgggcaaggtgatattccaggttatccttgtatttgggattcacttctggatgttcttcatccttcccggagtgacagagcggaagttctcgcagaacctcgttgctcagctctggtactttgtgaaatgtgtgtattttggcctgagcgcgtaccaaatccgttgtggctatccaacacgagtccttggaaatttcttgactaaaagctacaactatgtaaatctgttcctgttccagggcttccggctggtaccgttcctgactgagctaagggccgttatggactgggtgtggaccgacacgactctgtctttatcgtcatggatatgcgtggaggatatctacgctcacatattcattctcaaatgttggcgggaatctgaaaaaccgatctttacgatgagtgcccagcagtcacagctcaaggtgatggatcaacaatcctttaataagttcatccaggctttctccagggacactggcgcaatgcagttccttgaaaattatgagaaggaggacattacagtcgccgaactcgagggtaatagcaactctctgtggaccatcagcccaccctctaaacagaagatgattcacgagcttctggaccccaacagctcgttctcagtggttttttcatggagtatacagagaaatttgtccctgggcgcaaaatcagagattgcgacggataagctttcattccctcttaaaaatatcacaagaaaaaacattgccaaaatgatagcaggaaactctacagaatcctccaaaacccccgtgactattgagaagatctatccgtattacgtcaaggcaccttctgactcgaactctaagccaataaagcagcttctatcagagaataactttatggatatcacaataatactgtccagagacaacaccactaaatataactccgagtggtgggtcctgaatctgaccggaaatagaatttacaacccaaatagccaggccctggaactggtggtgttcaatgacaaagtctctcctccttccctggggtttctagccggatatggaattatgggcctgtacgcctccgtggtgctagtcattggtaaattcgtccgcgagttcttcagtgggatctctcatagtataatgtttgaagagctgcccaacgtggatagaattctcaagttgtgcacagacatcttcttggtgagggagacaggggaactggagctggaggaggacctctacgctaagctgatctttttatataggagtccggaaactatgatcaagtggactagggaaaagaccaactag

SEQ ID NO: 235056 - DNA, 8258 bp, synthetic construct
  misc_feature 1..8258: note = Description of Artificial Sequence: Synthetic coding sequence
  source 1..8258: mol_type = other DNA
atggcatcggaagtagtctgcggtttaatcttccggctgcttctgccgatctgcctggctgtggcatgtgcgttcaggtataacggattatcctttgtgtacttaatttacctcctgttaatacctctgtttagcgaacctaccaagactactatgcagggccataccggtcggctgctgaaatcactgtgttttatttcattatcctttctgctgctgcacatcatcttccacattaccctggtatctttagaagctcagcaccgcattgcacccggatataactgcagcacatgggaaaagaccttcagacagatcgggtttgagtcccttaaaggcgctgacgcaggaaacgggatacgggtgttcgtgcctgacataggaatgtttattgcatccctgactatttggcttctctgtaggaacattgtccagaagcccgttacagatgaagccgcacagtccaaccctgaatttgagaacgaagaattggctgaaggggagaagatagactccgaggaagccctcatctacgaagaggattttaatggcggagacggagtggagggcgagttggaagagagtaccaagttgaaaatgtttcgacgactagcctctgtagcgtcaaaacttaaggaattcatcggcaacatgataaccaccgccggtaaagtggtggtgactatcttattggggtcttctggaatgatgttgccctcgctcacatccagtgtgtacttcttcgtgtttttaggcttatgtacatggtggtcgtggtgcaggacgttcgatcctctgctgtttagctgtctttgcgtcctactggccatctttacggcgggtcacctcattggactgtacctgtaccagttccagttctttcaggaagcagtgcctccaaacgactactacgcccgactttttggcattaagagcgtgatccaaacagactgctcctccacttggaagatcatagtgaatccggatctcagctggtatcaccacgcaaacccgatcttgctgttggtcatgtattacactctggcaactcttattcgaatatggttacaggaacccctggtccaggatgagggcacaaaagaggaggacaaggcactcgcctgttcacccatccagattacggccggacgcagaagatcgttgtggtacgccacacattaccccaccgatgagagaaagctgttgagcatgactcaggatgattataagccaagtgatggcctcctcgtcactgtgaacggcaacccggtcgattaccacaccatccatccttccctcccgatggaaaatggcccagggaaggcggatctgtactccaccccccagtatcgctgggagccttcggacgaaagttctgagaagcgagaagaggaagaggaggaaaaggaggagttcgaagaagagcgtagtagggaagaaaagcgaagtataaaggtgcatgccatggtttctgtgttccagttcattatgaagcagagctatatctgcgccctaatcgcaatgatggcctggtccattacgtaccattcatggctgacgttcgtgttacttatctggagctgtacactgtggatgattagaaaccgcaggaagtatgccatgatctcgagcccattcatggtggtctatggtaacctcctgcttatcttacaatacatctggtctttcgaactgcctgagataaagaaggttcctgggtttttagagaaaaaagaaccaggagagttagcctcaaagatcttattcacgataacgttctggctgctcctgaggcaacatctgaccgagcagaaggcactgcaagaaaaagaggcgttgctcagtgaggttaaaatcggctcccaagaaaatgaggagaaggacgaggaattacaggatatacaggtcgagggagaaccgaaagaagaggaagaggaggaagcaaaggaggaaaaacaagagaggaaaaaggtcgaacaagaggaggccgaggaggaggacgaacaggacatcatgaaagtgttaggcaatctggtcgtcgctatgtttatcaaatactggatctatgtatgcggaggcatgttttttttcgtttctttcgagggcaaaatcgtgatgtataagataatatacatggtattgttcctattctgcgtggccttgtatcaagttcactatgagtggtggcggaaaatcttgaaatatttctggatgagcgtcgtgatttacacaatgctggtgctgatcttcatttacacgtaccaattcgagaactttccaggactctggcagaatatgacaggtcttaaaaaggaaaagctggaggatctgggattgaaacagttcacagtggcggaactttttacccgcatctttatccccacgagcttcttactggtgtgcatactgcatttgcattactttcatgacagatttctggagctcacagacctgaagtctatcccatctaaggaagacaatactatttatcgcctcgcccaccctgaggggagccttccggacctcaccatgatgcatctgaccgcatccctcgaaaagccagaggtgcgcaagctggccgagccaggggaagagaagctcgagggctacagcgaaaaggcgcagaagggagacctggggaaggattccgaggagtccgaggaggatggagaggaagaagaagaatctgaggaggaggaggaaacctctgaccttcggaacaagtggcacctcgttatcgatagactgaccgttctttttctgaagtttctagagtattttcacaagttgcaggttttcatgtggtggatcctggagcttcacatcatcaagattgtgtcctcttacatcatctgggtctccgtcaaggaggtctccctgttcaattacgtttttctgatcagctgggccttcgctcttccgtacgccaagctgcgccgacttgcatcctccgtgtgcactgtgtggacctgtgtgattatcgtgtgcaagatgttgtatcagttgcagaccattaagcctgagaacttcagcgtgaactgcagcctgccaaatgagaatcagacaaacatcccctttaacgaacttaataaaagcttactctattccgctccaatcgaccctacagaatgggtcggattgaggaagtcctcacctttgttggtttacctgcgtaataatctactaatgttggcgatcctggctttcgaagtcacaatatataggcatcaggaatattacagagggcgaaacaacctgaccgctccagtttcccgaacaatttttcacgacataacgagactccatctggacgatgggctgattaattgtgctaagtactttattaattacttcttttacaagttcggactggagacctgtttcctgatgtctgtcaacgtgattggacagaggatggacttttatgccatgatccatgcctgttggctcatagccgttttgtaccgcagaaggcggaaggcaattgctgagatatggccaaaatattgttgtttcctggcctgcattataacattccagtactttatctgcatcggaatcccccctgccccatgccgggactatccgtggagatttaaaggagcttcttttaatgacaatatcatcaagtggttgtatttccctgatttcatagtgcggccaaaccccgtgttcctggtttacgattttatgctgctgctgtgtgcttcccttcagcggcagatcttcgaagatgagaacaaggccgcagtgcgcataatggcaggggacaacgtagaaatttgtatgaatctggatgctgcttcatttagccagcataatcctgtgccagattttatccactgtcggtcatacctggacatgtctaaagtcattattttcagttatctgttctggttcgtcttgacgattattttcattactgggaccactagaatatcgatcttctgcatggggtacctggtcgcttgcttctactttctgctgtttggcggtgacctgctcctcaaaccaatcaaatctattcttcgctattgggattggctgattgcctacaatgttttcgtgattaccatgaagaatattctttccatcggcgcatgcgggtacatcggtacactggtgcacaattcttgttggctgatccaggcattcagcttggcttgtacagtaaaaggctaccagatgccagctgccaactccccgtgcactctgccaagtggcgaagcgggaatcatttgggatagtatctgttttgctttccttctgttacagagaagagtattcatgagttattacttcttgcatgtggttgcagatatcaaggcttcacagatcctcgcctcccggggagcagagcttttccaggctacaattgtgaaagctgttaaagcacggatcgaggaggagaagaaatccatggaccaattgaagcgccaaatggacagaatcaaggcccgacagcagaagtataagaagggtaaagagcgaatgctatctctgactcaggagcccggagaaggacaggatatgcagaagcttagcgaagaggatgacgagagggaagcagataaacagaaggccaagggcaagaaaaagcagtggtggaggccctgggtagaccacgcctccatggtacgcagcggggattactatctgtttgagaccgacagcgaagaggaggaggaagaggagctcaaaaaggaggacgaggaaccccctagacggagcgcctttcagttcgtctaccaagcttggattaccgatccaaagactgctctgcggcagcggcataaggaaaagaagcgatccgccagggaggaaagaaaaaggcggagaaaaggctccaaggaggggccagtggagtgggaagaccgcgaagatgagcccatcaaaaagaagagcgacgggccagacaacattataaagagaatcttcaacatcttaaagtttacttgggtgctgtttctggcaaccgtggattcgttcaccacatggctcaatagcatcagcagagagcacattgacatttctacagtactgcgcatcgagagatgtatgctgacccgggagattaagaagggcaacgtgccaacccgggaatctatacacatgtattaccagaatcacatcatgaacctttcccgcgaaagtggactggataccatcgatgaacatccaggggctgccagcggtgcacagaccgctcaccggatggactccctcgacagtcatgattcgatttcttcagaaccaacacagtgcacaatgttgtactctaggcagggcaccactgagaccatcgaggaagtcgaggcggagcaggaggaggaggcagggtcgacggccccagagcctcgcgaagccaaagagtacgaggccacaggctacgatgtgggcgctatgggcgcagaagaagcttccctcaccccggaggaggagctgacccagtttagtactctggacggagatgttgaggctcccccaagttatagcaaggccgtgtctttcgagcacctcagcttcggctctcaggatgatagtgccggtaaaaatcgaatggcggtgtctcctgacgatagtcgcacagataagttgggcagcagtatcctgccccctctgactcatgagctgaccgccagcgagttattgctgaaaaagatgttccatgacgatgagctcgaggagagcgagaagttctacgtgggccagccgaggttcctgttgctgttctacgccatgtacaatacacttgtcgctaggagtgagatggtgtgctacttcgtcataattctgaatcacatggtctccgccagcatgattacccttctcctgccaatcctcatttttttgtgggctatgctaagcgtgccccgaccgtccaggcggttttggatgatggcgatcgtctacactgaagtggccatcgtggtgaaatactttttccaatttgggtttttcccatggaataagaatgtggaagtgaacaaggacaagccttatcatccccctaatataatcggcgtggagaagaaagaaggttacgtcctttatgatctaatacaacttcttgctttatttttccacaggtccattctgaaatgtcacggcctctgggatgaagatgacatgacagaaagtggtatggcgagggaggaaagtgatgacgagctgtcactcggacacggccgaagagacagttcagacagcttgaagtcaatcaatttagcggcttccgtggagagtgtgcacgttaccttccctgaacagcagactgcagtccgaagaaagcgcagtgggtcgtcgtccgagccttcccagcggtcctcattctcttcgaatagaagtcaacggggttccacgtctacccgcaattcatctcagaagggatcctctgtcctgagcatcaagcagaaaggcaaacgggagctgtatatggagaagctgcaggagcacctgataaaggccaaagccttcactatcaagaagaccctggagatttatgtgcctattaaacagttcttctataacctgattcatccagagtatagtgcagttacggatgtctatgtactgatgtttctcgccgatacagtggacttcattatcattgtttttgggttctgggcctttggcaaacatagcgcggcagcggacatcacaagttccctgagcgaggaccaggtacccggaccatttcttgtgatggtcctcattcagtttggcacaatggtcgtggacagagccctctatctgcggaagaccgtgctggggaaggtaatctttcaggtgattctggtgttcggcatccatttttggatgttcttcatacttccaggggtaactgagcggaagttctcacaaaacctggtggcccagctgtggtatttcgttaaatgcgtgtactttggtctctccgcttaccaaatccgatgcggctatccaacccgcgtgttaggaaatttcctgacaaagagttacaactacgtgaatctttttcttttccagggcttccgactagtgcctttccttacagaactcagggctgtgatggattgggtctggacagataccactttaagtctgtctagctggatttgtgtggaggacatctatgcacatatctttatcctgaagtgctggagagaatcagagaaacggtacccccagcctagaggtcagaaaaaaaagaaggttgtgaagtacggtatgggaggcatgataatcgtcctcctgatttgtattgtctggttcccattgctgtttatgtctctcatcaagagtgtcgctggtgttatcaaccagcccctggacgtgtcagtcacaatcaccctgggaggctaccagccaatctttactatgtccgctcaacaatcgcagttgaaggttatggatcagcagtcgttcaacaagtttatccaggccttctctcgcgatactggggcaatgcaattcctggaaaactacgagaaggaagatatcacagtggccgagcttgagggaaatagcaattcactgtggaccatctccccaccttcaaagcaaaagatgattcacgagttactggatcccaacagcagtttctcagtggtttttagttggtcaatccagcggaacctttccctaggggctaagtccgagattgccactgataaactgtcttttcctctgaagaacattacacgtaaaaatatcgcaaagatgatagcgggaaactcaaccgagagcagcaaaacaccagttactatcgagaaaatttacccttactatgtcaaggccccaagcgatagcaattcaaagcctataaagcagctgttgtccgaaaacaactttatggacatcaccattatcctaagcagggataatacaacaaaatataattccgagtggtgggttttgaacctgacaggcaatcgaatctacaatcctaactctcaagcactggaacttgtagtgtttaatgacaaggtgtcacctcccagcttgggctttctagccggttacgggatcatggggctgtatgcatctgttgttctggtgatcggaaaattcgtaagagagtttttttctggaatctcacactccataatgtttgaagagctccctaatgtggataggatcttgaagctgtgcacagacatctttcttgttagagagactggggagttagaattagaagaggatctgtacgctaagctgatctttctgtaccgcagccctgaaaccatgatcaaatggacgcgcgagaagacaaacta

SEQ ID NO: 235057 - DNA, 1692 bp, synthetic construct
  misc_feature 1..1692: note = Description of Artificial Sequence: Synthetic coding sequence
  source 1..1692: mol_type = other DNA
atgtccgtggtgatctatacaatgctggtgcttatcttcatctacacatatcagttcgaaaatttccccggactgtggcagaacatgaccggcctgaagaaggaaaagctggaggacttgggcctgaagcagttcacggttgcagaactgttcacacgcatcttcatcccgacatcctttctgcttgtgtgtatactgcacttacactatttccacgacagatttctggaactgacggatttgaagtccatccccagtaaggaggacaatactatctacagtcacgcgaaagtgaacgggagagtttatctgatcatcaactcaataaaaaagaagcttcccatccaccagaatgagttggctcaccccgaggggagtctgcctgaccttaccatgatgcatctgaccgcttctctggagaagccagaggtgcggaaactcgccgagcccggagaagagaaactggaggggtactccgaaaaggcgcagaaaggcgacctcggcaaagacagcgaagaaagcgaggaagatggcgaggaagaggaggagagtgaggaggaggaggaaacctctgacttgagaaacaaatggcacctggtgatcgataggttgacagtcctgtttttaaagtttctggaatacttccataagctgcaagtgtttatgtggtggatacttgaactacacattatcaaaattgtgagtagctacatcatctgggtatctgtaaaagaggtcagcttatttaattatgtttttctgatatcttgggctttcgctctgccatacgctaagctgaggagactagcttcgagtgtatgtactgtatggacttgtgtgattatcgtgtgtaagatgctgtatcagctccagacaatcaagccagaaaacttcagcgtaaactgttccctcccaaatgaaaaccagaccaacattccttttaatgagcttaacaagtcactcctctacagcgctccgattgaccctacagagtgggtgggcctccgtaaaagctctcccctgttggtttacttgaggaacaatctgctgatgctagcaatcctcgctttcgaggtcacaatctatcgacaccaggaatattaccgtggtagaaataacctgactgccccagtgtcacgtactattttccacgatatcacccgcttacatctggacgacggattgattaattgtgccaaatatttcatcaattactttttttataaattcggcctggagacttgcttcctgatgagcgtgaacgtgatcggccagaggatggatttttatgcaatgatccacgcctgctggctgatagccgtattatacaggcgcagacgtaaggctatcgccgagatttggcccaagtactgctgcttcctggcgtgcattattacattccagtatttcatatgcattggcattcctcctgctccttgtcgtgactatccatggcgttttaagggggctagcttcaacgacaacattattaagtggctgtactttcctgatttcatagtccgacctaacccagtctttttggtgtacgacttcatgctattgctgtgcgcctctctccaacggcagatcttcgaggatgagaacaaggccgcagtgcgaatcatggcaggcgataatgtggagatttgcatgaaccttgatgctgctagcttttctcaacataacccatag

SEQ ID NO: 235058 - DNA, 1941 bp, synthetic construct
  misc_feature 1..1941: note = Description of Artificial Sequence: Synthetic coding sequence
  source 1..1941: mol_type = other DNA
atgacagagagcgggatggcacgggaggaaagcgatgatgagctgtcacttgggcatggacgcagagactcatcagactcccttaaatcaatcaatcttgccgcaagcgtcgaatcagtgcatgtgacgttcccggaacagcagaccgcggtgaggcgaaaacggtctggaagctccagcgaaccaagccagcggagctccttctctagcaacaggagtcaacgaggctctacatccacaagaaacagcagtcagaaagggtcctctgtgttaagcatcaaacaaaagggaaagcgagaactatacatggaaaaactccaggagcatctgattaaagctaaggcttttacaattaagaagacgctggaaatatatgtgcccatcaagcagtttttctataacctgatccaccccgagtatagtgccgtgactgacgtctacgtgctcatgtttttggccgacaccgtggatttcatcatcatcgtgttcggtttctgggccttcggcaagcactcggcagccgctgacatcacatcttccctaagtgaagatcaggtaccaggacctttcctcgtcatggtgctcatccagtttgggacgatggtggttgacagggcgttatatctgagaaagaccgtgttgggaaaagttatcttccaggtaatcctcgtttttggcatccacttctggatgtttttcatcctgccaggagtcacggagcgcaagttttcccagaatctggttgcccagctgtggtatttcgtgaagtgtgtgtatttcggcctcagtgcctaccagatcagatgtggctaccccaccagagtccttgggaattttcttaccaagtcgtacaattacgtgaacctcttccttttccagggttttagactcgtgccatttctgactgagctcagggctgtgatggattgggtctggacagatacaacactaagtctgagctcatggatatgtgttgaggacatttatgcccacattttcattctgaaatgttggagggagtccgagaagccgattttcaccatgtcagcacagcagtcccagctaaaggtgatggaccaacagtcattcaataaattcattcaggccttctccagggacaccggggcaatgcaattcttagagaattacgaaaaggaggacattacagttgcagaactcgaaggaaattcaaattccctttggaccatcagcccccctagtaaacagaaaatgatccatgagctcctggatccgaattcctcatttagcgttgtgttctcttggagcatccagaggaacctctctctcggcgcaaagtcagaaatcgctaccgacaaactgtcttttcctctcaagaatatcacccggaagaacatcgctaaaatgatagctggcaatagcaccgagtcttccaaaacacccgtaactattgagaaaatctacccctactacgtgaaagccccttccgatagtaatagcaaaccgatcaagcagctgcttagcgagaataattttatggatataactatcattctctcacgggataatacaacaaaatacaactccgagtggtgggttctgaatctcaccggcaaccgcatttacaacccaaatagtcaggccctggaacttgtggtgttcaatgacaaagttagtccaccctccctgggctttctggccggttatgggatcatgggcctctacgcctctgtggtgcttgttatagggaaattcgtccgggagttcttcagcggcataagccatagtatcatgttcgaagaactccctaatgtcgatcgaattctcaaactgtgcactgatattttcttggtgcgcgagactggcgagttggagctggaggaggatctttacgccaagctgatcttcctttacagatcacccgaaaccatgattaaatggacccgcgaaaaaacaaactag

SEQ ID NO: 235059 - DNA, 2130 bp, synthetic construct
  misc_feature 1..2130: note = Description of Artificial Sequence: Synthetic coding sequence
  source 1..2130: mol_type = other DNA
atgacggaaagcggtatggcacgcgaagagagcgatgatgagttatcgcttggccacggtcgcagggatagttccgattctttgaagagcatcaacctcgccgcttccgtggaatccgttcatgtcacctttcccgagcaacagactgcggtaaggaggaagaggagtgggtcaagtagcgagccgtctcaacgttcaagcttttcatccaatcgctcccagagaggatcaacttcaacccgcaattcctcacagaagggcagctcggtcttaagcattaaacaaaaagggaagcgagagttatatatggagaaactgcaggaacacctgattaaggcaaaagcctttaccattaagaagaccctggagatttatgttccaataaaacagttcttctacaatttgattcatcccgagtattcagctgtcactgacgtgtacgtgctaatgttcctcgccgatacggtggacttcattatcattgtattcggtttttgggcctttggcaaacactcagcagccgcagacattaccagttctctttcagaagatcaggtgcctgggccattccttgtcatggtcctgatccagttcgggactatggttgtagatcgcgctctttaccttaggaaaaccgtcctaggaaaggttattttccaagtcatccttgttttcggtatccacttctggatgttctttatccttcctggtgtcaccgaacgtaaatttagccaaaaccttgttgcgcaactctggtactttgtcaaatgtgtgtactttggactttccgcctatcagattagatgcggatatcctactagagtgctgggcaatttcctgacaaagtcatataactatgtaaatctgttcctttttcagggctttcgcctggttcctttccttaccgagctgagagctgtgatggactgggtgtggacagacaccacgctttctttgagcagttggatttgcgttgaggacatctacgcgcatatttttattctgaaatgctggcgggaatctgaaaagcgctatcctcagccacgagggcagaagaaaaagaaggtggtgaagtacggtatggggggaatgatcatcgtcctccttatatgcattgtctggttcccactactcttcatgtctctgatcaagtctgtcgccggagtcataaaccagcctctagatgtcagcgtgacgatcactttagggggatatcagcccatcttcacaatgtctgctcagcagtcacagctgaaggtgatggatcagcagtcattcaacaaattcatccaagcattctcaagagataccggggctatgcaattcctcgagaactatgaaaaagaggatatcacagtagccgagctggaaggtaattccaactccctctggacaatcagtccaccctctaagcaaaaaatgatccatgaactcctggatcccaatagctctttttcagtcgtgttctcatggtctattcagcggaacttgtctctgggggctaaaagcgagatcgcaacggataaattaagttttccactcaaaaacattacacggaagaacattgccaagatgatagctgggaatagcaccgagtcttcaaaaacccccgtgaccatcgaaaagatttacccatactatgtgaaagcaccctccgatagcaatagtaaacctattaaacaacttctgtcagagaacaacttcatggacatcacgatcattctctccagggacaatactacaaagtacaacagcgagtggtgggtgctgaatctcaccggcaaccgcatatacaacccaaacagtcaagccctggaacttgtggtatttaacgataaggtgagccctccatcattagggttcctcgcgggatacggcattatgggcctctacgcttccgtggtgttagtcattggaaagttcgtgcgggagtttttctccggaatctctcactccattatgtttgaggagctgcctaatgtcgatcgtattctcaaactatgtaccgatatcttcctggtgcgcgaaacgggtgagctggaactggaagaggatttatatgcgaagcttatatttctttacaggtctccggagaccatgatcaagtggaccagagagaaaacgaactag

SEQ ID NO: 235060 - DNA, 2565 bp, synthetic construct
  misc_feature 1..2565: note = Description of Artificial Sequence: Synthetic coding sequence
  source 1..2565: mol_type = other DNA
atggcgctgcggctggtggcagatttcgacctcgggaaggacgtgctgccttggctaagagcgcagcgggcagtgtccgaggcatccggcgcaggttccggaggtgcagatgtgctcgaaaacgactacgagagcctacacgtgctaaacgttgagcgaaacggtaatataatttacacttacaaggatgacaagggaaatgtcgtgttcggcctgtacgattgccaaacgaggcagaatgagttactctatacattcgagaaagatctgcaggtctttagctgttctgttaactcagaacggactctcctcgcggctagtcttgtccagagtaccaaggagggtaaacgcaacgaacttcagcccggatctaaatgcttgaccttgcttgtagagatccaccctgttaacaatgtgaaggttctcaaagctgtggacagttacatatgggtgcagtttttgtacccccacattgagtcccaccccttacccgagaaccatctgctgctcatctcggaagagaagtacatcgagcagtttcgcattcacgtggcccaggaagacggaaacagagtggtaatcaagaattcgggccatctacccagggaccgcatagccgaggatttcgtctgggcccaatgggacatgtccgagcagaggctgtactatatcgacttgaagaaatcccgcagcatccttaagtgcatacaattttacgcagatgagtcttacaatctgatgttcgaggtgcccttggacatctccctgtccaattctggtttcaaattggtgaacttcggctgcgactatcatcagtaccgtgacaaatttagcaaacacctcacactttgcgtgtttactaatcataccggatctctctgtgtatgttattcccctaaatgtgcatcatggggtcaaattacatacagcgtgttttacatccacaaaggccacagtaagacattcactacatccctggagaacgtcggatcccacatgacaaaaggtatcacgtttcttaatttggactattacgtggcggtctatctgcctggccacttttttcatttactgaatgtgcagcaccccgacctgatctgtcataatctgtttctgaccggaaacaacgagatgattgatatgctgccacattgtcccctgcagtccttgtccggttctctcgtcctggactgttgcagtggcaagttataccgagcactgctgagccagagcagcttacttcagttgctccaaaacacatgcctcgactgtgagaagatggctgccttacactgtgctctttactgcggtcaaggagcccagttccttgaggcacagattattcagtggatttcagaaaatgtgagcgcctgccatagcttcgacctcatccaggaattcattattgcaagtagttactggagtgtgtactcagagacttcaaatatggataaactcttacctcattcaagcgtactgacttggaacactgaaataccaggaataacactggtgactgaggacatcgctcttccattgatgaaggttctgagcttcaagggctactgggaaaaacttaatagtaatctggagtacgtaaaatatgccaagccccacttccactataataattccgttgttcgcagagaatggcacaaccttatatcagaagaaaaaacgggaaaacgaaggtctgcggcatacgtgcgaaatattctagataacgcagtcaaagtgatcagcaacctggaggcccgaaatctcggaccacggttaacgccgctcctgcaggaggaggactcgcaccagcgtttgctgatgggtctgatggtttccgagttaaaggaccattttcttcgccacctgcaaggggtcgagaagaaaaagattgagcaaatggtcctggattacatatccaagttactggacctgatttgccacattgtcgaaaccaattggcgcaagcataacctgcattcatgggtccttcattttaactcccggggaagcgcggcagaattcgcggtgttccacatcatgactaggatcttggaggccaccaactccctgttcctccccttgcccccaggattccacaccctccacactattctgggtgtccaatgtctgcctcttcacaacctcctccactgtatcgactccggtgtcctgttgttaacggagactgcggtcattcggctaatgaaggatttggacaatacagaaaagaatgagaagttgaagttcagcattattgtcaggttacctccacttattgggcagaagatttgtaggctttgggaccacccgatgagtagcaatatcatttctcgtaaccatgtgacccggctgctccagaactataaaaaacagcctcggaactccatgattaacaaaagcagcttttctgtggagttcctccccctgaactacttcatcgaaatcctgacagatattgaatctagcaatcaggccctgtacccctttgagggtcatgacaatgtggatgcggaatttgttgaagaagcggctctgaagcacacagcgatgcttctgggactgtag

SEQ ID NO: 235061 - DNA, 528 bp, synthetic construct
  misc_feature 1..528: note = Description of Artificial Sequence: Synthetic coding sequence
  source 1..528: mol_type = other DNA
atgactaggatattggaggccaccaattccctgttcctcccactccctccagggttccacaccctccacacaatccttggagtgcagtgtctgcctctgcataacttacttcattgcatcgactccggcgtccttctcctcacagaaaccgctgtgatccgtttgatgaaagacctggataacactgagaaaaatgagaaactcaagttcagcataatagtgagactgccaccactaattgggcagaaaatttgccgcctatgggatcacccaatgtcaagtaacattatttcccgcaaccacgttacccgcttactgcagaattacaagaagcagccccgtaattccatgatcaacaaaagttctttctcggtagagttcctgccgctaaactactttatcgaaatattaactgacatcgaatctagtaaccaggctttgtacccattcgaaggccatgataacgtcgatgcggaatttgttgaggaggccgctctgaagcatacagccatgttgctgggcctgtag

SEQ ID NO: 235062 - DNA, 873 bp, synthetic construct
  misc_feature 1..873: note = Description of Artificial Sequence: Synthetic coding sequence
  source 1..873: mol_type = other DNA
atggccaaccccaaacttcttggcatgggcctgtctgaggcggaagccatcggggctgacagtgcccgttttgaggagctactcctgcaagcttccaaggagctgcagcaggctcagaccacaaggccagaatccacgcagatccagccccagcctgggttctgcatcaaaactaactctagcgaggggaaggtgtttattaacatttgtcacagcccgagtatccccccacctgctgacgtcactgaagaggaactgctgcaaatgttagaggaagatcaagcaggattccgcatacctatgtccttgggcgaaccccacgccgagctggacgcaaaaggacagggatgcactgcttatgatgtggctgttaatagtgacttctatcgcagaatgcaaaatagtgactttctgcgagaactggtgataactatcgccagagaagggctggaggataagtacaacctgcagctgaaccctgagtggcgtatgatgaaaaaccgccctttcatgggatccattagccaacagaatattaggagcgagcagagaccgcgaatccaggagctgggtgacctgtataccccagcaccaggcagagctgagtccggccctgagaaaccacacctgaacttgtggctggaggcccctgacctgctgttagccgaagttgacttgccaaaactggacggcgctctaggtctgagcctggagatcggcgaaaatagactggtgatgggaggcccacaacagctctaccacctcgacgcatatattccccttcagatcaacagccacgaatccaaggcggctttccaccgcaaacgtaagcagctgatggtcgccatgccactgttgcctgtgccttcctag

SEQ ID NO: 235063 - DNA, 942 bp, synthetic construct
  misc_feature 1..942: note = Description of Artificial Sequence: Synthetic coding sequence
  source 1..942: mol_type = other DNA
atgctactcagcaaaatcaactctcttgcacatctgcgcgcagctccatgcaatgaccttcatgccaccaaactcgcacccggaaaggagaaggaacccctggagagccagtatcaggtaggccctctcctgggctcaggcggattcggcagcgtgtatagcggaattcgggtcagtgataatttgcctgtggcgattaagcatgttgaaaaagaccggattagcgattggggcgagcttccaaacggcactagagtcccaatggaggttgttctgctcaagaaggtttcctctggattctcaggcgtgatacgcctcctggattggttcgaacggcctgacagtttcgtattgattttggagaggcctgagccagtccaagatctctttgattttatcaccgagagaggcgcactgcaggaagaactcgccagaagttttttctggcaggttctggaagctgtaaggcactgccacaattgcggcgtgctccacagggacattaaagatgagaacatcctgatcgacctaaaccgtggggaactgaagctcattgatttcggatcaggcgcactgctgaaagacacggtgtataccgattttgacggaacaagagtgtactcacctccggaatggatccgctatcaccgctaccacggaagatccgctgctgtgtggagcctgggcatcttactctacgacatggtgtgcggagacattccattcgaacacgatgaggaaattataagaggccaggtcttcttccgtcagcgcgttagctctgagtgtcagcacctcatcaggtggtgtttggcattgcgcccttctgatcgcccaacttttgaggagatacagaaccatccctggatgcaggatgttctgcttcctcaggaaaccgccgagattcacctgcactcactgagcccaggtcctagcaagtag

SEQ ID NO: 235064 - DNA, 936 bp, synthetic construct
  misc_feature 1..936: note = Description of Artificial Sequence: Synthetic coding sequence
  source 1..936: mol_type = other DNA
atgctgaccaaacccctgcagggcccacccgcaccgccaggaaccccgactccccctcctggcggaaaagaccgcgaagcatttgaggctgaataccgacttggccctcttctgggtaaaggagggtttggtacggtttttgcaggccaccgattaaccgacaggctacaagtggcgatcaaggtgatccccagaaatagggtacttgggtggagtccactgagcgacagtgtgacatgccccttggaagtcgcactgctgtggaaggtgggcgcaggcggaggacaccccggagtgatacggttgctcgattggtttgaaacacaagaagggtttatgctggtcttggagcggccactgcctgcgcaggatctgttcgattatatcaccgagaaggggcctttaggcgagggaccttctaggtgcttctttggtcaagttgtcgcagcgatccaacactgccacagtaggggagtggtgcatagggatataaaagatgaaaacatattgattgacctgcgcagggggtgtgctaaattgatagacttcggaagcggagctctgctgcacgacgagccctataccgattttgatggcacacgagtttatagtccacccgagtggatttccaggcaccagtatcatgccttacccgctaccgtgtggtccctcggcatcctcctttatgacatggtctgcggtgacatcccatttgaacgcgatcaggaaatcctggaggcagaactgcatttcccagcacacgtaagtcccgattgttgtgccctgataaggcgttgtctcgccccaaagccctcttctcggccatcgctggaggagatattgcttgatccctggatgcagactccagccgaggatgtgccattgaatccctcaaaggggggacccgctccattagcttggtctctattgccttag

SEQ ID NO: 235065 - DNA, 438 bp, synthetic construct
  misc_feature 1..438: note = Description of Artificial Sequence: Synthetic coding sequence
  source 1..438: mol_type = other DNA
atgttggttctggagagaccgctgccagctcaggacttgtttgactatatcactgagaagggcccactgggagaaggccctagcaggtgtttttttggacaggttgtggccgctatccaacactgtcatagcaggggcgtcgtccacagagacatcaaggatgaaaatatcctcatcgatctgcgacggggatgtgcaaagctcattgacttcggctccggcgctctactgcacgatgagccttacaccgactttgacggcaccagggtatatagtcctcccgaatggatttccaggcaccagtaccatgctctccccgctactgtttggtcccttgggattctcctttatgacatggtgtgcggcgacatccccttcgagcgcgatcaggagattctcgaggcagaactccacttccctgctcacgtgagtccatag

SEQ ID NO: 235066 - DNA, 2925 bp, synthetic construct
  misc_feature 1..2925: note = Description of Artificial Sequence: Synthetic coding sequence
  source 1..2925: mol_type = other DNA
atggccaaagccggtagggcaggcggtccccctccaggcggaggggctccgtggcatttgcgcaacgttctgtcggacagcgtagagagctctgatgacgaattctttgacgccagagaagagatggccgagggcaaaaatgctatactaatcggaatgtctcagtggaactctaacgatctggtggagcagatcgaaacaatgggaaaactggacgagcaccagggagagggtacagcaccctgtacatctagcattctgcaagaaaagcagcgcgaactgtacagagtgtccctgagaaggcagcgcttcccggctcagggatccatcgagatccatgaggacagtgaggaaggctgcccacagcgaagttgtaaaacccacgtcctcctgttagtgctccatggcggaaatatccttgataccggggcaggggaccctagttgtaaagccgctgacatacacacatttagtagcgtgctggaaaaagttacacgcgcacactttcctgccgctcttggtcacattcttattaagtttgtgccatgtccggctatttgttcagaagcgttctcactggtgtcccatctgaacccctacagtcacgacgagggatgtctcagctcgtcccaggatcacgtgccactagctgccctgcctctcttagccatctccagcccccaataccaagacgccgttgctaccgtgattgagagggctaaccaggtgtatcgggaatttctaaaaagctccgatggaatcggttttagcggacaagtctgccttataggcgactgtgtgggaggcctgttggcgttcgatgcaatctgctacagtgccggaccgtcaggggattcccccgcatcctcaagccgaaaggggtccatctctagcacccaagacacaccagtggcggtcgaagaggattgttctctggcctcatccaagaggctctcaaaaagcaatattgatatctcttctggcctggaggacgaggagccgaagagaccacttccgaggaagcagtccgacagctcaacgtacgattgcgaggcaatcacccaacaccatgctttcttgagttccatccactcttctgtgctcaaagacgaaagtgaaacgcccgcagccggagggccacaactccccgaggtaagcctgggcagattcgacttcgacgtgtcggattttttcctttttggctcaccgcttggtttagtgctggccatgaggcggaccgtcctccctgggctagacggattccaagtcagacccgcatgctcccaggtttacagcttcttccactgtgcagatccaagcgcgtcccgcttggagccactcctggagccaaagtttcacctggtcccaccagtaagcgtccccaggtaccagcgatttcctttgggagatggccagtccctccttctagccgatgccctgcacactcatagccccctttttctggaaggctcttcacgggactctcctcctctccttgacgcccctgcatctccgcctcaggcttcacgtttccagcggccagggagaaggatgtcagaaggatcatcccactctgagtcctctgaatctagtgattctatggctccggtcggtgcctcaagaatcacggcaaagtggtggggatctaaaagaatcgactacgccctatattgcccagacgtgctcacagccttcccaaccgtagctcttccccacctgtttcatgcaagctattgggaatccaccgacgttgtggccttcattctccggcaggtcatgagatacgagtcagtcaatatcaaggaaagtgcaagactggaccccgctgcactatcgcctgcgaaccctcgcgagaagtggttgcggaagaggacccaggttaagcttcgcaatgtgactgccaaccatagagctaatgacgttatcgcggctgaggatggtccccaggtgctggtaggccgatttatgtatggccctctggatatggtggcgctgacaggggaaaaagttgacatactagtaatggctgaacccagctccgggagatgggtacatctagatactgaaatcaccaatagtagcgggcgaatcacgtacaatgttcctaggccacgaaggctcggtgtcggcgtttacccagttaaaatggtcgttaggggcgatcagacctgtgccatgagttacctgacagtactgccgagagggatggagtgtgtcgtcttttcgatcgatggctcctttgcggcaagtgtatcaatcatggggagtgatcctaaagtgcgcccaggagcagtggatgtagtgcggcactggcaggacctggggtatatgatactttatatcactggccgacccgatatgcagaagcagcgcgtggtctcgtggctttctcaacacaacttcccccaagggatgatcttcttcagtgacggcttggttcacgaccccctccgccagaaggctatctttcttcgcaatctgatgcaagaatgctttataaagattagtgctgcttacggatctacgaaggacatttccgtatatagtgtgctgggtttgcccgcatcacagatatttatcgttggcaggcccactaaaaagtatcagacgcaatgccagtttctgtcagagggatatgcagcccatctggctgcgcttgaagcctcccataggtccaggccaaaaaagaataactcccgtatgattctccgcaagggcagttttggcctacacgctcagccggagttcctacgcaaaagaaaccatctccgaagaacaatgtcagtgcagcagcctgacccccctgcggctaaccctaagccagagcgggcacagagtcagcccgagagcgataaagatcacgagaggcccttacccgcactgtcctgggcccgagggcctccgaaatttgagagtgtcccttag

SEQ ID NO: 235067 - DNA, 2817 bp, synthetic construct
  misc_feature 1..2817: note = Description of Artificial Sequence: Synthetic coding sequence
  source 1..2817: mol_type = other DNA
atggctaaagccggacgagctggaggccctccccctggcggtggcgcaccttggcacctgcggaacgtgctctctgactccgtggagagctccgacgatgagttctttgatgcaaggggcgaaggtacagccccatgtacttctagcattttacaggaaaagcagagagagctgtacagagtcagcctcagacgccagcgctttccagcacagggatccatagaaatccatgaggactccgaggaaggctgtccacagcgctcttgcaagacacatgtgctcctgctcgtcctgcacgggggtaacattctagatacaggggcaggggaccctagctgtaaagctgcggatattcacacattctccagcgttttggaaaaagtaacgcgcgctcacttccccgcagctctcgggcatatcttaattaaattcgtgccatgccccgcaatatgctctgaggctttctctctggtcagtcacctcaacccctactcccacgacgaaggctgccttagctcttcgcaagatcatgtgccgcttgcggcacttcccttgctcgctatctcatcaccccagtatcaggatgccgtggccacagtaattgaaagggccaaccaggtgtatagggaatttctcaagtcctccgacgggataggttttagtgggcaggtgtgtctgattggggactgcgttggaggccttttggcgttcgacgctatatgttactccgcgggtccctccggggactcacccgcttcctcctccagaaagggctccatctcctcaacccaagatacaccggtagctgtcgaagaggattgttcccttgcaagcagcaagcggctaagcaaaagcaacatcgacatctccagtggcctcgaggacgaggaacccaagcgcccattaccgaggaagcaaagcgacagctccacctatgactgcgaggccattacccaacaccatgcattcttgagctcaattcatagctccgtccttaaggacgagtcggagaccccagccgctggcggtccccagctgcccgaggtcagtctcggcagattcgattttgacgtatcagacttttttttgttcggctcgccactcggtctcgtccttgcaatgcggaggaccgtactccccggtctagacggattccaagtgcgacccgcatgtagccaggtttactcttttttccattgtgcagatccttcagcttcacgcttagagcccttgctggagccaaaattccacctcgtgccacccgtgagcgtccctagataccagagatttcccctgggggatggtcaatctcttttgctggctgacgcactccacactcacagcccccttttcctcgagggctcatcccgcgactctccacccttgctcgacgctccggcttccccacctcaggcgagtcggtttcagcggcctgggcgaaggatgtcggaggggagctctcattctgagtcttccgagagctcagattcaatggctcctgtgggcgcatctcgaatcacagcgaagtggtggggcagcaagcgaatagactatgccttatactgcccagacgttctgactgctttccctaccgtggctctgcctcacctctttcacgctagctactgggagtccaccgacgtggtggcttttattcttagacaagttatgagatacgagtccgtgaacatcaaagagtctgcccgactggatccagccgcacttagtcctgccaatccccgagagaaatggttgcggaagcgtacacaggtgaaattacgtaacgtgacagcaaaccacagagccaacgacgtgatagccgcagaggacggtccacaagtgctcgtcggaagatttatgtacgggcctctcgacatggtggcactcaccggagagaaggtcgacatcctcgtcatggcggagccaagctcaggtcgctgggtgcacctcgacactgaaattactaactcaagcggtagaatcacatataacgtacctagacccagaaggctcggcgtaggggtgtacccagttaaaatggtagtgcgaggggaccagacctgtgcaatgtcgtacctcactgtgctaccgaggggaatggagtgcgtcgtgttcagcatagacgggtcattcgcagctagcgtttctataatgggctctgatccaaaggtaaggcccggagccgttgacgtcgtccgtcactggcaggatttggggtatatgattttgtacattaccgggagacccgatatgcaaaagcagcgcgtcgtctcttggctgagtcagcataacttcccacagggcatgattttctttagtgatggcctcgtgcacgaccccctgcggcaaaaggccatatttctgaggaacctcatgcaggaatgtttcatcaaaatctcagctgcttatgggtccactaaggacatttctgtgtattccgtgctggggctgccagccagccaaatcttcatcgtgggacgaccaacgaaaaagtaccagactcagtgtcagtttctgagcgagggatacgccgctcatctggcagccctggaggcctcccatcggagccggccaaaaaaaaataactccaggatgattttgcgcaagggttcgtttggtctgcacgcacagcctgagtttttacgcaagcggaatcatctgcgtcgcacgatgtcagttcagcaaccagacccccctgcggcaaaccccaaaccggagcgtgcccagtctcaaccagagtccgataaagatcacgagcgccctctcccagcgctgtcttgggcgagaggtccccctaagttcgagtccgttccttag

SEQ ID NO: 235068 - DNA, 609 bp, synthetic construct
  misc_feature 1..609: note = Description of Artificial Sequence: Synthetic coding sequence
  source 1..609: mol_type = other DNA
atggcaacgctgatctatgtcgacaaggaaaatggcgagcccggaactagggtagtagccaaggacgggctgaagttaggttctgggccttctattaaggcccttgacggccgatctcaggtgtccacaccgcgatttggcaagacgttcgacgccccacccgcattgccaaaagccaccaggaaggcactagggaccgtcaacagggctactgaaaaatccgtgaagaccaagggccctcttaaacagaagcagccttcgttctcagctaaaaagatgacagagaagacagtgaaagctaagtcttctgtaccggcaagcgacgatgcgtacccagagatcgagaagtttttcccttttaaccctctcgatttcgagtcttttgatttacccgaggagcaccagatcgctcatctgcccctgagtggagtccccctaatgatactcgacgaagagagggagctggaaaaattgtttcaacttgggccaccttcacccgtgaaaatgccatcacccccttgggaaagcaatctgctacaaagcccgtcctccatcctatcaacccttgacgtcgagctgccaccggtctgctgcgatattgacatctag

SEQ ID NO: 235069 - DNA, 609 bp, synthetic construct
  misc_feature 1..609: note = Description of Artificial Sequence: Synthetic coding sequence
  source 1..609: mol_type = other DNA
atggctactctgatttacgtggataaagagaatggagagcctggcactagagtggtcgctaaggacggcctcaaacttgggagtggtccatccataaaagccttagacggccgaagccaagtgtcgacacctcgctttgggaagacgttcgacgcacccccagctctgccgaaggcaacccgaaaggccctgggcaccgtaaatcgcgcaacggagaagagcgtgaaaaccaagggccctctgaaacagaagcagccttccttttccgccaaaaaaatgactgagaaaaccgtcaaggccaagtcaagtgttcccgctagcgacgacgcctaccctgaaatcgagaaattcttcccctttaacccactggatttcgaaagtttcgatctaccagaagagcatcagattgctcacctgccactgtccggtgtccccctgatgatactcgatgaggagcgggaactggagaagctatttcagttggggcctccatctcctgtcaagatgccaagccccccttgggaaagcaacctgttgcagtctccttccagcattctgtccacattggatgtggagcttccccctgtctgctgtgacatcgacatctag

SEQ ID NO: 235070 - DNA, 609 bp, synthetic construct
  misc_feature 1..609: note = Description of Artificial Sequence: Synthetic coding sequence
  source 1..609: mol_type = other DNA
atggctaccctgatctacgtcgataaggaaaatggagagcctggcaccagagtagtggccaaagacggacttaagctcggcagtggaccctcaataaaagccctggacggcagaagtcaggtctcgactccgcgtttcgggaagactttcgatgcaccaccagcactgccgaaggcaaccagaaaggccctgggaactgtgaaccgagcgaccgaaaaaagcgtaaagactaaggggcctctgaaacagaagcaaccctccttttctgcaaagaaaatgaccgagaagacggtcaaggctaagtcaagtgtccctgccagtgacgatgcgtatcctgaaattgagaaattcttcccctttaatcccctcgattttgaaagctttgatcttcccgaggaacaccagattgcccatttacccctgagcggagtgcccctgatgattttagatgaggagcgagaactcgaaaaactctttcagctgggtcccccatctcctgtcaaaatgccctctcccccttgggaatcaaaccttttgcagtctccctcatctatcctaagcacactggacgtggagctgccccctgtttgttgtgatattgacatatag

SEQ ID NO: 235071 - DNA, 543 bp, synthetic construct
  misc_feature 1..543: note = Description of Artificial Sequence: Synthetic coding sequence
  source 1..543: mol_type = other DNA
atggcccctggggtggccagaggacctactccatactggcggctgcgtttgggtggtgctgctcttttgctccttctgatccctgtcgcagccgcacaagagccgcctggcgctgcctgttcgcaaaatactaacaagacttgcgaagagtgtcttaagaatgttagctgtctgtggtgcaacaccaacaaggcatgtctggattaccccgtgacctctgtcctacctccggcaagcctgtgtaagctatcttccgccaggtggggcgtgtgctgggtgaattttgaagccctcattatcacaatgtctgtggtaggcggaacactgctgctgggaattgcgatctgttgctgttgttgctgccggaggaagcgcagccgtaagccagacaggtctgaggagaaagcaatgcgcgagcgagaagagcgcagaattagacaggaagaaaggcgcgcagaaatgaagacacgacatgatgaaattcgaaagaagtacgggctgttcaaagaggaaaatccgtacgcccgatttgagaataactag

SEQ ID NO: 235072 - DNA, 429 bp, synthetic construct
  misc_feature 1..429: note = Description of Artificial Sequence: Synthetic coding sequence
  source 1..429: mol_type = other DNA
atggcacctggtgtggcacgcggacctaccccctactggagactgcgactcggcggtgccgctctgctcctgctcctcatccctgtggctgccgcacaggaacctccaggagctgcttgcagtcagaacactaacaagacttgtgaagaatgtttaaaaaatgtgagtgcatgtttgaaaaagaagacccgcatgcttgacctcaagacaacgaaggctttacaacatatttctcctgacgccagctgcgaggtacatgcccctcagccttcccccgctggacggcctaggggccattgcggacttttaacattagcctctgaacccgcatccctgccaggccaggcagctggggagcttcctttgaaggactcacccctcgttctgcagaccggagatctccttttccccgttcacttgtgcttttag

SEQ ID NO: 235073 - DNA, 576 bp, synthetic construct
  misc_feature 1..576: note = Description of Artificial Sequence: Synthetic coding sequence
  source 1..576: mol_type = other DNA
atggccaccctgatttacgttgataaggaaattggagagcccggtactcgtgtggctgccaaggacgttctgaagttggagtcacggccttccattaaagcactggacggaattagccaggtgctgacacgtcggttcggaaagacctatgacgctcctagcgcattacccaaggctacacgcaaggccctggggactgtcaatagagcaaccgagaagtccgttaagacaaacggcccacgcaagcagaaacagccatcattctcagccaagaaaatgacagaaaagaccgtgaagaccaaatccagcgtgccagcaagtgatgatgcctatcctgagattgaaaaattctttccttttaaccttctagacttcgagagtttcgacttgccagaagagcgacagattgcccaccttcccctctctggcgtgcctttgatgattcttgacgaagagggcgagctcgagaagctcttccagctcggacctcccagtcctgtgaagatgccctctccaccctgggagtgtaatctcttcgccgtctcgttcaagcattcagttgatcctgggtgctag

SEQ ID NO: 235074 - DNA, 2586 bp, synthetic construct
  misc_feature 1..2586: note = Description of Artificial Sequence: Synthetic coding sequence
  source 1..2586: mol_type = other DNA
atgacaggccgtgctcgagcacgtgctcgaggtagagccaggggacaagagacagcacagcttgtgggctcgaccgccagccagcagccgggatacatacaaccgcgaccccagccgccacccgcagagggggaattattcggtagggggagacagagaggcaccgccggaggaactgcaaaatctcagggtctgcagattagcgctggcttccaggagctttcactcgctgagcggggtggaagaagacgcgattttcacgatctgggggtgaataccaggcagaacttagaccatgtgaaggaatccaaaaccggaagtagtggtataattgtcaggctgagcactaaccatttcagactcacgtcgcgtccccaatgggccttgtatcagtatcacatcgattataaccctctcatggaagctaggcggttgcgatcagccctgctgttccaacatgaggacctgattggtaagtgccatgccttcgatgggaccatcctgttcttgccaaagcgcctccagcagaaagttactgaggtgttctcaaaaacgcggaacggagaggatgtgagaataactattaccctgaccaacgaactccctccgacatcaccaacctgcctgcagttttacaatattatttttagaagattactgaagattatgaacttacagcagattgggaggaattactataaccctaacgacccaattgatatcccgtctcaccggttagtgatctggcccggatttacaaccagtattctccaatacgagaatagtattatgctgtgcactgacgtcagccacaaggtgctccgcagcgaaaccgttctcgactttatgtttaatttctatcaccagaccgaagaacacaagttccaagaacaggtgtctaaagagctgattggtcttgtagtgttaactaagtacaataacaagacttatcgagtcgacgatattgactgggaccagaatccaaagagtacgtttaaaaaagcagacggaagtgaagtgtccttccttgagtattacaggaagcaatacaaccaggagataaccgacctcaaacagcctgtgctggtcagtcagcccaaaaggcgtcgcggtccaggagggactctgccaggcccagctatgctgattcccgaattatgctatcttaccggattgaccgacaaaatgcgcaacgacttcaacgtcatgaaagatctggccgttcatacgcgactcacccctgaacagcgccagcgtgaggttgggagactgatcgactacattcacaagaacgacaacgtgcagagagaactgcgcgattgggggctcagcttcgatagtaatttgctgtctttttcgggcagaatcctccagaccgaaaagatccaccagggcggtaagactttcgactataaccctcaatttgctgattggtctaaagaaacgcgcggtgccccactgatatccgtcaaaccacttgacaattggctgctcatctacacccgaaggaactacgaagctgccaattctctcatccaaaaccttttcaaggtcactcccgctatggggatgcagatgcggaaagccattatgatcgaggtggacgacaggacagaggcatatctcagagtgttgcagcagaaagtgactgcggacacacagattgtggtgtgtttgctgtcttctaatagaaaagacaagtatgacgccataaaaaaatatctctgtaccgactgtcctactcccagccagtgtgtggtcgcaagaactctcggcaagcaacagaccgtgatggctattgccaccaagatcgcactacagatgaactgcaaaatgggcggagagttatggcgcgtggatattcctcttaaactcgtgatgatcgttggaattgattgctaccatgatatgactgccggacgcagatcaatagccggatttgttgcgtcgatcaatgagggcatgacccgatggttcagccgctgcatttttcaggaccggggacaggagctggtggacggactgaaggtttgcctgcaggctgcgctgcgggcatggaattcttgtaacgaatacatgcccagccggatcattgtctaccgcgacggggtcggcgacgggcagctcaagactctggttaattacgaagtacctcagtttctagattgcctgaaatccatcggtcgcggatataaccctcgcctgacagtgatcgtcgtaaagaagcgcgtgaacacgcgcttcttcgcccagtccgggggtaggcttcaaaacccacttcccggaactgtgatcgatgttgaagtgacacgcccagaatggtacgacttctttatagtcagccaggctgtgcggtcaggaagtgtaagtcctactcattacaatgtcatctacgacaactcaggcctgaaacctgatcatatccaacggttaacatataaattgtgccatatctattataattggcccggtgttattcgcgtccctgccccatgccagtacgcccacaaattggcttttctcgttggtcagtccatccaccgggagcccaacctatctctgagcaataggctctactacctgtag

SEQ ID NO: 235075 - DNA, 369 bp, synthetic construct
  misc_feature 1..369: note = Description of Artificial Sequence: Synthetic coding sequence
  source 1..369: mol_type = other DNA
atgacaggcagggccagagcgcgagcaagaggcagggcaagggggcaggaaacagcccaactcgtaggtagtacagcctcgcaacaaccgggttatattcagcctcgaccacagccacctcctgccgagggcgaactattcgggagagggaggcagagagggacagcaggtggaacggcgaagagtcagggtttgcagatttcagcaggctttcaggagctctccctagccgaacgcggaggacgacgccgagattttcacgacctgggggtgaatacccgccagaatctagaccacgtgaaggagtccaagaccgggtcatcaggaatcatagtaaggctcagcaccaaccacttccgcttgacttag

SEQ ID NO: 235076 - DNA, 453 bp, synthetic construct
  misc_feature 1..453: note = Description of Artificial Sequence: Synthetic coding sequence
  source 1..453: mol_type = other DNA
atgaccggtagggccagggctagagcacgtgggagagcacgaggccaggagaccgcgcagttagtgggctcaaccgcttcccagcagcccggatacattcaacctaggccccaaccccctcctgccgaaggagagctgttcggacgaggcagacagcggggtaccgcagggggaacagccaagtctcagggactgcaaatcagcgccggatttcaggagctttccctcgctgagcgtggtgggagaaggcgcgactttcacgaccttggtgttaatacgcgccagaacctggaccatgttaaggaatctaaaaccgggtcatctggcattatcgtcagactgtcgaccaatcacttcaggcttacttccagaccacagtgggccctgtatcagtaccacattgattacaatccactgatggaagcacggcgactgaggagcgcattgctttag

SEQ ID NO: 235077 - DNA, 519 bp, synthetic construct
  misc_feature 1..519: note = Description of Artificial Sequence: Synthetic coding sequence
  source 1..519: mol_type = other DNA
atgactgggagggcccgagccagggcccgaggcagagcaaggggtcaggaaaccgcacagctcgtgggctccacggctagccagcaacctggctacattcagcctagaccgcagcccccacccgcagagggcgaacttttcgggaggggcagacagaggggtactgctgggggtactgccaagtctcaaggcctgcagatctccgccggtttccaggaactgagccttgctgaaaggggcggtcgccgaagggacttccacgatctaggcgtgaatacccgccaaaatctcgaccacgttaaggagagtaaaaccggaagctctgggataatcgtgcgtctctccactaaccactttaggctgactagtcgacctcagtgggcgttgtatcagtaccatatcgactacaatcctctcatggaggcgagaagattaagaagcgcactgcttttccagcacgaggacttgattggcaaatgtcacgcgttcgacggaacgatactcttccttccaaaatag

SEQ ID NO: 235078 - DNA, 498 bp, synthetic construct
  misc_feature 1..498: note = Description of Artificial Sequence: Synthetic coding sequence
  source 1..498: mol_type = other DNA
atgactggcagggccagggcacgagctagagggagagctcggggtcaggaaacagcccagctggtgggttctactgcgtctcaacagcctggctatatccagcccaggcctcaacctcctccagctgagggtgagctgtttggaagagggagacagagaggaaccgccggtggcactgcgaaatcccagggcctgcagatctcagccggatttcaggagctgtcccttgccgagcgcggagggcgtcggcgtgactttcacgatcttggagtgaacacccgtcagaatctggaccacgttaaggaatctaaaactgggagctcgggaattatcgtgagactttcaaccaaccactttaggctgacctctcgtccacaatgggccttgtaccaataccacattgattacaatcccctcatggaggccaggcggctgaggtcagccttactgtttcaacacgaagacctgattggaaagtgtcacgcatttgacggatag

SEQ ID NO: 235079 - DNA, 2922 bp, synthetic construct
  misc_feature 1..2922: note = Description of Artificial Sequence: Synthetic coding sequence
  source 1..2922: mol_type = other DNA
atggacccctttagaccatcctttcgaggtcagagtcctatacatccttcgcaatgtcaggctgtccggatgccaggctgttggccacaggctagcaaacctctggaccctgcattgggcaggggggcacctgctggaaggggccatgtctttggcaaacccgaggagccttctacccagcgcggtccagcacagagagaatccgttgggctcgtctctatgtttcggggtttgggaatagagactgtgtctaaaacacccctgaaaagggagatgctccccagcgggcgtggaatccttggaaggggcctctccgctaacctggtccgcaaggatagggaagaactctcccctacattctgggaccctaaagttcttgccgcaggcgacagtaaaatggctgagacaagcgtgggatggtccagaacactgggcagggggagctcggatgccagtctgcttccccttgggagagcggctgggggtatctctcgcgaagtagataagcctccttgcacattttcaacgccgtctcgcggaccgcctcagctttcttcaccacccgctctgcctcagtctccactccatagccccgaccgaccactggtcctaacggtggaacataaggaaaaggaactgattgtcaaacagggctctaaggggacccctcagtccctcggcctaaaccttgtgaagattcagtgtcataatgaggccgtgtatcaataccacgtgacgttttccccaaacgtggagtgcaagagcatgcgtttcgggatgctgaaagatcatcaagccgtgacaggcaacgtaaccgcctttgacgggtccatactctacctacccgtgaagctccagcaggtgctcgaactgaagagccagcggaagacagattcggccgaaattagtattaagatccagatgactaaaatcttagagccttgcagcgacctgtgtatcccattctataacgtggtcttcagacgcgtgatgaagctgctggacatgaagctcgtcggccgtaatttctacgatccaacatccgccatggtcctgcaacagcatcggttgcagatttggcctggatacgctgcgtctatacgaaggacagacggagggctgttcctgttggctgacgtgtcacataaggtgatcaggaatgattgtgttctcgatgtgatgcatgcaatataccagcagaataaagagcactttcaggacgagtgcactaaactgttagtgggaaacatagtcatcaccaggtataacaaccggacttatcgtattgacgatgtggattggaacaagaccccaaaggactcttttacaatgtcggatggcaaagaaatcacctttctggaatactattcgaagaattatggaatcaccgttaaggaggaagaccagcctcttttgattcaccgcccaagcgagaggcaagataaccatgggatgcttctgaagggagaaatccttctactgccagagttgtccttcatgactggcatcccagaaaagatgaaaaaggatttccgagcaatgaaggatctggcacagcaaatcaatctgagccccaagcaacaccattccgccttagaatgtcttctgcagagaatcgctaaaaatgaagccgcaactaatgagctgatgaggtggggcctcaggctgcagaaagacgtacataagatcgagggcagagtgttgcctatggagagaataaacctcaaaaacaccagcttcataacgtcacaggagttaaactgggtgaaggaggtgactcgggaccctagcatcctgactatccctatgcatttttgggcgctgttttaccctaaaagggccatggaccaggcaagggagctcgtgaacatgctggagaaaatcgctggacccataggcatgcgaatgagtccccctgcttgggttgagctcaaagacgatcggattgagacctacgtacgcaccatccaatccacactgggtgcggagggaaaaatccagatggtggtctgtattataatgggaccacgcgatgacctttacggcgcaattaaaaaactctgctgtgttcagtcgcccgtgccttcgcaagtggtcaatgtgagaactattgggcaacccactcgcctcagatccgtggcacagaagattctgctccagattaattgcaagctcggcggtgaactgtggggcgttgatatccctctaaagcagctgatggtcatcggcatggatgtctaccacgacccatctagaggtatgaggtccgttgtaggatttgtggctagtattaacctcactcttacaaagtggtatagccgggttgtgttccagatgccacaccaagagatagttgactctttaaagctctgtcttgtggggagcctaaagaaattctacgaggtgaatcactgcctcccggaaaagatagtagtgtatcgggatggcgtatctgatggccagctaaagactgtggccaattacgagattccccaattgcaaaaatgttttgaagcattcgaaaactatcagcccaagatggtggttttcgtggtgcagaagaaaatcagtacgaacttatatctcgctgctccacagaatttcgtcactccaaccccaggcaccgtcgttgaccatactattacctcatgtgagtgggtggatttctacttactggcacatcacgtgagacaaggatgcggcattcctacacactatgtgtgtgtgctcaatacagccaacctttcccctgaccatatgcagagactcacattcaagctctgccacatgtactggaattggcccggaaccattcgagtacccgctccctgcaaatatgcacataagctggccttcctaagtgggcacattctgcaccacgaaccggcaatccagctttgtgaaaatctcttctttctgtag

SEQ ID NO: 235080 - DNA, 2922 bp, synthetic construct
  misc_feature 1..2922: note = Description of Artificial Sequence: Synthetic coding sequence
  source 1..2922: mol_type = other DNA
atggatccgttccgcccttcctttcgcggtcagtctcccattcacccgagccagtgtcaggctgtgagaatgccagggtgctggccccaggctagcaagcccctggaccccgcactgggcaggggagcacctgctggtaggggacacgtttttggtaagcccgaggagccgtcaacccaacggggacccgctcagagagagagtgtcggtcttgtttcaatgtttaggggactgggaatcgagacagtctctaaaactcccctaaaaagagagatgttgccaagcggaagaggaatcctaggccgtggcttgagcgctaacttagtgagaaaagaccgtgaagagctcagccctacgttttgggatccaaaagtgctggctgcaggagacagcaaaatggctgagactagcgtgggttggtcgcgaacactgggccgaggcagcagcgacgcatcactcctgccattgggcagagcagccggtgggatcagccgcgaagtcgataagcctccatgtacattttccacaccctccagagggcctcctcagctctcgtctccccctgccctgccccagtctcccttgcactcaccagacagacccttggtcctcacagtggagcacaaagagaaggagctaatagtgaagcagggctctaaagggactccccagagtctcggcctgaatttggtcaaaattcagtgccataatgaagccgtttaccaatatcacgtaacattttcacctaacgttgagtgcaaaagcatgcggtttgggatgctcaaggaccaccaagctgtgaccggcaatgtgactgccttcgatggatccatcctgtacttgccagtgaaactccagcaggtcctggagttgaaaagccagcgaaaaaccgactccgccgaaatctctattaagattcagatgactaaaatacttgagccttgtagcgatctgtgtatccctttctataacgtggtattccgtcgcgtcatgaagctgttagacatgaaactagtgggcagaaacttctacgatccaacatctgccatggtcctgcagcaacatcgattacagatatggccgggatacgcagcctcaattcggagaactgacggcggactgtttctcttagcggatgtatctcacaaagtcatacggaatgactgtgtgctagacgtgatgcacgccatttaccagcaaaacaaagagcactttcaggacgaatgtaccaaactgttagtgggaaatattgtgattacacggtataataacagaacgtacagaatcgatgacgttgactggaacaaaacacccaaagattcctttacgatgtctgacggtaaggaaatcacgtttctcgaatattactctaagaattatggtatcacagtgaaagaggaagatcagcctctcttgatccatcgtccctctgagcgccaggacaatcacgggatgctgctaaagggcgagatcttgctcctccctgagctatcatttatgacgggaattccggaaaaaatgaaaaaagatttcagggctatgaaggatctggcccagcagatcaacctctcacccaagcagcatcactccgccctggagtgccttctacagaggatcgccaagaacgaggcagctactaacgagctgatgcgctggggcttgaggctgcaaaaagacgtgcataagatagaagggcgagtgctgccaatggagcggattaacctgaaaaacaccagtttcataacaagtcaagagcttaactgggtgaaagaggtcacaagagatccaagcatcctcactattccaatgcatttttgggccttgttttaccccaagcgcgcaatggatcaagcgagagaactcgtgaatatgttggaaaaaattgccggtcccataggcatgcgcatgtcccctcctgcctgggttgagttaaaagacgaccgaattgaaacatatgtgcgtaccatccagtccactctgggggctgagggcaaaatacagatggttgtttgtattattatgggtccccgtgacgatctgtacggcgcaatcaaaaaactgtgctgcgtgcagtcccccgtgccctcacaggttgtcaatgtgcggaccattggacagcccacccgccttcggtcagtggcacaaaaaatcctcttgcagatcaattgtaagttggggggagaactttggggtgttgacatcccattgaaacagctgatggtcataggcatggacgtgtatcacgacccgtctagaggcatgagatctgtagtggggtttgtagcgtccattaacctcactcttacaaaatggtactcgcgagtggtgtttcagatgccacaccaggaaattgtggatagccttaagctgtgcttagtagggtccttaaagaagttctatgaggtgaaccactgccttccagagaagatcgtggtctatcgcgacggtgtgagtgatggtcagttaaaaactgtggccaactacgagatcccacagctgcagaagtgtttcgaagcttttgaaaactatcagccaaagatggtggtgttcgtagtacagaaaaaaattagcacaaatctgtacctagcagcgccacagaatttcgtaacaccaacaccaggaacagtcgtcgaccacactatcacaagctgcgagtgggtggatttctatctcctggcacaccacgttcggcagggttgtggtataccaactcactatgtctgcgtgttaaataccgccaatcttagtcctgaccatatgcaacgcctcacctttaaactgtgtcacatgtattggaactggcctggcacaatccgagtccctgcaccatgcaagtacgctcataaactggcgtttctcagcggacacattctccaccacgagcctgcaatccaattgtgcgagaatctattcttcctctag

SEQ ID NO: 235081 - DNA, 639 bp, synthetic construct
  misc_feature 1..639: note = Description of Artificial Sequence: Synthetic coding sequence
  source 1..639: mol_type = other DNA
atgaaggtgtttaaatttataggacttatgattctgcttactagtgccttttctgctggatctggtcaatcccccatgacagtcctgtgctcaatagactggtttatggttaccgttcatcccttcatgctgaacaacgacgtatgcgtgcacttccacgaactccatctgggactaggttgcccacccaatcatgttcagccacacgcgtaccagtttacctacagggtgacagaatgtggaatccgagcaaaggcagtgtcacaggacatggtgatttactccaccgagatacactacagcagtaaagggacaccctcaaagtttgtgatcccagtatcttgtgcagcaccccagaagagcccttggttgactaagccatgtagcatgagggtcgcatccaagtcaagggcaaccgctcagaaagacgagaagtgctacgaggtgttttcccttagtcaatcgagccagcggcctaattgtgactgccccccttgcgtgttttctgaggaggagcacactcaagtcccatgtcaccaagcgggtgcgcaggaggcccagcctctgcaaccaagtcactttctcgatataagcgaagactggtccctgcatactgatgacatgattgggagtatgtag

SEQ ID NO: 235082 - DNA, 294 bp, synthetic construct
  misc_feature 1..294: note = Description of Artificial Sequence: Synthetic coding sequence
  source 1..294: mol_type = other DNA
atgcgtccccttctgtgcgcactcactgggctggcccttcttcgagctgccggtagtttagccgctgctgaacccttttcgcccccacggggagattccgctcagtccacagcatgtgacaggcatatggccgtgcaaagacgcctggacgtgatggaagagatggtggaaaaaactgtggatcacctggggacggaagtgaagggattattaggcctattggaggaactcgcctggaacctgccaccgggaccattttcccccgctccagacctgctgggagatggattttag

SEQ ID NO: 235083 - DNA, 264 bp, synthetic construct
  misc_feature 1..264: note = Description of Artificial Sequence: Synthetic coding sequence
  source 1..264: mol_type = other DNA
atgagacctctattgtgcgcgctgacgggcttagcacttctccgagcagctggtagtctggccgctgctgaaccctttagccccccacgcggtgatagcgctcagagtaccgcttgcgatcggcacatggccgtccagcgcaggctagatgttatggaggagatggcctcagagccatggtcatggtcccccgctgttgggggtggagccccagcaagacaacgacctcagaaccagccttgcccgctggactttctgccatag

SEQ ID NO: 235084 - DNA, 168 bp, synthetic construct
  misc_feature 1..168: note = Description of Artificial Sequence: Synthetic coding sequence
  source 1..168: mol_type = other DNA
atggcggttcagcgcagattggatgtgatggaagagatggtggaaaaaacggtggatcatctaggcacagaagttaaagggttactcggcctgttggaggagctcgcatggaatctgcctccaggcccatttagtcctgcgccagacctgcttggggacggcttttag

SEQ ID NO: 235085 - DNA, 2244 bp, synthetic construct
  misc_feature 1..2244: note = Description of Artificial Sequence: Synthetic coding sequence
  source 1..2244: mol_type = other DNA
atgaaccatagccccctcaagacagccttggcctacgaatgctttcaagatcaagacaacagcacccttgcattaccttcagatcagaaaatgaagacggggacatccggtagacagcgagtccaagagcaagtgatgatgaccgtcaagcgacagaagtcgaagtcttcacagtcttccacactctcgcactccaatagaggttccatgtatgatggcctcgctgataactacaattatgggaccacttctcgcagctcttactatagtaagttccaggcgggaaacggcagctggggttatccaatctataacggaacccttaagagggaacccgataatcgtcgattctcttcctactctcagatggaaaattggtccaggcattacccaaggggatcttgcaacacaacaggtgccggaagcgatatttgcttcatgcagaagattaaggccagtagatccgagcccgacctgtactgtgacccacgtggcaccctgcgaaaaggcacactaggctccaagggtcaaaagactacgcagaacagatacagtttttacagtacctgcagcggtcagaaagctattaagaaatgtccagtcagaccaccatcctgcgcaagcaagcaagaccctgtctacatcccccctattagttgtaataaggatctttcgttcggtcactcacgggcatcctccaaaatttgttccgaggacattgagtgttctggtttgaccatccctaaggcggtgcaatatttgtcttcacaggacgagaaataccaggccataggtgcctactacatccagcacacatgcttccaggacgagagtgccaagcagcaggtctaccaactgggcggtatttgtaaactagtggatctgctgagaagtcccaaccagaacgtccagcaggctgctgccggagctctgagaaacctcgtattcaggagcaccaccaacaagctggagacccgcaggcagaatggcattcgcgaagcagtatccttgctgcggagaacagggaatgccgagattcagaagcagttaacagggctgctctggaaccttagttctactgatgaactcaaagaggagctgattgccgacgctttgccagtattagctgatcgggtgattatacctttttccgggtggtgtgacggaaattcaaacatgagccgggaagttgtggatccagaagtgttcttcaatgccactggttgtctaaggaagcgcctgggtatgagggagctgctcgcacttgtgccccaacgcgctacttccagtagagtgaacctgtcaagtgccgatgccggtcggcaaaccatgaggaactattccggacttattgatagcctgatggcctacgtgcagaactgcgtggctgcaagcaggtgcgatgataagtcagtcgagaactgcatgtgtgtgctccacaatctatcttatcggcttgacgcagaggtacccacccgataccgacagctcgagtacaacgccagaaacgcctatacagagaaaagtagcaccggatgctttagcaacaaaagtgacaaaatgatgaacaacaactacgactgtcccctaccggaggaggagaccaaccctaaaggctccggatggctctatcactcagatgctatccgcacgtacttgaatctgatgggcaagagtaaaaaggatgctacactcgaggcctgtgccggagcactccagaacctcaccgcaagcaaaggcctcatgtcctcaggcatgtcccaactgattggactcaaagaaaaagggcttccccagatcgcgagattgctgcagagcggtaacagcgacgtggttcgctccggcgcatcgctacttagtaacatgtcacgccaccccctgctgcaccgggtaatggggaaccaagttttccctgaagttacccgcctgctgacaagccacactggtaatacctcaaacagcgaggacatcttgagctctgcctgttataccgtccgaaatctgatggccagtcagcctcagctggccaaacaatatttttcaagcagcatgctcaacaatatcattaatctttgccgaagcagtgcaagtcccaaagcggctgaagctgcccgactgctcctgtccgatatgtggtcttcaaaggaactgcagggtgtcctccggcaacagggcttcgatagaaacatgttaggtacattggctggtgctaacagcctgaggaactttacaagccgcttctag

SEQ ID NO: 235086 - DNA, 2244 bp, synthetic construct
  misc_feature 1..2244: note = Description of Artificial Sequence: Synthetic coding sequence
  source 1..2244: mol_type = other DNA
atgaaccattcccccctgaaaacagcgctggcctatgaatgcttccaggaccaggataactcaactctggctctgccctctgatcagaaaatgaagaccggcacgagcggccgtcagcgggtccaggagcaggttatgatgaccgtgaagagacagaaatctaagagtagtcagagctcaaccctttctcattctaacagaggatctatgtacgatgggctggctgataactacaattacggcaccactagtagatcgtcttactactcaaagtttcaggcaggcaacgggagctggggttaccccatctataatggcacactcaagcgagagccggacaacagaagatttagtagttattcccagatggagaattggtcgaggcattacccgaggggctcctgcaatactacaggggctgggtcagatatctgctttatgcagaaaataaaggccagcaggtccgaacccgacctgtattgcgatccaagagggactctgaggaagggcaccttaggcagcaagggccagaaaactactcagaataggtattcattttacagtacttgtagtggacaaaaggcaataaaaaaatgtcctgttcgtcccccaagctgcgcctccaaacaagaccctgtgtatatccctcctatcagctgtaataaagacctgtctttcggtcacagcagggcaagctctaaaatatgttccgaggatatcgagtgcagcgggctaacaataccaaaagcggtgcagtatctgtcctcacaggacgagaagtaccaggcaatcggagcctactacatccagcacacatgttttcaagatgaaagcgcaaaacagcaggtttatcagttggggggaatctgcaaactggtcgaccttctcagaagtcccaatcagaatgtgcagcaggctgctgccggtgccttgaggaatctggtgttcagaagcacgactaacaagctcgaaacccggagacagaacggaatcagggaggcagtgtctcttttacgacggactggcaatgcagaaatccagaaacagctgacagggttactgtggaacctaagctccactgacgaactgaaagaggaactgattgcggatgcacttcctgtgctcgcagacagagtcattattccattcagcggttggtgcgacggcaactctaatatgtcaagagaagtggttgatcccgaagttttcttcaatgccacgggatgcctgcgaaagcggttggggatgcgcgagttgctagcactggtccctcagagggccacaagtagtcgggtcaatctgagcagtgctgatgctggtcgacagactatgcggaactacagcggactcattgactcgctgatggcctacgtacagaattgcgttgctgcatctcgatgtgatgacaaatcggtcgagaattgtatgtgtgttcttcacaatctgtcttacagactggatgccgaggtgccaacgcggtacagacagttagagtataatgccaggaacgcttacactgaaaagtccagtacgggctgcttcagcaataagagcgacaagatgatgaataacaactacgactgtcccctccctgaagaggagactaaccccaaaggctccggatggctgtaccattccgacgcgattcgaacgtatttgaacctaatggggaagagcaagaaggatgccaccctggaagcatgtgcaggagccctgcagaacctcacagccagcaaaggcctcatgtcctcaggtatgtcccaactcatagggctcaaagagaagggcttgccccaaattgctagattactgcagagcgggaattccgatgtcgttcggagtggcgcaagcttgctatctaacatgagccgtcacccactgctacatcgggtgatggggaatcaagtattcccggaggtgacacgactgctgactagccacacagggaacactagtaactccgaggatatcctgagctcagcgtgttataccgtgaggaacttaatggctagccagccccagctcgcaaaacaatattttagctcatcaatgctcaataatatcatcaatctatgccgctcatctgcctctcctaaggctgcagaggccgcacgactgctgttgagcgatatgtggtcatcgaaagagctacagggagtactgagacagcaggggttcgatagaaacatgctgggaacacttgccggtgcaaattcactccggaactttacctcacggttctag

SEQ ID NO: 235087 - DNA, 2181 bp, synthetic construct
  misc_feature 1..2181: note = Description of Artificial Sequence: Synthetic coding sequence
  source 1..2181: mol_type = other DNA
atgaaccacagcccattgaagactgctctggcttacgaatgcttccaagaccaagataattcgactctcgcgctaccctccgatcagaaaatgaaaactggcacctccggacggcagagggtacaagagcaagttatgatgaccgtgaaacgccagaaatctaaatccagtcaatcctcgaccctgtctcactccaatcgcggatccatgtatgacggcctggctgataactataactatggaaccacctccaggagcagctactatagtaagttccaggcaggaaacggctcgtggggatatcctatttacaacggtacactcaaacgtgaaccagacaatcggcgtttctccagctattctcagatggaaaactggtcacggcactaccctagaggctcgtgcaacacaaccggcgcaggaagcgatatctgctttatgcagaagatcaaggccagccgatctgagccggatctttattgcgatcccagaggcaccctgagaaagggaactctggggagtaagggacagaagacgacccaaaaccggtactctttctacagcacctgctcaggccaaaaggccatcaaaaagtgtccagtcagacctccaagttgtgcaagcaaacaggaccctgtgtacatccccccaataagctgtaacaaggatctgagctttggtcattctcgcgctagttccaagatttgttcagaagatattgaatgtagcgggctcactatccccaaggccgtgcagtacctcagcagccaggacgagaagtatcaagctatcggtgcttactacatacagcacacatgcttccaagatgaaagtgcaaaacagcaggtataccaactcggcggaatttgcaagctcgtggacctcctacggagcccaaaccagaacgtgcagcaggcagcagctggggctctgcggaacctggtgtttcgctctactaccaacaaactggagacaaggagacagaatggcatccgcgaggctgttagcctgctgcgacggaccggaaacgctgagatccaaaaacaactgacaggcctcctgtggaacctgtcttctacggacgaacttaaggaggagctgattgcggacgctctaccagtgctggccgacagggtgataataccctttagcgggtggtgtgatggaaatagcaatatgtcgcgggaggttgtcgaccccgaggtcttcttcaacgccactggctgcctcagaaatctgagctcagccgatgccggaagacagactatgagaaattacagcggtttaattgactctttgatggcttacgtccagaattgcgttgctgcaagccggtgcgacgataagagcgtggagaattgcatgtgtgttcttcacaacctttcttaccggctggatgccgaagtacctactcgatatagacagctggagtataatgcaaggaatgcctatacggagaaaagttctaccggctgtttcagcaacaagagcgataaaatgatgaataacaattatgactgccccctgcctgaggaagagacaaaccccaaggggagtggctggctctatcactctgatgcaatacggacttatctcaacctgatgggtaaatccaagaaggacgcgaccctggaggcatgtgcaggagccctccaaaaccttaccgcctcaaaagggctgatgtcctcggggatgagccaattgatcggccttaaggaaaagggactgcctcaaatcgccagactgctacagtctggcaattctgatgtggttaggtcaggcgcatcactgctatccaatatgtctcggcatcccctcctccatagggttatgggcaaccaggtgttcccagaggtgacccggctgcttacttctcatacgggcaataccagcaatagtgaagatatcctgtcctccgcatgctacacggtgcgcaatttgatggcctcccagcctcagctcgccaagcagtatttttctagctccatgctcaacaacatcataaatctatgtcgctcttccgcaagcccgaaagctgccgaggccgctagactgttgttgtccgacatgtggagcagcaaagaactgcagggagtcttgagacagcaggggttcgatagaaacatgctagggaccctggctggtgctaatagtttgcgaaatttcacctctagattctag

SEQ ID NO: 235088 - DNA, 2646 bp, synthetic construct
  misc_feature 1..2646: note = Description of Artificial Sequence: Synthetic coding sequence
  source 1..2646: mol_type = other DNA
atggcagcccctggcgctcctgctgagtacggttatatcagaaccgtcctgggccagcagattcttggccagctggattcctccagcctcgcactgccgtccgaggctaagctcaagctggcaggatcctctgggcgtgggggacagactgtgaagtctcttaggattcaggagcaggtccaacagaccctggctcgcaaggggaggagtagcgtcggaaacggcaatctgcatcggacatcttcagtgcccgaatatgtgtacaacctccaccttgtggaaaacgactttgtggggggacgcagtccagtgccaaaaacatatgacatgctcaaggccggaacaacggctacttacgagggcagatgggggaggggcacagctcaatattcttctcagaaaagtgtcgaggagagaagtttacgccatcctttgcgccgacttgaaatatcacctgatagctccccagaacgtgcccactacacgcacagcgattatcaatactcccagcgaagtcaggctggccatacattacaccaccaggagtctagacgcgcagctttgcttgtgcccccaagatatgctagatccgaaatagttggcgtttctagagctggcacaaccagtcgccagcgccattttgatacataccaccggcagtaccaacacggatctgtatcggacaccgtttttgacagcatcccagccaacccggctctgttgacttacccgaggcccggaacctccaggtctatgggtaacctgctggaaaaggaaaactacctgaccgcaggccttactgtaggccaggtgagacccctagtgccgcttcagcctgtgacccaaaatcgggcttcccggtcatcctggcatcaaagcagctttcattccacccgaacactgcgcgaggcaggcccatccgtcgcagtcgattcgtcaggcagacgagcgcacttaacagtgggacaggccgctgctgggggaagcgggaacttactgactgaacgcagcacctttacagactcccagctcggaaatgccgacatggagatgaccctcgaaagagctgtgagcatgctcgaggccgatcacatgcttcccagccgcatatccgctgctgcaacattcatacaacacgaatgcttccagaaatccgaggctcggaagagggtcaaccaactgaggggcatcctgaaactcctgcaactcctgaaggtccagaatgaagatgtacagcgagccgtgtgcggcgctcttagaaatttagtgttcgaggataacgataacaagttagaagtcgccgagctgaacggcgtgcccagactgttgcaggttctcaaacagactagggacctcgagaccaagaaacagatcactgaccatacagttaacttaaggtcgcggaatggctggcctggcgcagtggcacacgcgtgcaacccctcgactttaggcggacagggaggacgcataacacgaagcggagtcagagaccagcccgaccagcatggtctgctctggaacttgagtagcaacgataaattgaaaaatctgatgatcacagaggccttgctgaccctgaccgagaacatcattatccccttttccggatggcccgagggcgactatcccaaggccaatgggctgttggactttgatattttttataatgtgaccggctgcctgcgtaatatgtcctcagccggagccgatggaagaaaggctatgcgaaggtgcgacgggctgatcgactccctcgtccattatgttcggggaactatcgcagattaccagcccgacgacaaggccacagaaaactgcgtatgcatcctgcataatctcagttaccagctcgaggctgaactgcctgaaaagtactcccaaaatatttacatccagaacagaaatatccaaacggataacaacaaaagtattgggtgtttcggttcccgtagcaggaaggtgaaggagcagtatcaagatgtcccaatgcccgaggagaagtccaatcccaagggcgtggaatggctgtggcattctatcgtgattcgcatgtacctgtctctgatcgccaaaagcgtgcgtaactatacgcaggaagcgtcattgggagctctccagaatctcacggcaggttccggtcccatgcctacttcagtggcacaaaccgttgtccagaaagaatccggtttgcaacacacccgcaaaatgctacacgttggcgacccatccgttaaaaaaacagctatttctcttttacgaaaccttagtcgcaatctttctttgcaaaatgaaattgccaaagagacactgcctgacctcgtctcaattattcccgacacagtaccatccactgatctactgattgagacgaccgcatctgcttgctacaccttgaataacattatacagaactcgtatcagaacgctagagatcttctcaacaccggtggcatacaaaagatcatggccataagcgcaggagacgcctacgcaagcaataaggcctccaaagctgcgtcagtgctattgtacagtctttgggcccataccgagcttcaccatgcttataagaaggctcagtttaagaagacagactttgttaattctagaaccgctaaagcatatcatagtctcaaggattag

SEQ ID NO: 235089 - DNA, 2514 bp, synthetic construct
  misc_feature 1..2514: note = Description of Artificial Sequence: Synthetic coding sequence
  source 1..2514: mol_type = other DNA
atggctgcacctggagcccctgctgagtacggctatattcgtacggtgttggggcagcagattctcgggcaactcgacagttccagtctagctctgccatcagaggccaagttgaaattagcaggttcttcaggcagggggggacaaaccgtcaagtctttgcgtatccaggagcaagtgcagcagactctggccagaaaaggaaggtcttctgtggggaatggaaatctccaccgaaccagctccgtgcctgagtacgtctacaatctccacctagtcgaaaacgatttcgttggtggccgttctcccgtgcccaaaacttacgatatgctgaaagccggaacgactgccacctatgagggtcggtgggggaggggcacagcacagtacagctctcaaaagtccgtagaagaacggagtctccggcatccactgagaagactggaaatcagccccgatagttcgccggagcgtgctcactacacgcattcagactatcaatacagccaacgaagtcaggctgggcatacccttcatcaccaagaaagtaggcgagcggcactgctagtcccacccaggtacgcaaggtccgaaatagtgggagtctcacgcgcaggtaccaccagcagacagcgacatttcgatacctatcacaggcaataccagcatggaagtgtgtctgatacagtgttcgactctattcccgcaaaccctgctctgctgacatatcccagaccgggaacctcccggtccatgggtaacttgctcgagaaagagaattatcttaccgccggactgactgttggccaggtacggccattggtacccctgcagcccgtcacacaaaacagagcctcacgcagcagctggcatcagagcagcttccattctaccaggacactcagagaagccggtccttccgtggccgtggactcaagcgggaggagggctcatcttacagttgggcaagccgctgccggaggcagcgggaacctcctgaccgagcgctcaacgtttactgatagtcagctcggaaacgctgacatggagatgaccctcgagcgcgcagtttccatgctggaggccgatcatatgctaccctcccggatcagcgctgcagccacatttatccaacatgaatgtttccaaaaatcagaggccagaaagcgggttaaccagctgagaggaatacttaagctgctccagctgctcaaagtgcagaatgaggacgtacaacgagctgtgtgcggcgctctgcggaacctcgtgttcgaagataacgataataaacttgaagtggcagaactaaacggcgttccgcgtttattgcaggtgctgaaacagacccgggatttagagacaaagaagcagatcacagggttattgtggaatttatcttccaacgacaaattaaagaacctgatgatcaccgaagccctgttgactctcactgaaaacatcatcattcccttttcggggtggcctgagggcgactaccccaaagctaacgggcttctggactttgacattttttataacgtgactgggtgtctgcgaaatatgtcaagtgccggagcagatggacgcaaggcgatgagacgctgcgacggacttattgacagtttagttcactatgttcggggaacaatcgcagactaccaacctgatgacaaggctaccgagaactgcgtgtgtatcttgcataacctgtcctatcagctagaggccgagctccccgagaagtacagtcaaaacatttatattcagaaccgtaacattcaaaccgataataacaaatcgattggctgtttcggaagcaggtctaggaaggtcaaggagcagtaccaggacgtaccaatgccagaagagaaatctaatcccaaaggagtggaatggctatggcacagtatcgtaattcgcatgtatctctctcttatcgctaaaagtgttcggaattacacccaggaggccagcttgggcgctctgcagaacctcaccgccggatctggcccaatgcccacatccgtggcacagacagttgtgcagaaggagtcagggctgcagcataccaggaagatgctgcatgttggagacccgagcgtgaaaaaaactgctatttcattattgcggaacctgagccggaatctgtctttgcagaatgagattgccaaggaaacccttccagatctggtaagcatcattcctgataccgtcccaagcacagacctgctgattgagacaactgcatcagcatgttatacccttaacaacatcatccagaatagctaccagaacgctcgcgacctgctgaacaccgggggtattcagaaaatcatggcaattagtgcaggcgacgcttatgctagtaataaggcttcaaaagctgctagtgtcctgctgtattccttatgggcacacactgagctgcatcacgcctacaaaaaggctcagttcaaaaagaccgactttgtgaactcccgcaccgcaaaggcctaccactcattaaaggattag

SEQ ID NO: 235090 - DNA, 2475 bp, synthetic construct
  misc_feature 1..2475: note = Description of Artificial Sequence: Synthetic coding sequence
  source 1..2475: mol_type = other DNA
atggctgcgccaggcgctccggcagaatacggttacatcaggactgtcttaggacagcagattctagggcagttggactcctcctcgctggccctgccatccgaagcaaagctgaagttggccggtagctctggcagagggggacaaaccgtgaagtctcttcggatccaagagcaggtgcagcagacacttgctcggaaaggacggtctagcgttggcaatgggaacctgcatagaaccagttcagtccctgaatacgtttacaatctgcatttggtagagaacgattttgttggaggcagatcccctgtgcccaagacatacgatatgctgaaagctggcaccacagccacatatgaggggaggtgggggaggggtacggctcagtatagctcacagaaatccgtcgaggaacgcagtctccgccatccccttcgaaggcttgagattagcccagattcaagccctgaaagagcccattacacccactccgattaccagtatagccagcgcagtcaggccggacacacccttcaccaccaggaatcccggagggccgcactgctcgtgcccccaaggtacgccagatcagagatcgtcggagtaagtagggctggcaccactagcaggcagcgccacttcgatacctatcataggcagtatcaacacggctctgtcagtgacaccgtgttcgacagtattcccgctaatcccgcactgttgacatatcccagacctgggacgtcccgttccatgggaaacctgttagaaaaggaaaactacctgacagccggactgactgtgggccaggtccgtcccctggtgcctctgcagcccgtcacccaaaatcgggcttcaaggagctcatggcaccagtcttcctttcactctacgcgtaccctacgcgaagccggtccaagcgtggctgtggactcctccgggaggcgtgcccacttaactgtgggccaggccgctgcagggggtagtggcaaccttctcactgaacgttcaaccttcacggattctcaactgggcaatgcggacatggagatgacgctcgagcgcgctgtcagcatgctggaggccgaccatatgctgcctagtcggatctcggctgctgctacattcattcagcacgagtgtttccaaaaaagtgaagctaggaaacgtgtgaatcagctgagaggcattctgaagctactccagttgttaaaagtgcagaacgaggacgtccagcgcgcagtctgcggcgcattacgcaacctagtgttcgaggacaacgataacaaactggaagtagctgaactcaacggagtccccagactactgcaggtactgaagcagacacgcgatctggagactaagaagcagatcacggatcacaccgtgaacctgaggtctcgtaatggctggccgggagcggtagcacacgcatgtaatccctccacgctggggggtcaaggcggaaggatcactaggtctggcgtccgagatcagccagatcagcacggcctgctgtggaacctcagttccaacgacaaactgaagaatctcatgattactgaggcactactgacccttacggaaaacataataatccccttcagcgggtggcccgagggagactatcccaaagccaatggactgctggattttgatatcttttataacgtaaccggttgcctgcggaatatgagttctgcgggtgctgatggcaggaaggcgatgaggaggtgtgatggtcttatcgacagtttggtccattatgtacggggtacgatcgctgactatcagcctgatgataaagccactgaaaattgcgtctgtatcttgcacaacctgtcctatcagttagaggcagagttaccggaaaagtactcacaaaatatctacatacagaacaggaacattcagactgacaataataagtctattggatgcttcgggtcgcgcagcagaaaagtcaaagagcagtaccaggacgtcccaatgcccgaggagaaaagtaatcccaagggtgtggagtggctgtggcactcaatcgtgattcgcatgtatttgagccttatcgcgaagtccgttaggaactacacccaggaggcttcgctaggcgctctccagaatctgactgctggaagtggacctatgccgacaagtgtcgctcaaaccgtagtgcagaaagaaagcggcctgcagcatactaggaagatgctgcatgtgggcgatcccagtgtcaagaagactgctatttctctgttacgaaatttaagcaggaatcttagcctgcagaatgaaatcgctaaggaaaccctccccgatcttgtgagcattatccccgacactgtcccttcaacagacttactcatagagaccacggcgtccgcctgctatactctcaacaacataatacaaaattcctaccagaatgccagagatctgctgaacagggggcaccctgaaaattatggtcactag

SEQ ID NO: 235091 - DNA, 2394 bp, synthetic construct
  misc_feature 1..2394: note = Description of Artificial Sequence: Synthetic coding sequence
  source 1..2394: mol_type = other DNA
atgcaggacggcaactttctcctgagtgctctgcagcccgaggcaggggtgtgcagcctcgcacttccttctgacctgcagctcgaccggagaggtgcggaaggtcctgaagcagagagactgcgggcagctcgagtacaggagcaagttcgcgcaagattgctgcagctgggacagcaaccccgacataatggagcggcagaaccagaaccggaggctgagactgccagaggtaccagccggggacagtaccacacactgcaggccggattcagcagccgcagtcagggtctctcaggagataaaacatctgggtttcggcctattgctaagccagcatacagtcccgctagttggtctagcaggtcggccgtggacctgagttgctcaaggagactgagtagcgcccataacgggggatcagctttcggtgctgctggatatggcggagcgcagccgaccccccctatgcccacccgccctgtgagctttcacgagcgcggaggcgtcgggagcagagccgattacgacaccctgtccctgcgctccttaagactgggaccagggggtttagacgacaggtactcccttgtctccgaacagctggaacccgctgccacatcaacctatcgggcttttgcatatgaacgacaggccagttcttcctcctcccgtgctgggggactggactggccagaagcaaccgaggtgagcccatcacggaccatccgcgcaccagccgtgcgcaccctgcagcgcttccagtccagtcatcgcagtcggggtgtgggaggggcagtccccggagcggtgctggaaccagttgcgagagccccttctgtgcgttctcttagcctgagcctagccgactcgggccaccttccagatgtccacgggtttaatagttatgggtcccaccggacattgcagcgcttgtcaagtggattcgacgatattgacttaccaagtgccgtgaaatacttaatggcctccgacccaaatttgcaagtgctaggggctgcctatatccaacacaaatgctattccgacgccgcagcgaaaaagcaggcgaggagtctgcaggccgtgccccgattggtgaaattgttcaaccacgcaaatcaggaagtgcagcgccacgcaacgggggcaatgaggaacctcatctacgacaacgctgacaacaaactggctctggttgaagagaacggaatctttgagctgctgcggacattgagggagcaggatgacgaacttcggaagaatgtgactggcattctttggaatttgtcttccagcgatcaccttaaagatcggctcgcgagagacacactggagcagctgactgacctggtcctgagccccttaagcggggcagggggaccacctttgatacaacagaatgcttccgaggctgaaatcttttacaacgctacaggtttcctgcggaatctctcttcagcatcacaggctactcgccaaaaaatgcgggagtgtcacgggctggtcgatgctctagtgaccagcatcaaccacgcattagatgctgggaagtgtgaggacaagtcagtggagaacgcagtatgtgtgctcagaaatttgtcttatagactgtatgatgaaatgcccccttccgcccttcaacgcctggaaggcagggggaggagggacctggccggagctccacctggcgaagttgtcggatgctttaccccccagagtaggagacttagggagttgccattagcagccgatgccttgacttttgcagaagtgagtaaggatcctaaaggcctggaatggttgtggagccctcagattgtgggtttgtataataggctcctgcaacgctgcgaactgaaccggcacacgaccgaggccgcagccggtgccctgcagaatattacagctggcgatagacgttgggccggtgtactgtcccgactcgctctggaacaggagagaatcctgaaccctttacttgacagggtgcggaccgccgatcaccatcagctgagatcgctgaccggcctcatcaggaacctgtcgagaaacgctcgaaacaaggatgagatgagtactaaggttgtcagtcacctgatagagaagctgccagggtccgttggtgaaaaatcacctccagctgaagtcttggtgaacattatcgcagtcctcaataacctcgttgtcgcctcaccaattgccgctagagatctgctgtactttgatgggctccgaaagctcatattcatcaaaaaaaagcgggattcacccgatagcgagaagtcctcacgagcggcaagctccttgctggctaacctgtggcagtataataagctacaccgcgactttcgtgccaaagggtatcggaaagaagactttttgggcccatag

SEQ ID NO: 235092 - DNA, 276 bp, synthetic construct
  misc_feature 1..276: note = Description of Artificial Sequence: Synthetic coding sequence
  source 1..276: mol_type = other DNA
accgcatttcgtcgaacccctggtgaagagtttgcctggcgagaccctgagctgccggaagtcattcatatgctgcagcatcagttcccttctgttcaggcaaacgcagctgcatatttacagcacttgtgtttcggcgacaataaggttaaaatggaggtgtgccgcttagggggtattaaacacttagtggacctcttggaccatagagtgggctcctcggaggaatgcctgtggtgtccttccaaaccaagattctggcaggtgtaccgatag

SEQ ID NO: 235093 - DNA, 3450 bp, synthetic construct
  misc_feature 1..3450: note = Description of Artificial Sequence: Synthetic coding sequence
  source 1..3450: mol_type = other DNA
atgcctgccccagagcaggccagccttgtcgaggaaggacagcctcagacgaggcaggaagccgctagcacgggtcctggaatggagcccgaaacaactgccactaccatacttgcaagcgtcaaggagcaggagcttcaattccagagactgaccagagagctggaagttgagaggcagatcgtggcgtctcaacttgagcgctgcaggctcggagctgagtctccatctattgcctcaaccagttcgaccgagaagtcgttcccttggcgcagcactgatgtcccaaacaccggggtgagcaagccccgtgtgtcagatgccgttcaacctaacaattacttgatccggactgaacccgaacaggggaccttgtacagtcccgagcagacttcgctgcacgagagtgagggttccctgggcaactctagatcatcaactcagatgaactcctatagtgattccgggtatcaggaagcaggtagcttccacaactcacagaatgttagcaaggctgacaacaggcagcagcatagttttattggtagtacgaacaatcacgtagttaggaatagtagggcagagggacagaccttggttcaaccttcagtggcaaatcgggctatgcggcgagtatccagcgtgccatcacgcgctcagtctcccagttatgtgatttcaacgggggtgtccccaagtagggggagccttcggactagcttggggagtggctttggttcaccctccgtgacagatcctaggcctctgaaccccagtgcctactcttcaacgactctgcctgctgccagggccgcttctccttattctcagcggccagccagccccacggccatccgccgtatcggatcagtgacctccagacagacttccaaccccaatgggccaactccacagtaccaaacgaccgcaagagtcggctcaccactgacacttactgacgcccagactcgtgttgctagcccatctcagggacaggtggggtcttctagcccgaagcgttcagggatgacagcagtgccccagcaccttgggccttctctgcagaggacagtgcacgacatggagcagtttggacagcagcagtatgacatctatgagaggatggtcccccctcgacccgattccctcaccggtttgaggtctagctacgccagtcagcactcccagctagggcaggatttgagatcagctgtgtcccccgaccttcatatcacccctatctatgaaggcagaacctactactcccccgtctaccgaagtccgaatcacggaaccgtagaactgcaaggatcccagactgccctctaccgtaccggaagcgtgggaataggaaacttgcagcggacatctagtcagcgatcaacactgacgtatcaacggaacaattatgctttgaatacgacagccacttacgcagagccttaccgtccaattcagtatcgagtgcaggagtgtaattataacaggctgcagcacgccgtgccagcagatgacggtactacccgttcacctagcattgactcgattcagaaggaccccagagaattcgcatggcgcgacccagagcttccggaggtgattcacatgctgcaacaccagtttcccagtgtgcaggccaatgccgctgcctacctgcagcacctgtgtttcggggataacaaggtcaaaatggaggtgtgtaggttggggggaattaagcatctcgttgacctgctggaccaccgcgttttggaagtgcagaagaatgcgtgcggcgctctgcgaaacttggtgttcggaaagtctaccgatgagaacaagattgcgatgaaaaacgttgggggtatccccgcactgctcaggcttctccgcaagtctatagatgccgaggtgagagagttggtcactggggtgttatggaacttgtcctcctgcgatgcagtgaaaatgactatcatccgggacgcactatctacgctcactaacaccgtgatagtgccacacagtggctggaacaactcgtctttcgatgatgatcacaaaattaagtttcagacaagcctcgtgctcagaaataccaccgggtgtttgcgcaatctctcctcagctggcgaggaagctcgcaagcagatgagatcatgtgagggtctcgttgactcacttctttatgttattcatacctgcgtgaatacatctgactacgactctaagactgtggagaattgcgtctgtaccctgcgtaatcttagctatcggctcgaactcgaagttccccaggcccgtctactgggccttaatgagctggatgatctactcggcaaggagtccccaagtaaagattccgaaccctcctgctggggcaagaagaagaagaagaagaaaaggacccctcaagaagaccaatgggatggagtcggacccattcccggtctgagtaagtcaccaaagggcgtcgagatgctatggcatccctctgtggtaaaaccttacttgacactgctggcagagtcttcaaacccagcaaccctcgaaggctccgcagggagccttcagaacctaagcgccggaaactggaaatttgcggcttacatcagagctgccgtgcggaaggagaaggggctgcctattctggtcgagctcctcagaatggacaacgaccgggtagtgtcgagcgtggccactgcgctccggaacatggccctcgatgtgcgtaacaaggagctaattggaaagtacgcaatgcgagacctggtcaataggctacctggtggaaatgggccatcagtgctgagcgacgagacaatggccgctatctgctgtgccctgcacgaagtgacttccaagaacatggaaaacgcaaaggctttggctgacagcgggggaatcgagaagctcgtaaacatcacaaagggtcgtggcgatcgcagcagtctcaaagtggttaaggcagcagcccaagtgttgaatactttatggcagtaccgcgacctgagaagtatttacaaaaaggacggctggaatcaaaaccactttatcacccccgtttccaccttggaaagagaccggttcaaatcccacccgagcctcagtacgaccaatcaacagatgtcgccgataatccagagcggctccagcaaaccctccccaatttatatctcaagttacagttctcccgctagggaacagaatcgcagacttcagcatcagcagctgtattactctcaagatgactccaacaggaaaaatttcgacgcataccgattgtatctccagagcccccattcatacgaggacccctactttgacgatagggtgcatttccccgcatccacggattacagcacgcagtacggattaaagtctactactaactatgtggatttctacagcacaaaaaggccatcctaccgtgcagaacagtaccccggttcgcctgacagttgggtgtag

SEQ ID NO: 235094 - DNA, 3579 bp, synthetic construct
  misc_feature 1..3579: note = Description of Artificial Sequence: Synthetic coding sequence
  source 1..3579: mol_type = other DNA
atgcctgcacctgagcaggcctctctggtggaggagggccagcctcagacccggcaggaggccgcatctaccggacccggtatggaacccgagacgacagctactaccatcttggcctccgtcaaggagcaggagctgcaatttcagagactgactcgtgaactggaggttgaacgccaaatagtcgcatcccagctggaaaggtgccggcttggcgctgaatcaccctcaattgccagcactagttcaaccgagaagagctttccgtggagatctaccgacgtacctaacaccggggtgagtaagcctagagtttcggatgctgtgcagccaaacaactacttgatccggaccgaaccagaacagggaacgctgtacagcccagaacagacctctctgcacgagtccgaaggcagtctagggaattctagatcgtctacccagatgaactcctatagcgacagcggataccaagaggctggtagcttccacaactctcaaaacgtgagtaaggcggacaataggcaacagcattccttcatcggatctactaacaatcatgttgtccggaacagtagagcagaaggccaaaccctggtccagcctagcgtggcgaaccgagccatgaggagggtgtcaagcgtaccaagtagagcccagagcccctcctacgttataagcacaggggtgtccccaagcagaggcagcctgcgcacatcgttaggttccgggttcggcagccctagtgtgactgatcctcgtcccctgaacccatctgcttattcctccacaacccttcctgcagctcgggcagcttcaccttacagccagaggcctgcgtctcctaccgccatcagacgtatcggatcggttacctcgcggcagacatctaatcctaatggtcctaccccacaatatcagactaccgcacgcgtcggaagtcctctgaccctaaccgacgcacagacgcgggtggcctcacctagccagggccaggtggggtcctcttcccccaaaaggagcggtatgacggcggtaccccagcacctagggccatccctgcaaaggacagtgcacgatatggagcagttcggacagcaacagtacgacatctacgaacggatggtgcccccacgccctgacagtctgactggattgcggtcctcatacgcaagtcagcatagccaactaggacaagacctgcggagtgctgtcagccccgatctccacattaccccaatctacgaaggccgtacttattattcccctgtgtataggtcgccaaaccacgggaccgtggagctgcaggggtcgcaaaccgcattgtatcggacgggctcagtcgggattggcaacctccagagaacgtcttcacagcgtagtacgctaacatatcagcgtaataactacgccctgaatacaactgcaacttacgccgaaccgtatcggccaatacaatacagagtgcaggagtgtaattacaatcgcctccagcatgccgtgcccgctgatgatggcacaacaagatctcccagtattgatagcattcaaaaggatcccagagaattcgcatggcgcgaccccgagttaccagaagttatccatatgttgcagcaccagttcccttccgtccaagcaaacgccgcagcttacttgcagcatctgtgtttcggtgataacaaagtcaagatggaggtgtgtcgcctcggcggtataaaacacctagtggacctactggatcatagagtgctggaagtccagaaaaacgcttgtggcgcattaagaaaccttgtgttcggcaaatccaccgatgaaaataagattgctatgaaaaatgtgggaggaatccccgctctcctgaggctgttgaggaaaagtattgacgcagaagtgcgcgagcttgtgaccggcgtgctctggaatttaagctcttgcgacgccgtcaaaatgactatcatcagagatgctctgagtacgctcactaacactgtcattgtgcctcacagcgggtggaataactcctcctttgatgatgaccataagatcaagtttcagacctcactggtgctcagaaataccacagggtgtctccgcaacttgtcgtcagccggagaggaagcacggaagcagatgagatcctgcgagggacttgtcgattcactcctgtatgtgattcatacatgcgtgaataccagcgactacgattcaaagaccgttgaaaactgcgtgtgcaccctgcggaaccttagctataggctggagttggaggtgccacaagcgagattactgggcctcaatgaactagacgatttgctgggaaaagagtctccatcgaaggattctgagcccagttgctgggggaaaaagaagaagaaaaagaaaagaacacctcaggaggaccaatgggacggagtaggaccaatcccgggtctctccaaatcccccaaaggagtcgaaatgctttggcacccatctgtggtcaaaccctacctaactctgctagcagagagtagcaatccggctaccctggaggggagtgcaggcagcctacagaacctatcagccggaaactggaagtttgccgcatatatcagagccgcagtaagaaaagaaaaaggattgcctatccttgttgagcttctgagaatggataacgatcgggtagtaagtagtgtggcaaccgcactcaggaacatggctctggacgtgaggaataaggagctcatcggaaagtacgcaatgcgggaccttgtgaatcgtctcccagggggaaatggtccctccgtactgagcgatgagacgatggccgctatatgttgtgctcttcatgaggtgacctccaaaaatatggagaacgcaaaggcactcgccgactccggcggtatcgagaagttggtgaacattaccaaaggtcgcggtgatcgctccagcctgaaggtcgtcaaggcagctgcgcaggtgctgaatactctgtggcagtatcgggatctgcgctcaatttacaaaaaagacgggtggaatcagaatcacttcattacacctgtcagcaccctggagcgcgatcggtttaagtctcacccgagtttgtctactacgaatcaacagatgtcacctatcatccagtctgttggctcgacaagctcttcacccgcacttctgggcatcagggacccgagatctgagtatgataggacccagccacctatgcagtactataactcccagggcgacgccacccataagggcctgtacccgggatcttctaagccttcccctatctatatctcaagttacagtagcccggctcgcgagcagaatagacgtctccagcaccagcaactatactactcacaggacgactccaatcgcaagaattttgatgcttaccggttatacctccagtccccccactcttatgaagatccttacttcgacgacagggtccatttccccgcaagtaccgactacagcacacagtacggtctgaagagcactacgaattatgttgatttttactccacaaagaggccatcataccgcgctgaacagtacccaggatcccctgactcttgggtctag

SEQ ID NO: 235095 - DNA, 1845 bp, synthetic construct
  misc_feature 1..1845: note = Description of Artificial Sequence: Synthetic coding sequence
  source 1..1845: mol_type = other DNA
atgaattcatattccgattctggctaccaggaggcgggttccttccacaattcgcaaaacgtgagcaaagcagataatcgacagcagcactcgtttattggcagtacaaataaccacgtagtgagaaactcccgggctgaaggtcaaacactggtgcagccctcagtggccaatagggcaatgcgacgggtgtccagcgtgccttctagggcccagagcccgtcctatgtcatatccaccggggtgtctccaagcagggggagtctgcgaactagtttggggtccggctttggctcaccttccgtgacggatccccgaccactaaacccttcagcatacagttcgaccacgttaccagctgccagagctgcttcgccttattctcagcgacccgcaagtcccactgccattcgcaggattggaagtgtcacgtctaggcagactagcaaccccaatgggccaacgcctcagtatcagacaacggcgagggttggatcacccctcacgttgaccgacgcccagactcgtgtggccagtccctcacaggggcaggtcgggtcaagctcccccaagagaagtgggatgaccgcagtcccgcagcaccttgggccttcacttcagagaacggtgcacgacatggagcaattcggacagcagcagtacgacatatacgagagaatggttcccccaaggcctgattccttgacggcctacggggtcccaatgctcgtttcaatagtgagtctcggaaaaaccttcgtgctcccttgccccgatctccatatcactccaatttatgagggcagaacttattatagccccgtatataggagccccaaccatggtacggtcgagctccagggctcccagacagcactgtaccgcacagggtctgtgggaatagggaacctgcagagaaccagttctcagaggagcactctgacttatcaacgaaataactacgctctaaacaccaccgcgacatacgcagagccctaccgcccaatacagtacagggtgcaggaatgtaattacaacaggctccagcacgctgttccggcagatgatggtaccacgcgcagcccctctattgactccattcagaaggaccctcgcgagttcgcatggcgcgacccagaattgcccgaggtgattcatatgctccagcaccagttcccgagcgtccaggctaatgcggctgcctatttacagcacttatgttttggcgataacaaagtcaagatggaagtgtgtagattgggcggaatcaagcacttagttgatttgctagaccatcgcgtgctagaggtgcagaagaatgcctgcggggcactgaggaaccttgtattcggcaaaagcaccgatgagaataaaatcgcaatgaagaatgtggggggtataccagccttgttgaggcttttacgaaaaagcatagacgccgaggtccgggagctggtgactggtgtgttatggaatctaagttcttgcgatgcagtgaaaatgacaatcatccgtgacgcgttgagcaccctcactaacactgtaatcgtgccacacagcggctggaacaatagtagctttgacgatgaccacaagataaagttccagacctcactcgtactgcgcaacactactgggtgtttacgcaacctgtctagtgcaggggaagaagctcggaagcaaatgcgatcttgcgaaggtctagtggacagcctcctgtacgtgattcacacatgtgtgaacacgtccgactacgatagtaaaacagttgagaattgcgtgtgtaccctccggaatttaatcggctggagttggagatgtccaaggcccggatactgggactag

SEQ ID NO: 235096 - DNA, 1329 bp, synthetic construct
  misc_feature 1..1329: note = Description of Artificial Sequence: Synthetic coding sequence
  source 1..1329: mol_type = other DNA
atgggactggccatggaacatggaggctcgtacgcaagggcgggaggcagctctaggggttgctggtactacttgcgctacttttttcttttcgtgtctttgatccagttcctgattattctgggcctcgtgttattcatggtgtacggaaacgtgcatgtttcgaccgagagtaatctgcaagcgaccgaacggagagccgaaggcctctattctcagctgctcggcctgacagcttctcaatccaatttaacaaaagaattgaatttcaccacacgagccaaggatgccattatgcagatgtggcttaatgccagacgagatctcgatagaatcaacgcttcattccgacaatgccagggcgaccgtgtcatctacaccaacaaccagcgatatatggccgcaattatcctcagtgagaaacagtgccgggaccagtttaaggacatgaacaagtcttgtgacgccctcctgttcatgttaaatcagaaagtcaagaccctggaggtggagatcgctaaggagaagaccatatgtaccaaggacaaagagtccgtcctgctgaataaaagggtagctgaggagcagctggtggaatgcgtgaagacaagggaacttcagcaccaggagcgacagctcgctaaggaacagttgcagaaggtccaggcgttatgtttgcccctggataaagacaaattcgaaatggacctcaggaatctttggcgagattccatcatccctagatccctcgacaacctcggctacaatctctaccaccctctgggtagcgagctggccagtatccgtcgggcttgcgatcacatgccgtcactcatgagttcgaaagtcgaggaactagctcggagccttcgcgctgacatagagcgtgtcgcacgtgagaactccgacttgcagagacaaaaactggaggcgcagcagggcctacgcgctagtcaggaggcaaagcaaaaagttgaaaaagaagctcaagctcgggaagcaaaactgcaggcagaatgtagtagacagacccagttggcattggaagaaaaggctgttttgcggaaggagcgtgacaacttagccaaagaactagaagaaaaaaaacgggaagccgagcagctcagaatggagttagcgatccgtaatagcgctcttgacacatgtataaaaaccaaaagtcagcccatgatgcccgtgtctagacctatggggcctgttccaaatccccagccaatcgatcccgcatccctagaggagttcaagcggaagattctggaaagtcagcgtcctccagcaggcatcccagtagcccctagcagcggatag

SEQ ID NO: 235097 - DNA, 291 bp, synthetic construct
  misc_feature 1..291: note = Description of Artificial Sequence: Synthetic coding sequence
  source 1..291: mol_type = other DNA
atggagcacaaagaggtcgtactgctgctattactgttcctgaagtctggtcagggtgaacctcttgatgattatgtgaatacccagggacctagcctcttttcagttaccaagaagcagctgggggctggaagcagggaggagtgcgcagccaagtgcgaagaagataaagaattcacctgccgggctttccaatatcactcgaaggagcaacaatgtgttatcatggccgagaaccgaaaaagcagcattattatcagaatgcgggatgccgtcttatttgagaagtag

SEQ ID NO: 235098 - DNA, 291 bp, synthetic construct
  misc_feature 1..291: note = Description of Artificial Sequence: Synthetic coding sequence
  source 1..291: mol_type = other DNA
atggagcacaaggaggtggtgctgttgttgctgctctttctgaagtccggccagggagagcctctggatgactatgtgaacacacagggcccttcactgttctctgtcacaaagaaacagctgggcgcaggaagcagggaggagtgcgccgctaagtgcgaagaggacaaggagtttacctgtcgggcttttcaatatcacagtaaagaacaacagtgtgtcatcatggccgaaaatagaaaaagctcaattatcatccgtatgagggacgctgtgctgtttgagaaatag

SEQ ID NO: 235099 - DNA, 291 bp, synthetic construct
  misc_feature 1..291: note = Description of Artificial Sequence: Synthetic coding sequence
  source 1..291: mol_type = other DNA
atggagcacaaagaggtagttctgctcctgctcttgtttctgaaaagcggccaaggcgagcccctggacgactatgtcaacactcagggtcccagtcttttcagcgttactaaaaaacaacttggagcaggaagtagggaagaatgcgccgctaagtgcgaagaagataaagagtttacctgtcgagcttttcagtatcattcaaaggaacagcagtgtgtgattatggctgaaaatagaaagagctctattattattaggatgcgggatgctgtacttttcgagaaatag

SEQ ID NO: 235100 - DNA, 492 bp, synthetic construct
  misc_feature 1..492: note = Description of Artificial Sequence: Synthetic coding sequence
  source 1..492: mol_type = other DNA
atggacgccctggagggagaatcatttgctctaagtttctccagcgctagcgatgcagaatttgatgctgtggtggggtatctggaggatatcattatggacgacgagttccaactgctccaacgaaattttatggataagtattatctggagttcgaagataccgaggagaacaaattaatatacacacccatattcaacgagtatattagtctggttgagaaatacatagaagagcagctgctacagcgcatcccagagttcaatatggcagcgttcaccaccacactgcagcaccacaaagacgaagtggccggagacatctttgacatgctactgacattcaccgattttttggcctttaaggaaatgtttcttgattatcgggctgagaaagagggaagaggcctggatctctcgtctggccttgttgtgaccagcttgtgtaagtcctccagtttgccggcatctcagaataacttgagacattag

SEQ ID NO: 235101 - DNA, 1890 bp, synthetic construct
  misc_feature 1..1890: note = Description of Artificial Sequence: Synthetic coding sequence
  source 1..1890: mol_type = other DNA
atggaaaactccactactaccattagtcgggaggaactagaggaactacaggaggccttcaacaagatagacatcgataactccggctatgtgtcagactacgaattacaggaccttttcaaagaagcctccttgcctcttccagggtataaagtccgcgaaatcgtggaaaaaattctgtctgtggctgactccaacaaagacggcaagatatccttcgaggagttcgttagcctcatgcaggagctgaagtcaaaagatatttccaaaacattccggaagattattaacaaaagggaaggcatcacagctatcggagggacaagcacaatctcttcagaaggaactcagcatagctattccgaggaggaaaaggtcgcattcgtgaattggatcaataaagccttggaaaacgaccctgactgcaagcatctcattcctatgaatcctaatgacgactcacttttcaagtccctcgcagatgggattcttctgtgcaagatgataaatctgagtgagccggatactatcgatgaacgcgctataaacaagaagaagctgaccccttttactatatcagagaacctgaatctcgccctgaactcagcatcagcaatcggatgtaccgtcgtcaatattggagctagtgacttgaaggaagggaaaccccatttggtgctgggattattatggcaaatcataaaggtgggcctgtttgccgatattgagatctctcgcaacgaggccctgattgccttgttaaacgaaggggaggaactggaggaactgatgaaactctctccagaagaactgttgctcaggtgggtgaattaccacttgacgaatgccggatggcacaccatcagtaatttctcacaggatatcaaggatagcagagcttattttcacctgctaaatcagatagctcccaaagggggtgaggatgggccagctattgccatcgacctgagcggtattaacgaaacgaacgatcttaagagggccggtctaatgcttcaagaggccgataagctcggatgtaaacagtttgtgacaccagccgatgtggtctctggaaaccccaagttaaatctggctttcgtggctaacctcttcaacacatacccctgtctgcacaaaccaaataataacgatatcgatatgaatctcctggagggcgaaagtaaagaagaaaggactttcaggaattggatgaactcccttggcgttaatccttatataaatcatctgtatagcgacctagcagacgccctcgtaatctttcagctgtacgagatgattagagtgcctgtcaattggtcacacgtcaacaagcccccatatcctgccctcgggggaaatatgaagaaaattgagaactgcaattacgcagttgagttggggaaaaataaggctaagttctcgcttgtcggcattgccggacaggacctgaatgagggaaatagcacccttacactcgccctcgtatggcagctaatgagaaggtatacactcaacgtcctctctgatctcggcgagggggagaaggtaaacgatgagatcataattaagtgggtgaatcagaccctaaagtccgcaaacaaaaaaaccagcatcagttcctttaaggacaaatcaataagcacctccctgccagttctggatcttattgatgcaatagcacccaatgcagtccgccaagagatgatacggcgtgaaaacctgtccgacgaggacaaactcaataatgccaaatacgctatatcagtggcgcgaaaaatcggggcaaggatctacgctctgccggatgacctggtcgaggtgaagcctaaaatggtgatgacagtctttgcctgtctaatggggaagggccttaaccgcatcaagtag

SEQ ID NO: 235102 - DNA, 1890 bp, synthetic construct
  misc_feature 1..1890: note = Description of Artificial Sequence: Synthetic coding sequence
  source 1..1890: mol_type = other DNA
atggagaactctacaacaactatctctcgcgaggaactcgaggagcttcaggaggctttcaataagatcgatattgacaattccggctacgttagcgactatgagctgcaagatctattcaaagaagcaagcttgcccctgccaggatacaaggtgcgagagatcgtggagaagattttgtctgtggcagactctaataaggacgggaagatcagcttcgaagagtttgtgagcctcatgcaggaactgaagtccaaggatatctctaaaacattccgaaagatcatcaacaagcgtgagggcatcacagctatcggcggaacttctacaattagttctgagggcacacaacattcatattccgaggaggagaaggtagcatttgtgaactggattaacaaggccctggaaaatgatccagactgtaagcatctgattccaatgaaccccaatgatgatagcttattcaagtcgctcgccgacggcattctgctatgcaaaatgatcaatcttagtgaacccgataccatagatgaaagggctatcaacaagaaaaagctgactcctttcacaatctccgagaatcttaatctggcattaaactccgctagcgccattggctgtactgtagttaacataggtgcctcagacctcaaggagggaaaaccccaccttgtacttggtctgctctggcagatcataaaagtcggcttgtttgcagacatcgagatttccagaaacgaggctctcatcgccctccttaacgagggcgaagagctagaggagctcatgaagttgagtcccgaggaactgttattgcgatgggtgaattatcacctgaccaatgcgggttggcacactatctctaacttctcccaagatattaaagatagcagggcatatttccacctgctcaatcaaatcgctcccaaaggaggggaagacggacccgctatcgcaatcgatttgtccggcataaacgagactaacgatctgaagcgggctggcctcatgctgcaggaggcagataaactgggttgcaaacagttcgtgacgcctgcggacgtggtttctgggaatcctaaactgaacctggcattcgttgccaacctttttaacacctatccttgcctccataagcctaataataatgatatcgacatgaatctactggagggggagtccaaggaggagaggactttccgaaactggatgaatagcttgggcgtcaatccttacataaatcacctatacagcgatcttgccgatgccttggtaatctttcagctgtatgaaatgatccgtgtgccagtaaactggtctcacgtaaataaacctccatatccagccctgggcggaaacatgaagaaaattgagaattgcaactacgctgttgagctggggaaaaataaagctaagttctccctggttgggatcgccggacaggacctcaacgagggcaattctacactgactctagcactggtgtggcagctgatgcggaggtatacgctcaacgtgctcagcgatttaggagagggagagaaagtaaacgacgagattatcatcaagtgggtgaaccagactcttaaaagcgcaaataagaagactagtatttcaagttttaaggacaaaagcattagcaccagccttcccgtcttggaccttatcgacgcaattgcgcctaacgctgtgcggcaggagatgatcagacgggaaaacttgtcagacgaggataagctgaataacgccaaatacgcaatctccgtggcaaggaagattggcgctcgtatttatgccctacccgatgatctggtggaggtgaagcccaagatggtcatgactgtttttgcatgtctgatgggcaagggactgaaccggattaaatag

SEQ ID NO: 235103 - DNA, 165 bp, synthetic construct
  misc_feature 1..165: note = Description of Artificial Sequence: Synthetic coding sequence
  source 1..165: mol_type = other DNA
atggagaatagcaccacaaccatttctagggaggaattagaagagctgcaggaggcgtttaacaagattgatattgataatagcggctatgtcagtgactacgaactccaggacctgtttaaagaggcgagcctgccgttgcccggatacaaagtgagagagtag

SEQ ID NO: 235104 - DNA, 363 bp, synthetic construct
  misc_feature 1..363: note = Description of Artificial Sequence: Synthetic coding sequence
  source 1..363: mol_type = other DNA
atggaaaactctacaactaccatctccagggaggagttagaggaactgcaggaggcgttcaacaagatcgatattgataactcaggttacgtgtctgattatgaacttcaggacctgttcaaagaagcgtcccttccccttcccggttataaggtgcgagagattgttgagaagatcctttcggttgccgattccaacaaagacgggaagatcagctttgaggagtttgtgagtttgatgcaggagctgaaatcgaaggacattagcaagaccttccggaagatcattaataagcgcgagggcatcaccgcaatcggcggtaccagcacaatttctagcgagggtacgcagcattcctactag

SEQ ID NO: 235105 - DNA, 360 bp, synthetic construct
  misc_feature 1..360: note = Description of Artificial Sequence: Synthetic coding sequence
  source 1..360: mol_type = other DNA
atggagaatagcacaacaaccattagccgagaggagttagaggagcttcaagaggcctttaataagattgacattgataactctgggtacgtgtcggattacgaactgcaggacctgtttaaggaagctagcctacctctgcctggctacaaggtgcgcgagatcgtagaaaaaatactctcggtagccgacagtaataaggacggcaagatttcatttgaagagtttgtgagtttgatgcaggaactcaagtcaaaagacattagcaagaccttcagaaagattattaataagcgggagggcattacggcaattgggggaacttcaaccataagctccgaagggacgcaacattcctag

SEQ ID NO: 235106 - DNA, 102 bp, synthetic construct
  misc_feature 1..102: note = Description of Artificial Sequence: Synthetic coding sequence
  source 1..102: mol_type = other DNA
atggaaaattctacaaccactatctcccgtgaagagctcgaggagcttcaggaggcattcaacaaaattgatattgacaattcagggtacgttagcgactag

SEQ ID NO: 235107 - DNA, 177 bp, synthetic construct
  misc_feature 1..177: note = Description of Artificial Sequence: Synthetic coding sequence
  source 1..177: mol_type = other DNA
atggagaattcgactacaactatctcccgggaagaacttgaggaacttcaggaggcctttaacaaaatcgacatagacaatagcggatatgtcagcgactacgaacttcaggatctttttaaggaagcttctcttcccctgcccggatacaaagtcagggagattgtcgagaagtag

SEQ ID NO: 235108 - DNA, 1890 bp, synthetic construct
  misc_feature 1..1890: note = Description of Artificial Sequence: Synthetic coding sequence
  source 1..1890: mol_type = other DNA
atggagaattctacaacgactatttctcgagaggagctggaagaacttcaggaggcgtttaataaaatcgatatagacaacagtggctacgtatcagactatgaactgcaggacctgtttaaagaagcctctctgccgctgccaggctacaaagtccgggaaatagtggagaagatcctctcagtcgccgatagtaacaaggatgggaagatatcttttgaggaattcgtgtcattaatgcaagagctcaaatctaaggacatttcaaagacttttaggaagattattaataaaagggaaggcatcaccgccatcgggggtacttccaccataagttccgagggcacccaacactcatattcggaggaagagaaggtcgcttttgtcaattggattaacaaagctctggagaatgatcccgattgtaaacatctgatccctatgaatcccaatgatgacagcctgttcaaaagtctcgccgacgggatccttctgtgtaaaatgatcaacctctcagagcctgataccatcgacgaaagagccattaataagaaaaagctgacgcccttcactatctccgagaatctgaatctagcgctgaattccgcgtccgcaattggctgcaccgtcgtgaacatcggcgctagtgatctgaaggagggaaagccacacctggtcctgggccttctctggcagatcatcaaagttggactcttcgctgatatcgagatttccaggaatgaggctctcattgccctgcttaatgagggggaggagctggaggaactgatgaagttgtctccagaagagctacttctgcgctgggtgaactatcatttaacaaacgcagggtggcacacgataagcaacttcagtcaggatattaaagactcccgcgcttacttccacctcttaaaccagattgccccaaaaggcggagaggacggaccagccatcgccatagatttaagcgggatcaacgaaacaaatgaccttaaaagagccggtttgatgctccaggaggcagacaagctgggctgcaaacagtttgtgacccccgcagatgttgtgagtggaaaccccaaactgaatctggctttcgtggctaatctgttcaatacttatccctgtctgcataagcctaacaacaacgatatagatatgaatctgctggaaggagagtctaaggaggagcgcacgtttaggaactggatgaacagccttggcgttaatccttatattaaccatctgtacagcgacctggccgacgcgcttgtcatctttcaactctatgaaatgataagggtgcccgtcaactggtcacacgtgaacaaaccaccctatccagctctgggaggtaacatgaaaaagatcgagaactgcaattacgccgtcgaactgggcaagaataaggccaagttttctctggtaggcattgccggtcaggatctcaacgaggggaactccacgctgaccttagcgctagtgtggcagcttatgcgtaggtacaccctcaatgtgctgtcagatctcggcgaaggggaaaaagtgaacgatgaaatcatcatcaagtgggtcaaccagacactgaagagcgcgaataagaagacatcaataagcagcttcaaagataagtcaatctccaccagcctccccgtactcgatctcattgatgccattgcaccgaacgctgtgagacaggagatgataaggcgtgagaacttgagtgacgaagataaattgaataatgccaagtacgccatttctgtggccagaaaaatcggagcgaggatatatgcactcccggacgacttggtagaggtgaagccaaaaatggtgatgaccgtgttcgcttgccttatgggaaaggggctgaataggatcaaatag

SEQ ID NO: 235109 - DNA, 162 bp, synthetic construct
  misc_feature 1..162: note = Description of Artificial Sequence: Synthetic coding sequence
  source 1..162: mol_type = other DNA
atggagaattctacaacgacaatcagccgcgaggagctcgaagaactgcaagaggcctttaataaaatagacattgacaattcaggctatgtgtccgactatgagctccaggacctctttaaggaagcgagcctcccactccctggatacaaagtgaggtag

SEQ ID NO: 235110 - DNA, 1785 bp, synthetic construct
  misc_feature 1..1785: note = Description of Artificial Sequence: Synthetic coding sequence
  source 1..1785: mol_type = other DNA
atgcctctccctggatataaggtacgggaaatcattcagaaactcatgttggatggtgacaggaataaggacggtaagatctccttcgacgaattcgtctacatcttccaggaggtcaagtcctctgatattgccaagacttttcgcaaagccataaatagaaaagaaggcatttgtgcactcggaggaacttcagagctttctagtgagggcactcagcattcatacagcgaagaggagaaatacgcttttgtaaactggatcaataaagcgctggaaaatgatccggactgtagacatgtcatcccgatgaacccaaacacagacgacctttttaaggccgtcggggacgggatcgtgctttgtaaaatgatcaatctctccgtccctgacaccatcgacgaaagagccatcaataaaaagaaactgaccccatttattatacaggaaaatctcaatctggccttaaattccgcatccgctattggttgccacgttgtgaacatcggggctgaggatctgagagccggtaagccacacctggttctcggtctgctttggcagatcataaagatcggactattcgccgacatagagctgagtaggaacgaagctctcgccgcactactgcgggatggggaaaccctggaagaacttatgaaattatccccagaggaactgctcctgaggtgggccaactttcaccttgagaattccggatggcagaagatcaacaatttctctgccgacataaaactcatcgatttctccaacagtgtcaaggattccaaagcctactttcatcttttgaatcagattgctcctaagggccagaaggagggagaaccgagaatcgacatcaacatgtccgggtttaatgagaccgatgacctcaagcgcgctgaatctatgctgcagcaggccgataaacttggttgtagacagtttgttacaccggcagacgtggtctctggcaaccctaagctgaacctagcctttgtcgctaatctcttcaataaatatccagccctcacaaaacctgaaaatcaggacattgattggaccctcttggaaggagagacaagagaggaacgcaccttcagaaattggatgaactctcttggggttaacccacacgtgaaccatctatacgcagatttgcaggacgccttggtaattctccagttgtatgagcgcatcaaggtgcccgtcgactggtctaaggtgaataagcccccatacccaaagctaggcgctaacatgaaaaaactggaaaactgtaactatgcagttgaactgggcaagcatccagccaagtttagcctggtgggcatcgggggacaagatctgaacgacggaaatcaaacgctgaccctggcactggtgtggcaattgatgcgtaggtacactctgaatgtgctcgaagacctcggtgatgggcaaaaagcgaacgacgacataattgtgaactgggtgaaccgaaccctgagtgaagctggcaaatcaacaagcattcaatctttcaaggacaagacgatcagcagctctctcgccgttgttgatttaattgatgctattcaaccgggttgtattaattatgatctggtaaaatcaggtaatctgacagaggatgataagcacaataacgctaagtacgctgtgtctatggctagacgtattggcgcaagggtttacgctctgcctgaagaccttgtagaagtaaagcctaagatggtgatgaccgtattcgcctgtctgatgggacgaggcatgaagcgcgtctag

SEQ ID NO: 235111 - DNA, 1893 bp, synthetic construct
  misc_feature 1..1893: note = Description of Artificial Sequence: Synthetic coding sequence
  source 1..1893: mol_type = other DNA
atggacgagatggctacaacccagatttcaaaggacgaactggatgagctgaaagaagcctttgccaaggtcgatctgaactctaatgggttcatctgtgattacgagcttcatgagttgttcaaggaagccaacatgccactgccgggatataaggtgagggagatcatacagaagctgatgttagacggcgaccgaaataaggatggaaaaatttcctttgacgagttcgtgtatatattccaagaagtgaagtccagcgatattgctaaaacgtttcggaaggccatcaaccgaaaggagggaatttgcgccctgggcggtaccagtgaattatccagcgagggcacccagcatagctactcagaggaagaaaaatacgccttcgtaaactggattaacaaggctcttgagaacgatcctgactgccgccacgtgataccaatgaatccaaatacagatgatttgtttaaagcagtgggagatggaatcgttttatgcaaaatgatcaatctgtccgttccagataccattgacgagcgtgctatcaataaaaaaaagttaaccccatttattatccaggagaatttgaacctggctctgaatagcgccagtgccatcggatgtcacgtagtgaatattggcgcagaggatcttcgagctggcaaacctcatctcgtgttgggcttgctctggcagattattaagatcggtttgtttgccgacatcgagctaagccggaatgaggccctggctgccttactgagggatggggagaccctggaggagttgatgaaactcagcccagaagaacttctcctgcggtgggccaacttccacctggaaaactcaggctggcagaagataaacaacttcagcgccgatataaaggacagcaaggcctattttcacttactgaatcagatagcacctaagggacagaaggaaggcgagccaagaatcgacataaacatgtcaggttttaatgaaacagatgatctgaagcgtgccgagtctatgttgcagcaagccgataaacttggttgcaggcagttcgtgacgcccgcagacgtggtgtccggcaaccctaagcttaacctagcttttgtcgccaatcttttcaataagtacccagctttgaccaaacctgagaatcaagacattgattggactctccttgaaggggagacccgcgaagagcgcacttttaggaattggatgaactctctgggcgtcaacccccatgtcaatcatctgtatgccgatctccaggacgcgctcgtaattctgcagttgtacgagagaatcaaagttcctgtagattggtcgaaggtgaacaaaccaccatatccaaagctcggcgcaaatatgaagaagctcgagaattgcaattatgccgtagaactcgggaaacatccagctaagttttccctcgtgggaatcggtgggcaggacctgaacgacggcaaccaaacgctgaccctcgctcttgtgtggcagctgatgagacggtataccctgaacgttctggaggacctgggtgacggccaaaaggccaatgacgacattattgtgaactgggtgaataggactctatcagaggcaggaaagtccacttccatccaatctttcaaagataagacgatcagctcttcccttgccgttgttgacctcatagacgccatccagcctggatgtatcaattacgatcttgtgaagagcggcaacctgacagaggacgacaagcataacaatgccaagtacgccgtgtcgatggctagacgcatcggagccagggtttacgcactgccagaggatctggtcgaggtcaagcccaagatggttatgactgtctttgcttgcctgatgggacgcggaatgaagcgcgtgtag

SEQ ID NO: 235112 - DNA, 1893 bp, synthetic construct
  misc_feature 1..1893: note = Description of Artificial Sequence: Synthetic coding sequence
  source 1..1893: mol_type = other DNA
atggacgaaatggccacaactcagatctctaaagacgagttagacgaactgaaagaggcgttcgcaaaggtggatcttaactccaacggctttatctgtgattacgagctccacgaactgtttaaggaggccaacatgccactccctggttacaaggtaagagaaatcatccagaaactcatgttagacggtgatagaaataaagacgggaagatttcgttcgatgaattcgtgtacatcttccaggaagttaagagttcagacattgctaagactttcagaaaggcaatcaatcggaaggagggcatctgcgctctaggcggaacaagcgaactgtcctcagaagggacccagcactcatattcagaagaggagaaatacgcatttgttaattggatcaacaaagccttggagaacgatcccgattgtagacacgtgatccccatgaaccccaacacggatgacctgttcaaggctgtcggggatggaattgttctctgcaagatgatcaatttgtccgtcccggacacaattgacgaacgagccatcaataaaaagaagttgacaccttttattatccaggagaatcttaatcttgcgctcaactctgcctctgctattgggtgtcatgtggtaaacattggggctgaggacctccgggcaggcaagccacatttggtgctgggactcctgtggcagattatcaagattggcctgttcgctgacattgaactttccagaaatgaggcattggccgctctactccgagacggagagaccctcgaagaattgatgaagctgtcccccgaggagttgctgctgaggtgggcgaatttccacctggaaaactctggctggcaaaaaattaacaacttttcggccgacatcaaagactctaaggcctacttccacctcctaaatcagattgccccaaagggccaaaaagagggggaacctaggattgacattaatatgagtggatttaatgaaacggatgatctgaagcgagccgagtcaatgctgcagcaggcagacaagctcgggtgccggcagtttgtgactcccgctgacgtggtttcagggaaccctaaattgaatctggccttcgtcgccaacctttttaacaaataccctgccctgactaagcccgaaaaccaggacatcgattggactttactagagggcgagacccgggaagaaagaactttcagaaactggatgaactctctcggagtcaatccacacgttaaccatctttacgctgacctacaagatgcattggtgatcctgcagctctacgagcgcataaaggtaccggtggactggagtaaagtgaacaagccaccatatcctaagctgggcgcaaacatgaaaaagctcgaaaattgcaattatgccgtggagctgggtaagcaccccgcaaagttcagcctggtcggcatcgggggtcaggatctgaatgacggaaaccaaacactcaccctggccctggtctggcaactgatgaggcggtacacactgaacgtcctggaggacttgggtgatggccagaaagcaaacgacgatattatagttaactgggtaaaccgaacactaagcgaggccggaaagtctacttcaatacagagttttaaggataagactatatcgagttccctggccgttgttgacctaatagacgccatccagccaggttgcattaactacgatctggtaaaatcaggaaacctgaccgaggatgataaacacaacaacgcgaagtacgctgtatcaatggcaagacggatcggggctcgggtatatgcgctcccagaggatctcgtcgaggtcaagcccaagatggtcatgaccgttttcgcctgtctcatgggcaggggaatgaaacgggtttag

SEQ ID NO: 235113 - DNA, 1854 bp, synthetic construct
  misc_feature 1..1854: note = Description of Artificial Sequence: Synthetic coding sequence
  source 1..1854: mol_type = other DNA
atggaggacctcaattccaatggcttcatatgtgactacgaactccacgaactctttaaggaggcaaacatgcccctgcccggatacaaggtgcgagaaattatccaaaagttaatgttagatggagaccgcaacaaagacggcaagatttcttttgacgaattcgtgtatatttttcaggaagtaaaatcttcagatatcgcaaaaacttttcgcaaggctatcaatcgcaaagaggggatatgcgccctcgggggaaccagtgagctcagctcagagggcacacagcatagttactcggaagaggaaaaatacgccttcgtcaactggatcaataaggcattagagaatgatccggattgtaggcatgtcattccaatgaatccaaacacagatgacctgtttaaggcggtcggggacggaatcgtgctttgtaaaatgatcaacttaagcgtgcccgatactatcgatgaacgggctatcaacaagaagaaactgactccttttatcatacaggagaatctgaacctggccctgaactcggcaagtgccataggatgtcacgtcgtgaacattggagcggaggacctgcgcgctggaaaacctcacctggtactggggctgctctggcaaattatcaagatcggcttatttgccgacatagaactgagccggaacgaggcattagccgcattactccgtgatggggagaccctcgaggaactgatgaagctgagtcctgaggagttactgctgcgatgggcaaacttccacctcgagaactctggttggcagaagatcaacaatttcagtgccgacatcaagctgatcgatttcagcaacagcgttaaagactctaaggcctactttcacctcctgaatcagattgcaccaaaaggccagaaagagggcgaaccacgcatcgatattaatatgagcggctttaacgagaccgacgacctaaagcgtgcagagtctatgctccagcaggctgacaagctgggctgccgtcagtttgtgacaccagccgatgtggtgtctggcaaccccaagctgaaccttgcctttgtagccaaccttttcaataagtatcctgccctgaccaaacctgagaaccaggatatagactggacattgctcgaaggagagaccagagaggagcgtaccttccgaaactggatgaacagtctgggtgtcaatccgcacgtcaatcacctctacgctgacttgcaggatgctttagtgattctacagctctacgagcgtatcaaggtgcctgtggactggagcaaagtaaataagcctccttatccaaagcttggcgcaaatatgaagaagctagaaaactgcaactacgccgttgaattgggcaaacatcccgctaaattttcgctggtcggcatcgggggacaggatctgaacgatgggaaccagacactgactctcgccctggtctggcagctgatgcgacggtacaccctgaacgtgcttgaagatctcggagacggccagaaggcaaacgatgacatcatcgtcaattgggttaaccgaaccctgtctgaggccggtaaaagtacctctattcagagctttaaagacaagacaatatcctctagcctagcggtagttgatttaattgacgctattcaacctggttgcatcaactacgatctggtaaaaagtggcaatctaaccgaagatgataagcacaataacgccaagtacgcggtgagcatggcgaggcggatcggtgcccgagtgtacgccctgccggaggacctcgtggaagtcaagcctaagatggtgatgaccgtgttcgcctgtctgatgggcagggggatgaagcgggtctag

SEQ ID NO: 235114 - DNA, 1758 bp, synthetic construct
  misc_feature 1..1758: note = Description of Artificial Sequence: Synthetic coding sequence
  source 1..1758: mol_type = other DNA
atgccattgccgggttataaggtcagggagatcattcagaaactgatgctggatggagatcggaataaagacggtaaaatctccttcgatgagtttgtgtatatttttcaggaggttaagtccagcgatatcgctaaaacattccgaaaagctatcaaccggaaggaagggatctgcgccctcggcggaacttccgagctgtcgtccgaggggacccagcactcttacagcgaggaagagaaatacgcgttcgtgaactggatcaataaagcattagaaaatgacccggactgtcgccatgtcatcccaatgaaccccaatacggacgatttgttcaaagccgtcggagatgggattgttctgtgcaagatgataaacctatctgtccccgataccatcgacgaaagagccatcaataagaaaaaactgactcccttcataatccaggagaacctgaatctagctctcaacagcgcttcagctatcggatgtcacgtagtgaatataggcgcagaggatctccgggctgggaagccgcatctcgtgctggggctgttatggcagattataaaaatcggcctcttcgctgacattgaactgagcagaaatgaagcacttgctgcccttttacgagacggagaaactttagaagaactgatgaagctttctcctgaggaattgctgctgcggtgggcaaactttcacctcgagaattcaggctggcagaagatcaacaatttttctgccgatattaaggactccaaggcctattttcacctccttaatcagatagcgcctaaggggcaaaaagagggggaaccacgtattgatataaacatgtctggcttcaatgagactgatgatctgaagagagccgaatcaatgttgcagcaagccgacaaactgggttgtagacagtttgtgactcctgccgacgtggtgagcggcaatcccaagctgaatctcgccttcgtggccaatttgtttaacaagtatccagccctgacaaaacccgaaaatcaagatattgactggaccctgcttgagggtgaaacaagggaggagaggacattccgaaattggatgaactcactgggggtgaatcctcacgtcaatcacctctatgctgacctccaggacgccctggtgattctccagctgtatgagcggattaaggtgccagtggattggtccaaggtgaacaagcccccataccctaagctcggcgcaaacatgaagaagctagaaaactgcaattatgcagtggagttgggaaagcaccccgcaaagttttccctggtggggatcggaggacaggacttgaatgacgggaaccaaaccctgacattagcactggtctggcaactgatgcggagatataccctcaacgtgctggaggacttgggcgacggacagaaggccaacgatgatattatcgtaaattgggttaatagaacactgtcggaggccggtaaaagtacatctattcagtcctttaaggacaagacgatcagctcctctctggcggttgttgatctgattgatgccatccagcccggatgcatcaattacgatttggtcaagtcgggtaacttaaccgaggacgacaaacacaacaacgccaagtatgccgtgagcatggctcgtcggatcggagcccgagtgtacgctctgcccgaagacctcgtcgaagtgaagcccaagatggtgatgaccgtgtttgcatgcttaatgggtagggggatgaaaagggtgtag

SEQ ID NO: 235115 - DNA, 675 bp, synthetic construct
  misc_feature 1..675: note = Description of Artificial Sequence: Synthetic coding sequence
  source 1..675: mol_type = other DNA
atgaattcgctcggggtgaatcctcatgtaaaccatctctacgctgacctccaggacgcgctcgtgatcctccagttatacgagcgtattaaagtgcccgttgattggtccaaggtcaataagcctccatatccgaagctcggcgctaatatgaagaaactcgagaactgtaattatgcagtggaactgggtaaacaccctgctaaatttagtctggtgggcattgggggacaggacctaaacgatggtaatcagaccctaaccctagctttagtgtggcagctgatgcgtcggtacaccctgaacgtccttgaggaccttggagacgggcagaaagccaacgacgatatcatcgttaactgggtcaatcgcaccctgagcgaggccggtaaaagtacctcgatccagtcatttaaagacaagacaatctcttccagcctagccgttgtggacttgatcgatgcaattcagccaggatgcatcaactatgatcttgtgaaaagcggaaatctcactgaggatgataagcacaacaacgccaaatacgccgtctctatggcgcgacggataggggcacgtgtctatgcgttgccggaggatttggtcgaggtgaaaccaaaaatggtaatgacagtatttgcatgcctgatgggacggggaatgaagagggtgtag

SEQ ID NO: 235116 - DNA, 306 bp, synthetic construct
  misc_feature 1..306: note = Description of Artificial Sequence: Synthetic coding sequence
  source 1..306: mol_type = other DNA
atgtcttccgctgccggtttttgtgcctctcgaccgggactgctatttctagggcttcttctactgcctctggtggtcgccttcgcgtccgcggaagcagaagaggacggcgacttgcagtgtctgtgtgttaagacaacgtcccaggtgcggccacggcacataactagtctggaagtaataaaagccggaccgcactgtccaaccgcacagctgattgcgaccttgaagaatggtcggaaaatctgtctggacttacaagcgccactttacaaaaaaataatcaaaaaactgctcgaatcttag

SEQ ID NO: 235117 - DNA, 405 bp, synthetic construct
  misc_feature 1..405: note = Description of Artificial Sequence: Synthetic coding sequence
  source 1..405: mol_type = other DNA
atgaagtctcttacctggatcctgggcctgtgggcactcgccgcatgtttcacacccggtgagtctcagagaggccctaggggtccctaccccccagggcctctcgccccaccccctcccccttgctttccatttggtacaggtttcgttccccctccgcacccgcctccgtacggccctggacgattcccccctccactgtctcctccttacgggcctggcaggatcccccctagccctccacccccatacggtcccggtagaattcagtctcattccctaccgccaccatatgggccaggctacccacagcccccaagtcagccccgtccttatcctcccggaccccctttctttcccgttaatagtccaacagaccccgctctgcccactccggcaccctag

SEQ ID NO: 235118 - DNA, 399 bp, synthetic construct
  misc_feature 1..399: note = Description of Artificial Sequence: Synthetic coding sequence
  source 1..399: mol_type = other DNA
atgtcccagggcgatagcaacccagccgcaattcctcacgccgctgaggatattcaaggcgatgatcggtggatgtctcagcataacagattcgtattggattgcaaggacaaagaaccagacgttctgtttgtgggagattcaatggtgcagctgatgcagcagtacgagatctggagggaacttttcagtcctctacacgctttgaattttggaattggcggagacacaacccgtcatgttctctggcgcctcaaaaacggcgagctggaaaacatcaaaccaaaggtgatcgtcgtttgggtaggcacaaataatcacgagaataccgctgaggaagtggccggtgggatcgaggccatcgtccagctcattaacacacggcagcctcaagcttag

SEQ ID NO: 235119 - DNA, 690 bp, synthetic construct
  misc_feature 1..690: note = Description of Artificial Sequence: Synthetic coding sequence
  source 1..690: mol_type = other DNA
atgtctcaaggagacagcaatccagccgctatccctcacgctgccgaagatatacagggcgatgaccgctggatgtcccagcacaacaggtttgtcctggactgtaaggacaaggaaccggatgtgctctttgtgggagactcgatggtgcagctcatgcagcaatacgaaatttggagggaactttttagccctctgcatgctttgaatttcggcattgggggtgatactacacggcatgtgctgtggagacttaagaatggagaactagaaaatatcaagccaaaggtgatcgttgtctgggttggtacaaataaccatgagaacacagccgaggaggtcgccggaggcatcgaagctatcgtgcaactcatcaacacccgccagcctcaggccaagatcatcgtacttggtctgctgccacggggtgagaagccaaatcccttgagacagaagaatgcgaaggtgaatcagctgctaaaagtatcacttcccaaactcgcgaatgtgcaactactagacaccgacggagggtttgtccactccgatggagccatttcttgtcatgatatgtttgattttctccacttaacaggtggcggatatgcgaaaatctgtaagccccttcatgagctgataatgcagctgttggaggaaacgcccgaggaaaaacaaacaacaatcgcctag

SEQ ID NO: 235120 - DNA, 468 bp, synthetic construct
  misc_feature 1..468: note = Description of Artificial Sequence: Synthetic coding sequence
  source 1..468: mol_type = other DNA
atgtctcagggggactctaatcccgctgcgattccccacgcagccgaagatatacagggtgatgatcggtggatgagtcagcataaccgctttgtgttagattgtaaggacaaggaacccgacgtgctgtttgttggagactcgatggtacagctcatgcagcagtacgaaatatggcgtgaattattttctccattgcatgccctaaacttcggcatcggtggagatacaacccgccacgtgctgtggaggctgaagaatggcgagcttgagaatattaagccaaaagtaatcgtggtctgggttggcacgaataatcacgaaaacacagcggaggaggtcgcaggtggaatcgaagcgatagtgcagctgattaacaccagacagcctcaggcaaagatcatcgtactgattatttattggcaagacgagcaggactatcacgaaagaaaggtgcagatggattag

SEQ ID NO: 235121 - DNA, 609 bp, synthetic construct
  misc_feature 1..609: note = Description of Artificial Sequence: Synthetic coding sequence
  source 1..609: mol_type = other DNA
atgtcacaaggggacagcaacccagccgcaattccacacgccgcagaggacattcagggagacgatagatggatgtcacagcacaacaggtttgtgttggactgtaaagataaagagcccgacgtcctctttgtcggcgattccatggtccagctgatgcagcagtatgagatatggcgtgaactgttttcccccctccacgcgctaaacttcggaatcggcggagacactacgcgccatgttctctggcggctaaagaatggtgagctggagaatatcaagcccaaggtgatcgtggtgtgggtaggcacaaataaccacgagaatacggctgaggaagtggcagggggtatcgaggcaattgttcaactgatcaacacccgccagccccaggcgaagatcatcgtgttgggcaaagcagccgctagcaaatactctatatccgagatcgtcagacttgaacaaggaagtgtcaactggagtattgggacctatcccgatgatacaccggcaacaacacgtcccgcaatcctccagctcttcacgggaaagatgtctcggataaccatgaaggaaaagagcagatggactgaagaaatcctgcactag

SEQ ID NO: 235122 - DNA, 696 bp, synthetic construct
  misc_feature 1..696: note = Description of Artificial Sequence: Synthetic coding sequence
  source 1..696: mol_type = other DNA
atgtcaggcgaggagaatcctgcctccaagcccacccccgtgcaagatgtgcaaggcgatggcaggtggatgtccctgcaccaccgtttcgttgcagactctaaggacaaggagccagaggttgtgttcattggggactcattggttcagcttatgcatcaatgcgaaatctggcgggaattattcagccctcttcacgctctgaatttcggaattggtggtgatggcacccaacacgtgttgtggagattggaaaacggcgagctcgaacatattagaccaaagattgttgtcgtgtgggtggggacaaacaatcacggccataccgcggagcaggtgaccggaggcataaaggcgattgtacagttggttaacgaacgccagccacaagccagggtggtggtgcttggtctgctacccagagggcagcacccaaaccctctgagagaaaagaaccgccaagtgaatgaactcgtcagagccgcactggcaggtcaccctagagcacattttcttgatgcagatcccggattcgtacactcagacggaacaatatcacaccacgacatgtacgactatctgcacctcagccgactggggtatacacctgtgtgtcgagccctgcacagtttgctgctacggctcctggcccaagaccagggtcaaggcgctcccctcctcgagcctgccccttag

SEQ ID NO: 235123 - DNA, 696 bp, synthetic construct
  misc_feature 1..696: note = Description of Artificial Sequence: Synthetic coding sequence
  source 1..696: mol_type = other DNA
atgtctggcgaagagaatccagctagcaaacccactcccgtgcaggacgtgcagggtgacggtaggtggatgtcgcttcaccacaggttcgtggccgattccaaagacaaagagcctgaagtagtgttcataggcgactcattggtccagctcatgcaccagtgtgaaatctggagagagctcttctctcccctgcacgccctgaatttcggaatcggcggagacgggacacagcatgtgctgtggagactggaaaacggtgagctggagcatattaggcccaagattgtggtggtgtgggtggggacaaacaaccatggacatacagctgaacaagttaccggtgggatcaaagccatagtgcaactggtcaacgaacgccaaccacaggccagagtggtagtgctggggttgttaccgagggggcagcatcccaaccctctgcgggagaagaacagacaggtaaacgagcttgtgcgcgcagccctagccggtcacccaagagcccatttcctcgatgctgatccaggcttcgtgcacagtgacggcacaatttcacatcacgatatgtatgactacctgcacttgtcgcgactgggatacacccctgtgtgccgtgccctgcactctttactgctcaggctcctcgcccaggatcaaggtcagggggctcccctgctggagcctgccccttag

SEQ ID NO: 235124 - DNA, 720 bp, synthetic construct
  misc_feature 1..720: note = Description of Artificial Sequence: Synthetic coding sequence
  source 1..720: mol_type = other DNA
atgaccatcaaactgtgggattttcagggctttgagtgcatccgcacgatgcatggccatgaccataatgtgtcaagcgttgccatcatgcccaacggggaccacatcgtctcagcgtcacgcgataagactataaaaatgtgggaggtgcagacaggttactgcgtaaagacttttactggccacagggaatgggttagaatggtacgccctaatcaggatggtactctcattgcctcctgtagtaacgatcaaaccgtgagagtatgggtggttgccacaaaagagtgtaaggccgagctgcgagagcatgaacacgttgtggagtgtatttcttgggcacccgaatcgagctactcatctatctcagaggctaccggcagcgaaactaaaaaaagcggcaaacccggtccattcctgttgagcggcagtcgtgataaaaccattaaaatgtgggacgtgtcaactggcatgtgtctcatgacattagtgggccacgacaactgggtgagaggcgtccttttccactctggcggaaaattcattctgtcttgtgctgacgacaaaaccttgcgtgtctgggattataagaataagcggtgtatgaaaaccctaaatgcccatgagcatttcgtgacgagtctggattttcacaaaaccgctccgtatgtcgtcaccgggtctgtggaccaaacagtaaaggtgtgggaatgccgctag

SEQ ID NO: 235125 - DNA, 1233 bp, synthetic construct
  misc_feature 1..1233: note = Description of Artificial Sequence: Synthetic coding sequence
  source 1..1233: mol_type = other DNA
atggtcctgagtcaaagacagcgcgatgagctgaatcgagccattgctgattacctgagaagcaatggttatgaggaagcttattccgtctttaaaaaggaagccgagctcgatgtgaatgaagagctggataagaagtacgccggactactcgagaagaaatggacctccgtgatccgcttgcagaaaaaagtgatggagctggaaagcaagctcaatgaagccaaggaggaatttacaagtgggggtcctctggggcaaaagagagatccgaaggaatggattcccaggcccccagagaagtatgctctgagcgggcatcggtcccccgtgacccgtgtgatatttcaccccgtgttttccgtgatggtgtccgcatctgaggatgccacaatcaaagtttgggattacgagaccggagactttgaacgcacactcaagggccacacagattcggttcaggatatttcctttgaccattcgggaaaacttttagctagttgttccgccgatatgactatcaaactgtgggattttcaggggtttgaatgtatcaggacaatgcacggccacgatcacaacgtgtcctccgtagcaatcatgcctaacggcgatcacatcgtcagtgcaagtagggacaaaacaataaaaatgtgggaagttcagaccggatactgtgtgaagaccttcacgggacatcgcgaatgggtcaggatggtgcggcctaatcaggatggcactttaatcgcttcctgctccaatgaccagactgtccgggtttgggtggtggccacgaaggagtgtaaggcagagcttcgtgagcacgagcacgttgtggaatgtattagttgggcgcctgagtcatcctacagtagtatatctgaagcgacagggtccgagactaagaagtctggtaaacctggcccattccttctttccgggagtagggacaagacaatcaagatgtgggatgtgtcgactgggatgtgcctcatgacactggtcggtcatgataattgggtgcgcggagtgctgtttcattcgggagggaagttcattttatcctgcgctgacgacaaaacactccgggtgtgggactataagaacaagagatgcatgaagaccctgaatgcacacgaacattttgttacatcactggactttcataaaaccgctccatatgtcgtcaccggctcggttgatcagaccgtcaaagtgtgggaatgcaggtag

SEQ ID NO: 235126 - DNA, 618 bp, synthetic construct
  misc_feature 1..618: note = Description of Artificial Sequence: Synthetic coding sequence
  source 1..618: mol_type = other DNA
atgaccatcaaactgtgggacttccaggggtttgaatgcatacgtacaatgcacggtcacgatcacaatgtaagtagcgttgccattatgccaaatggtgatcatatcgtgagcgcttccagagataaaaccattaagatgtgggaggttcaaacaggatattgtgtaaagacattcactggtcacagagagtgggtcagaatggtgcggccaaatcaggacggcacacttatcgcttcttgttcgaacgaccaaactgtccgagtgtgggtcgtagccaccaaagaatgtaaggccgagctgagggagcatgaacatgtggtagagtgcatttcttgggctccagagagcagctactcatctatttccgaagcaactgggtccgaggtcgggcacgataattgggtgaggggggtcctctttcactctggaggaaaattcatattatcctgtgcggacgacaaaaccctgcgtgtctgggactataaaaacaagcgatgtatgaagacactcaacgctcacgagcatttcgtcacatctctagacttccacaagacggccccatatgtcgttaccgggagtgtcgatcagacggttaaagtttgggagtgccgctag

SEQ ID NO: 235127 - DNA, 1029 bp, synthetic construct
  misc_feature 1..1029: note = Description of Artificial Sequence: Synthetic coding sequence
  source 1..1029: mol_type = other DNA
atggagccgcatgattcttcccatatggattccgaattcaggtacacactgtttcccatcgtgtattcgatcatttttgtgttgggagtcattgctaatgggtacgtgctgtgggtttttgccagactttatccttgtaagaaattcaatgaaattaagattttcatggttaaccttactatggcagatatgctgttcctgataacactccctctctggatcgtgtactatcagaatcaggggaactggattttgcctaagtttctgtgtaatgtcgcagggtgtcttttctttattaacacctactgttccgtcgccttcctgggcgtcatcacatacaatagatttcaagccgtgaccaggcctatcaagacagcccaggccaatacccgaaagcggggaattagtctgagtctggtgatctgggtggccattgtaggcgcagcgtcatacttcttgatccttgactccacaaatacagtccccgactcagctgggagcggcaacgttactcgctgttttgagcactacgaaaaaggaagtgttccagtgctaataatacacatcttcattgttttcagtttcttccttgtgttcctcataatcttgttctgtaacctcgttatcatccgcacgctcctcatgcagccagtgcagcagcaacgtaacgcggaggttaagcggagggcattgtggatggtttgtaccgtgttggccgtgttcataatctgttttgtgccccaccacgtggtacagctgccctggacacttgcagagctgggcttccaggactctaaatttcatcaggctatcaacgatgcgcaccaagttactctctgccttctgagtactaactgtgtgctggatcctgtgatttactgttttttgacaaagaaatttcggaagcacttaacagaaaaattttattccatgaggtcttcaagaaaatgtagtagagcgactacagacacagtgactgaagtggttgtgccctttaaccagatccctggaaattctctcaaaaactag

SEQ ID NO: 235128 - DNA, 1029 bp, synthetic construct
  misc_feature 1..1029: note = Description of Artificial Sequence: Synthetic coding sequence
  source 1..1029: mol_type = other DNA
atggaaccccacgacagttcacatatggactcagagtttagatatacactcttccctattgtatactctattattttcgtgcttggagtgatcgccaacggctatgtactctgggtgttcgccagactttacccctgcaagaaatttaatgagataaagatttttatggtgaaccttacgatggcggacatgctgtttctcataaccctgcctctttggattgtatactaccagaatcaggggaactggatcctacccaagttcttatgcaatgtcgccggttgtctattcttcattaacacctattgctctgtggcattcctgggggtcattacatataatagatttcaggcagtgaccaggccaataaaaaccgcacaggcgaacacacggaagcgcggaatatctctctccctcgttatttgggttgccattgtaggggctgcctcttacttcttaatcctagattcaactaatacagtgccagactcagctgggtcaggaaatgttacccggtgtttcgaacactacgagaaaggctcagttccagtactaattatccatatctttattgtatttagtttctttctagtcttcctgattattctcttctgtaatctggttatcatcaggactctgttgatgcagcctgttcagcagcaacgcaatgccgaggtgaaacgcagagccctatggatggtatgtacagttcttgccgttttcatcatatgttttgtaccacaccatgtcgttcaattaccttggactttggccgagctcggcttccaagatagcaaatttcaccaagctatcaacgatgcacaccaagtgaccctgtgtctcctgagcaccaactgcgtccttgatcccgtgatctactgtttcctgaccaagaaatttaggaaacatctcacagaaaaattctactcaatgcgctccagtcgcaagtgtagcagagcaaccactgacacagtcacagaggttgtggttccattcaatcagatccccggaaacagccttaaaaattag

SEQ ID NO: 235129 - DNA, 1029 bp, synthetic construct
  misc_feature 1..1029: note = Description of Artificial Sequence: Synthetic coding sequence
  source 1..1029: mol_type = other DNA
atggaaccccacgattcttcacacatggatagcgaattccggtataccctgttccctatagtgtactcaattatctttgtgcttggggtgattgcgaatgggtacgtgctatgggtatttgctaggctttatccatgtaaaaaattcaacgaaattaagattttcatggttaaccttaccatggccgatatgctattcctgatcacactgcctttgtggattgtgtattatcagaaccaggggaactggatccttcctaagtttctctgcaacgtcgcgggttgcctgtttttcataaacacctattgttcggtagcttttcttggcgtgatcacgtacaataggttccaggccgtgacccgcccaattaagacagcccaggcgaacacgcggaagagggggatttccttgagcttggtgatctgggtggctatcgtcggagctgcctcttattttttaatattggactccacgaacactgtaccggacagcgccggaagcgggaacgtaacgagatgcttcgagcattacgaaaaaggttccgtgccagtgctcatcatacacattttcatcgtgttctccttctttctcgtcttcttgataatactgttttgcaatctggtgattattcgcacactccttatgcagccagttcagcagcagcgcaatgccgaggtgaaaagaagggctctgtggatggtgtgcacagtactggcagtgtttattatttgctttgtgccgcatcacgtggtgcagctcccctggacgttggcagagctgggatttcaggacagcaaattccatcaggccatcaatgacgcccatcaggtcacactgtgtctgctcagcactaattgcgttttagaccctgtcatctactgcttcttgacgaagaagttccgaaaacatctgacggagaaattctattccatgcggtctagcaggaagtgttctagagccaccaccgacactgtgacagaggtggtggtgccctttaaccagattccgggtaactccttaaagaactag

SEQ ID NO: 235130 - DNA, 1128 bp, synthetic construct
  misc_feature 1..1128: note = Description of Artificial Sequence: Synthetic coding sequence
  source 1..1128: mol_type = other DNA
atgaaggtgtggctgttgcttggcctcctgctagtacacgaggccttggaggacgtgaccggccagcatctccctaagaacaagcgccctaaagaacccggagaaaaccgcattaaacccacaaataagaaggtgaagcccaagatccccaagatgaaagatcgcgacagcgcaaactccgccccaaagacccagtccataatgatgcaggtgcttgataaaggaaggttccagaagccagccgcaacactcagtttgctggccggacaaacagtggagctgcggtgtaaaggctctcgaatcggttggagttacccagcctacctggatacattcaaagactcccggctgtcagtgaaacagaatgaacgctatggccaactgactctggtgaactcgacatccgctgacaccggggagtttagttgctgggtccaactctgttctggttatatctgccgaaaggatgaggctaagacgggcagcacttacatcttcttcacagaaaagggagaattgtttgtgccttcaccctcctactttgacgtggtttatctgaatcctgacagacaagccgtcgtcccatgcagggtgacagtgctgagtgctaaggtcaccctgcacagagagttccctgcaaaggagattcccgctaatggcacggatatcgtttatgatatgaaacgcggttttgtgtacctgcagcctcactctgagcatcagggcgtggtctattgccgggctgaggcaggcggaagaagccagatctctgtgaagtaccaactgttgtatgtggccgtgcctagtggaccacctagcaccacaattctagcaagttctaataaggtgaagtctggcgatgacatttccgttctgtgcaccgtgctgggcgaaccagacgtagaagtggagttcacatggatattccctggccagaaggatgagcggcctgtaaccatccaggatacctggaggctcattcacagaggattggggcacactactaggatttctcaatcggtgattaccgtcgaggacttcgaaaccattgatgcaggctactacatttgtacagcacagaatttgcagggtcaaaccacagtggcaacaacggtggagttttcgtag

SEQ ID NO: 235131 - DNA, 1128 bp, synthetic construct
  misc_feature 1..1128: note = Description of Artificial Sequence: Synthetic coding sequence
  source 1..1128: mol_type = other DNA
atgaaggtgtggctgctgctgggcctcctacttgtgcacgaggcccttgaagacgtcactggccagcatctgcccaagaacaagcgccctaaagaacctggtgagaacagaatcaaaccaaccaacaagaaagtcaaaccaaagatcccgaagatgaaagatcgtgattccgccaacagtgcgcctaagacacagtcaattatgatgcaggtactagacaagggcagattccagaagccagcagccaccttgtctctgctcgccggacagacagtggagcttaggtgtaagggatcccggatcgggtggagctatcccgcttatctggacacattcaaagattccaggttaagtgtcaaacagaatgaacggtatggccagcttaccctggtgaattcgacatccgctgacacaggcgaattctcctgttgggtccaactgtgcagcggatacatttgtagaaaggatgaggctaagactggttccacctatatctttttcaccgagaaaggtgagctgtttgtcccctccccctcttacttcgatgttgtctatctgaatccagatcgccaagcagttgttccatgccgggtgaccgtactcagcgccaaggtcacactacaccgagaattccctgccaaggagatccccgctaacggaacggacatcgtgtacgatatgaagcggggattcgtgtacctccaaccgcactctgaacaccagggcgtggtgtactgccgggctgaagccggaggcagaagccaaatcagcgtaaagtaccagctgctgtacgtcgcagttcccagcggacctccctctactaccatcctggcatcttctaacaaagtcaaatcgggggacgacattagtgtgttgtgtacagtgcttggtgagcccgatgtcgaggtggaatttacatggatctttcctgggcaaaaggacgagcgtccagtcacgatccaggatacttggaggttaatccacaggggcttaggccacaccaccagaatatcccagagcgttatcacggttgaagacttcgaaaccatcgatgcaggttactatatttgcacagcccagaatctgcagggccagacaaccgtggccacgactgtagaattctcttag

SEQ ID NO: 235132 - DNA, 1128 bp, synthetic construct
  misc_feature 1..1128: note = Description of Artificial Sequence: Synthetic coding sequence
  source 1..1128: mol_type = other DNA
atgaaagtttggttattactgggcctgctcctcgtacacgaggccctcgaggatgtgactggtcaacacctgcctaaaaataagaggcccaaggaaccgggagaaaataggatcaagccaactaacaagaaggttaagccgaagataccaaagatgaaggacagagactctgcaaactccgctccaaagactcagtccattatgatgcaggtactggataagggcaggtttcagaagcctgcggctaccctcagtctgcttgccggacaaacagtagagttgaggtgcaaagggtcccgaatagggtggagttacccagcttacttggatacctttaaggactcacgcttgtctgtgaaacagaatgagagatatggacagcttacactagtgaatagtacttctgctgatacgggggagttttcatgttgggtgcagctgtgttcaggatacatatgccgcaaagacgaagccaagactggcagtacttacatcttttttacagagaagggggagctctttgtaccttcaccaagttacttcgacgttgtgtatctcaaccccgatcgacaagcggtggttccatgtcgagtgaccgtgctgtcggccaaagtgacactgcacagggagtttccggctaaagagatccctgccaatgggacagatatcgtgtacgacatgaaacgagggtttgtgtatctgcaaccacactccgagcatcaaggagtagtttactgcagggcagaggctggaggaagatcccaaatatccgtcaaataccaactgctatacgtggccgtgccaagtggtccgcctagcaccaccatactggccagctccaacaaagtgaagtcaggagatgacattagcgtgctatgtactgttctgggagaaccagacgtcgaagtggagttcacttggatcttccccggacagaaagatgaacgacctgtgacaattcaagacacctggcggctgattcatcgcggactggggcatactactaggatctctcaaagcgtaatcaccgtggaggactttgaaacaatagacgctggctattacatatgcacagcccagaatctccaggggcagactacggttgcaacgacagttgagttctcatag

SEQ ID NO: 235133 - DNA, 3075 bp, synthetic construct
  misc_feature 1..3075: note = Description of Artificial Sequence: Synthetic coding sequence
  source 1..3075: mol_type = other DNA
atggcgcaaggggcaatgcggttctgctcggagggtgactgcgccatcagcccccctcggtgtccaaggagatggctgcctgagggccctgtgccccaaagtccccctgcttccatgtatggctcgaccggcagtctcttaagacgcgtggctggccctggcccacggggacgcgagctcggtagggtgaccgcaccgtgcactcctctgcgcggtccacctagtccaagggtggctcctagcccttgggctccaagctcccccacggggcagccccctcccggtgcccaaagcagcgtagttatttttagatttgtggagaaagcctctgttaggcccttgaatggccttccagcacccggaggactgtccagatcctgggatctcggcggagtgtctccccctaggccgacccccgcactcggacccggtagcaatcggaaacttcgactcgaagcaagcacgagtgacccactgccagctaggggcggaagcgccttgcccggttcccggaatctcgttcacgggccacccgcaccacctcaggttggcgcagacggcctgtactcatccctgcccaacggcctgggcggtcctccagaaaggctggctacattgttcgggggtcccgctgatacaggcttcctgaatcagggcgacacctggtcatcaccccgtgaagtgtcctcccatgcccagaggatcgcaagggcgaagtgggagtttttttatggtagcctggatcctcctagttctggcgctaagccccctgagcaagcgccaccgagcccaccaggagtggggagtcggcagggctccggggtcgcggtggggagggccgctaaatattctgaaacagacctggatacagtgcctttaaggtgttatcgcgagactgatatcgacgaagtgctcgccgagcgcgaagaagccgactctgcaattgagtcacaacctagcagcgagggtcctcctggaaccgcctaccccccagcaccccgaccagggcctctcccaggaccacatcccagcttagggtccggcaacgaggacgaggacgatgacgaggcgggaggcgaagaagacgtcgatgatgaagtttttgaggcctctgaaggcgcacgaccaggatcccgcatgcctctgaagtcccctgttcctttcctccctgggacaagcccttcagccgacgggccagattctttcagctgtgtctttgaggccatattggaatcccatagggcaaagggcacctcttatacttcgctagcaagcctggaggccctcgcctcccctggcccaactcaatctccctttttcacgttcgaactccctcctcagccccctgctccacggccagacccaccagccccagcgccactggcgcctttggaacccgactcaggcacgtcctcagctgccgatgggccatggactcagcgcggagaagaggaagaggctgaagcacgcgcaaagctcgccccaggtagagaacctccttcaccttgtcacagcgaagactcgctgggcctgggcgctgccccattaggatctgagccacccctgagccaattagtgtcggacagcgactctgaactagactcaaccgagcggttggccttaggatccacagacacgctgagcaacggccaaaaagcagacctggaggctgctcagaggttggccaaacggctctatcggttggacgggttccgaaaggccgacgttgccagacatctggggaagaacaacgattttagtaaactggtagccggtgaatacttgaaattttttgtctttactggtatgacccttgatcaggccctccgagtgttcctgaaggagctggctttgatgggagagactcaagagagggagcgggtcttagctcacttttctcagcggtacttccagtgcaatcctgaggccctgagttcagaggatggcgcacataccttgacatgtgctctgatgttgctgaatactgacttacatggccacaacattggcaagaggatgacttgtggtgacttcatcggaaacctcgagggcttaaacgacggtggagattttcccagggaactgctgaaggctctgtactcgtccatcaaaaacgagaaattgcagtgggcgatcgacgaggaagagctcaggagatccttatccgagttagctgaccccaacccgaaggtgattaaaagaataagcgggggaagcggctcgggatcctccccattcctcgatctgacaccggagccgggtgctgcggtgtacaagcatggggcactggtgcgaaaagtacatgccgatcctgactgccgtaaaactccacgtggaaagcggggatggaagtctttccatggcatcctcaagggcatgattctgtatctgcaaaaggaagagtacaaacccggtaaagccctgtccgagacagagctcaaaaatgcaatatctatccaccacgcgctcgccacaagggcaagcgactattccaagaggcctcatgtgttctacctccgcacagccgactggcgcgtgttcctattccaggctccatctctcgagcagatgcagtcgtggataactcggattaatgttgtggctgctatgttttctgcccctccattcccggctgcggtgagctctcagaagaaattttcacgccctttactgccttctgcagccacaagacttagtcaggaagaacaggtcaggactcacgaagccaaactgaaggctatggcgtcagaattacgcgagcatcgtgctgcccaacttggtaaaaaaggccgaggaaaagaagctgaggaacaaagacagaaagaggcttacctagaatttgagaaatccagatattcaacgtatgcggcattgctacgcgtcaaactaaaagccggtagcgaagaacttgatgctgttgaggctgcactcgcccaagcagggtcgaccgaggacgggctgcctccctcacactccagcccaagtctgcagcctaaaccgtcatcacagcctagagcgcagcggcacagcagtgagccacggccaggagcaggctctgggagacggaagccttag

SEQ ID NO: 235134 - DNA, 3075 bp, synthetic construct
  misc_feature 1..3075: note = Description of Artificial Sequence: Synthetic coding sequence
  source 1..3075: mol_type = other DNA
atggcccagggggcaatgagattttgctccgagggcgattgcgcaatctccccacctcgctgccctagacgatggctgcccgagggacccgtacctcagtctcctcccgcaagcatgtacggcagtacggggtcactgctgagaagggtggccggacccggaccacggggaagggagcttggcagagtgacggctccgtgtacacctctaagggggcctcccagtcctagggtggcaccctcaccatgggcaccaagttctcctactggacagccacccccaggggcacaatctagtgttgttattttccggtttgttgagaaagccagtgtgagaccgctcaacggcttgcccgctccaggtggactatccaggagttgggacctcggaggggtttcacctccccgacctaccccggcactgggcccaggctcaaacaggaaactccggctggaggcctctacatcagaccctctaccagcaaggggtgggagtgcactgcctggaagccggaatctggtgcacggccctcccgcacctcctcaagtgggggctgacggactgtattctagcttgcccaatggactgggtggccctcccgagagactggctaccctgttcggagggcctgcagacacaggattcctcaaccagggagacacgtggagttcccctcgagaggtttcatcccacgctcagagaattgctagggcgaagtgggagttcttctacggcagcctcgatcctccatcatctggcgcaaaaccccctgagcaggctcccccttcacctccaggagtgggctccagacaggggagcggcgttgctgtgggcagagcagcgaagtactccgaaactgatctggacactgtccctctgcggtgttatcgagagactgacatcgacgaggtcctcgcagagcgcgaggaggccgactcagcgattgaatcccagccgtccagtgagggtccacctggcactgcatacccccctgctcccaggccgggtcctctgccaggccctcacccaagcctgggctctggcaatgaggacgaagacgacgatgaagctggcggtgaggaagacgtggacgacgaggtgtttgaagcaagcgaaggagcaagacccggtagccggatgccactaaaatctccagtgcccttcctgccaggaacatcgcctagcgccgacggcccagattctttttcatgtgtgttcgaggctatcctggagagccatcgggctaagggaaccagctataccagccttgctagcttggaggcgctcgcctcaccagggccaacccaaagccccttcttcacatttgagctccccccacagccacccgctcccagaccagatccacctgcacccgcacctttagctccactggagccagacagcggcacttcttccgccgctgacggaccctggacacagagaggtgaagaggaggaagctgaggcacgcgctaaactggcgccagggagagaaccccctagcccatgccactcagaggatagcctgggtcttggagcagctcctctgggtagtgaaccgcctctttctcagctcgtgagcgatagcgactctgaactggattccactgaacgtctggccctgggtagcaccgatactctgagcaatggacaaaaggccgacctcgaggctgctcagagactagccaagcggctctatagactcgacgggttcagaaaagccgacgttgcacgtcatctgggtaaaaacaatgacttctcaaaactggtggccggagagtacctcaagtttttcgtttttaccggcatgactctagatcaggctctcagggtcttcctcaaggagcttgcccttatgggcgagacgcaggagagagaacgagtgttggcccatttttcacaacgatactttcagtgcaaccctgaggcattgagttccgaggatggggctcataccctgacctgcgcccttatgctgctcaacactgaccttcacgggcacaatatcggaaaaaggatgacatgtggagactttattgggaacctggagggtctcaatgatgggggagattttcctagagaactcctaaaggccctgtactcgtcaattaagaacgaaaagttacagtgggccatagacgaagaggaactgcggcgaagtctttccgaacttgcggacccgaatccaaaagtaattaagaggatttcaggcggatccggttcagggtcatcacccttccttgatctaacgccagaacctggagccgctgtctacaagcatggtgcactggttcgaaaagtgcatgccgatccagattgcaggaaaacaccgagggggaagcggggatggaaaagctttcatgggatactgaaaggtatgatcctatatctccaaaaggaggaatataaacccggaaaggccctgtccgaaaccgagcttaagaatgccatcagcattcaccacgctttagcgactagggccagtgattattcaaagcggcctcatgtgttctatctcaggaccgcagattggagggtcttcttgttccaggcaccgagccttgaacaaatgcaatcttggatcacacgcatcaacgtggtcgctgctatgttctctgcacctccattcccggcagccgtgtctagccaaaaaaagttttcaagaccattgctgccgagtgccgcaacgagactctctcaggaggaacaggtccggactcatgaagctaagcttaaagctatggcttcagaactccgagagcaccgggcagcccaactcggcaaaaagggcagagggaaagaggctgaagaacagcggcaaaaagaggcatacctggaatttgaaaaaagtcggtactccacatacgctgcattgctccgtgtcaagctgaaggccggaagcgaagagttagacgcagttgaagcagcactcgctcaggccggttcaacagaggatggtctgcccccttcccatagcagcccaagtttgcagccaaagcctagcagccagccgagagctcaacggcatagctcagagccgaggccaggagctgggtccgggcgaaggaaaccttag

SEQ ID NO: 235135 - DNA, 2784 bp, synthetic construct
  misc_feature 1..2784: note = Description of Artificial Sequence: Synthetic coding sequence
  source 1..2784: mol_type = other DNA
cagatctggaggtgtccgctgcagcatcatgcggagagtgcaccccctctcccagccctcagctgggcacagcccctgttgtgtttgagctcagtgtcagcgctgggcgagcagcggcctactccagctttgggccctggctctaacaggaaactgaggctggaagccagcacctcagacccattgccagctaggggaggatctgcgctgcctggcagccgcaacctggtgcacgggcctcctgcgccacctcaggtgggagctgacggtctctactcctctctcccgaacgggcttggcggtccccctgagcgcctggcgacactgtttgggggtcctgccgatactgggttcctgaatcagggggatacatggtcctcaccacgagaggtgagctcccacgctcagcgcatagccagggcaaaatgggagttcttctatggttcactggatcctccctcctccggggctaagccccctgaacaggcccctccttcccctcccggagtcggaagtcggcagggtagcggagtagcagtggggcgagcagctaagtactcagaaaccgatctggacacagtgcctcttcggtgttacagggagacagacatcgacgaagtactggctgaaagggaagaggctgattcagcaatcgagagtcagccctcttcagagggcccaccgggaaccgcatatccccctgcaccgaggcctggtccactcccaggcccacacccaagcttggggagcggtaacgaagatgaagatgacgatgaggccggtggggaggaggacgtagatgacgaggttttcgaggcttcagaaggcgctcgtccaggctccagaatgcccctgaagagtccagtcccctttctgcctggcacttcaccctcagcagatggccctgactctttttcatgtgtcttcgaggccatactggaatctcacagagcaaaagggacatcttacacctccttggcaagtctcgaggccctcgcatcccctggccctacccagtcacctttttttaccttcgaattgcctccccagcccccagcccctcggcctgatccccctgctcctgctcccttggccccactggaaccagattcagggacaagtagtgccgctgatgggccttggacacagagaggcgaggaggaagaggcagaggcacgtgctaaactcgccccagggagggagccacctagtccctgccactcagaggattcgctgggcctgggggctgcacctcttggctcggaaccacctcttagtcagctcgtgtctgatagcgattcggaactggattctacagagagactggctttgggctcaactgacacccttagcaacgggcaaaaggcagatctggaggcagcccagaggctagccaaaagactgtaccgcttagacggctttcgcaaggccgacgtcgcgaggcatttgggcaaaaataatgattttagcaagctagttgcgggtgaatatctgaaatttttcgtgtttactggcatgaccctggatcaggcacttcgcgtgttcctcaaagagctcgctctgatgggcgagacccaggagcgagagcgggttttagcccatttttcacagcgatacttccagtgtaatccggaagcactgagtagtgaggatggtgcacacacactaacgtgcgccctgatgcttctcaatacagacctgcacggccataacatcggcaaaagaatgacttgcggagacttcataggcaacctcgaagggttgaacgacggcggagatttccctcgagaattgctgaaagccctttacagtagcattaaaaatgaaaagctccagtgggcgattgacgaggaggagttgcgaagatctctgagtgaactggccgacccaaatccgaaggtcatcaaacgcatcagcggcggatcgggtagcggaagctcccccttcttggatctgacaccagaaccaggcgcagcagtgtataagcacggagctcttgtgagaaaggtgcacgcggatccagactgccgcaagactcctaggggaaaaagaggatggaagtctttccatggaatactaaagggcatgatcctgtacctgcaaaaggaggaatacaaacccggaaaggctttgtctgagacggaactcaaaaatgccatctcaattcaccacgccctggcaactcgtgctagcgattacagtaagcggcctcacgtcttctacctgcgcactgcagactggcgtgtctttttatttcaggctccatccctggagcagatgcagtcctggatcacaagaataaacgtcgtggccgctatgtttagcgcccctcctttccccgcagcagtgtcatcccagaaaaaatttagtcggcctttgttgccatccgctgctacccggctgtcccaggaggaacaggtgcgcacccacgaggccaagctgaaagccatggcctctgagctacgcgagcatagggcagcccagcttgggaaaaaagggagagggaaagaggctgaagaacagcggcaaaaggaggcatacctggaattcgagaaatctcggtactccacatatgccgcactcctaagggtcaagctcaaagcaggatcggaggaactggacgccgttgaagcggcactggctcaggctggctccactgaagatgggctgcctcctagccactcctcacccagccttcagcccaaacccagcagccagccccgtgcccagcgacactctagcgagccccgaccgggtgccggttctggacgaagaaagccgtag

SEQ ID NO: 235136 - DNA, 1542 bp, synthetic construct
  misc_feature 1..1542: note = Description of Artificial Sequence: Synthetic coding sequence
  source 1..1542: mol_type = other DNA
atgggaagtagttggtgcttgtatggttgctgtaatgctggtgtgaaaaccactcgcctggaggcacacagtgaaatgggctcaaccgagattttagagaaagagaccccagaaaatctgagtaatggtacctcatccaatgtggaagccgctaagcgcctggcaaagcgactgtaccagctggaccggtttaaaagaagtgacgtggccaagcatttgggtaaaaacaatgagttttctaagcttgtggctgaggaatatctgaagttttttgactttacaggtatgacattggaccagagccttcgctatttttttaaagctttcagtcttgttggcgagacccaagaacgggagcgggtactaatccatttctcaaatagatatttctactgcaaccccgacacaattgccagccaggacggggtccattgtctgacgtgtgccataatgctgttaaatacagatctgcacgggcataacatcggaaaaaagatgacctgtcaggaatttatagctaatcttcagggcgttaacgaaggtgtagatttctctaaagaccttctcaaggccctctacaactcgatcaaaaacgagaagctggaatgggcagtagacgacgaggagaaaaaaaagtctccctccgagtcaactgaggagaaagctaacggaacacaccccaaaacaatatcccggattggctctaccactaatccctttctcgatattcctcacgatcctaatgccgctgtttacaagagtggctttctcgctaggaaaatccacgcagatatggacgggaagaagactccgcgtggtaaaagagggtggaagacattttatgctgtgctgaaaggcaccgtgttgtacttgcagaaggacgagtacaaacccgaaaaggcattatctgaagaggatctaaaaaatgctgtgtccgtccatcatgctctggcaagcaaagccactgactatgaaaagaagcctaacgtctttaaactgaagaccgccgactggcgggtgctcttgtttcagactcagtcgccggaggaaatgcagggttggatcaacaagataaactgcgtggctgccgtgtttagcgcccctccctttccagccgcaataggctcccagaagaagttcagtcgccctcttcttcccgcaacgactaccaaactcagccaggaggagcagcttaagtcacatgagtctaagctcaaacagatcactacagagctggccgagcaccgatcctatcctcccgataaaaaagtgaaagcaaaggatgtagatgagtataaattgaaagaccactaccttgaattcgaaaagactaggtacgagatgtacgtgtctatccttaaggagggcggaaaggaactcctgagtaatgatgagtctgaggccgcagggctgaagaaatcgcactcatccccgagtcttaaccccgatacctccccaataacagccaaggttaagagaaacgtgtcggagcgtaaagaccatcggccagaaacgccctctatcaagcagaaggtcacctag

SEQ ID NO: 235137 - DNA, 3144 bp, synthetic construct
  misc_feature 1..3144: note = Description of Artificial Sequence: Synthetic coding sequence
  source 1..3144: mol_type = other DNA
atggaaggtcgatctgccgctgccgagaccttcgtgtgggtcaataacgcaagcgctcactctcagtccgttgcaaaagcaaagtatgagttcttgtttgggagatcggagggcaaggcccctgacacttcagatcatggtggcagcactctactcccccctaatgttaccaatgagtttccagaatatggtactatggaagagggaggggaaggcctgagagcctccctcgagtttgacggagaagcccttccttgccaccctcaagaacagcagggggtacagcccctgactggctgccactccgggctggactctgtgaccgagggacccaaggatgtgcgggaggccccttctcagagccacctgaaggaacaaagtttacagcctatcgacagcctgatcagtgccctaaaggctacggaggctaggataatttcaggcactctacaggcaacaaaagttctggaccaagatgccgtgagtagtttcagcgtccagcaagtcgagaaggaactcgacacggcatccaggaagactcagcgcgtaaacaagacgcttccagccggacagaagaacctgccagaaatacccttgtcagccgaagtgacaactgaagaatcattctacctcagcatccaaaaggacctgacggccctgctaacgggggacacccaggcagagatcagtcagatcatgaacaacggaagaaagggagcagtgtgcgtccaggaacccagctgtcctctggcaagcctgggctccagcgcggtgacctgtcattcggctggttcagtgggattccttaaggagcagagaagcgcattgggaagagaacacccagggggatgtgaccgaagtagctctatgggcaggcccggtagagtgaagcacgtagagtttcaaggggtggaaattctgtggactggaggggacaaacgggagactcagcacccaatcgatttcgaaaccagcctccaaaggacagcaagccccgacagcaaagaatcaagtaaggttcccaggcatctcatatcttcagccggactatgcaattccagttctttgactgaaaacgtgtgggatgagtcgtggaaggcccctagtgaaaggccgggaacatcaagtggaacgttctctcctgtgcggcttgacgagagtggcgaagatgaggtgtttctccaggaaaataaacagcatctcgagaaaacccctaagccggaacgagatagagaacgaatttcagaacaggaagagcacgtgaagggcgaagacgaggatatcctggggccaggatatacagaagattctaccgacgtgtattcttcccagttcgagacaatcctggataatacgtcactgtattactctgccgaaagcctggagacgctgtactcggaaccagacagttacttctcgttcgagatgccactcactccaatgatccagcagaggattaaggaaggtggccagttcctggaacggaccagcgggggtggccaccaagacatcctctccgttagcgcagacgggggtatagtaatgggctactcaagcggggtgactaacggcttgaacgatgcctctgacagcatctatacgaaaggcacccccgaaatcgccttttgggggtctaacgctggtgtcaaaacaacgcgactcgaggcgcattctgaaatgggctctactgaaatattagagaaagaaacacccgaaaacttgtctaatggtacctcatctaacgtggaggccgctaaaaggctagcaaaaaggttgtaccagctagaccgtttcaagcgttctgacgtggctaagcatctggggaaaaataacgagttctccaaacttgtggcagaggagtatttgaagtttttcgacttcacaggcatgactctggaccagagcctccgatatttctttaaggccttctccttagtaggagagacacaagagagagagcgcgtgctcatccatttttcaaacagatacttctattgtaatccggacaccattgcctcccaggatggagtgcattgcctgacatgcgcaatcatgttgctgaacactgacctccatgggcataatatcggtaaaaaaatgacctgccaggagttcatagccaacctgcagggtgttaacgaaggcgtggacttttccaaggacttgctcaaggccctctataacagcattaagaacgaaaagttagagtgggccgtggacgacgaggaaaagaaaaagtcaccgagcgagagtacggaagagaaagccaacgggacccatcccaagacaatctctcggatcggaagtacaactaacccattcctggatatcccacacgacccaaacgcagctgtatataaatcagggtttctggcccgaaagattcacgccgatatggacggaaagaagactccacggggtaagcggggatggaagaccttttacgctgtcttgaaggggacggtcctgtacctgcagaaggacgaatacaagcctgagaaggccctgtcagaggaagacctgaaaaatgcggtctcagtgcatcacgccctagctagcaaggcaacagactacgagaagaaacctaatgtgtttaagttgaaaaccgccgattggcgagtgctcttgttccagactcaaagccctgaggagatgcagggatggattaacaaaattaactgcgtggctgccgtcttcagcgctccaccattccctgctgctatcggctctcagaaaaaattcagccggccattgctgcccgctaccaccaccaagctgagtcaggaagaacagctcaagagtcacgagagtaaactgaaacagattaccaccgaactggctgagcatcggtcctatccccctgataaaaaagtgaaggcgaaggacgtcgacgaatacaaactcaaggaccactacctggaattcgagaaaactcggtatgagatgtacgtgtctattctcaaggaagggggaaaggagttactgtcaaatgacgagtctgaagcggctggcttgaagaagtctcactcttcccctagcttgaatcccgatacatcaccgatcacggccaaagtcaagcggaatgtgagcgaaagaaaggatcatagacctgagactccttccattaaacagaaggtgacttag

SEQ ID NO: 235138 - DNA, 810 bp, synthetic construct
  misc_feature 1..810: note = Description of Artificial Sequence: Synthetic coding sequence
  source 1..810: mol_type = other DNA
atgatcggagtcaactctgtgcaatcggcaagcaaggttagggtcagaacctctgggagtgtcaaatactctagggaggactcgattaggcggcaatctcacagatccaagtcgatgaagataagtaactcctccgaattttctgcaaaagaaaataaggccttatacaatagcattaaaaacgagaagctggagtgggccgtcgacgacgaggagaagaaaaaatccccgtccgaaagcactgaagagaaagcaaacgggactcaccctaagacaatatcccgtattgggtctacaactaaccccttccttgacatcccgcatgatccaaatgcagctgtctacaagagtggattcctcgcgcgaaagatacacgctgatatggacggcaaaaagactccgaggggcaaaagggggtggaaaacattttatgctgttcttaaaggcacagtcctttacctgcagaagcatgaatccaaactaaagcaaataaccacagagctggccgaacacagaagctacccacctgacaaaaaagtgaaagcgaaagacgtcgacgagtataaactgaaagatcactatttggaatttgaaaagacacgatatgaaatgtacgtcagcatactcaaggaaggtgggaaagaactcctctcaaacgatgaaagtgaagcggcaggcctcaagaagagtcattcatctccgtcccttaatcccgatactagccctatcactgcgaaggtgaagaggaatgtgagtgaaagaaaggaccatcgccctgagactccaagcatcaagcaaaaagttacgtag

SEQ ID NO: 235139 - DNA, 3150 bp, synthetic construct
  misc_feature 1..3150: note = Description of Artificial Sequence: Synthetic coding sequence
  source 1..3150: mol_type = other DNA
atggaagggcgatccgccgcagccgagactttcgtgtgggtcaacaacgctagtgcccatagccagagtgtggctaaggccaaatatgagtttctgtttggtcgaagcgagggtaaagcgccagatacttcagaccacggcggttctacccttttgccccctaatgtgacaaatgaatttcccgagtacggaaccatggaagaaggtggcgaggggctcagggcaagtcttgagttcgacggcgaggcgctaccttgccacccccaagagcagcagggagtgcagccactcactggttgtcattccggcttggatagtgtgacggaggggccaaaggacgtgagagaggctcctagtcagtcccatctgaaggagcaaagcttgcagcccatagacagccttatcagtgccttgaaagctacggaggcaagaatcatctctgggacgcttcaggccaccaaagttctcgaccaagatgcggtgagctcattctccgtgcagcaagtagagaaagagctggataccgcatctcgtaagacgcagcgggtgaataagacccttccagccggtcagaaaaatctcccggaaattccgttgtccgcagaggtaaccaccgaggaatcattctatttatccatccaaaaggacctcacagctctgcttaccggcgatacccaggctgagatctcgcagataatgaacaatggacgcaagggcgctgtgtgtgtccaggagccaagctgcccccttgcctccttgggctcatcggccgttacgtgtcacagcgcaggctctgtcggatttctgaaggagcagcggtctgcacttgggagagagcatccaggaggatgcgaccggtcgtcatccatgggcaggcccggtagggtgaagcacgttgaattccagggggtggaaattctctggactggcggtgataaacgtgagactcagcaccctatcgacttcgagaccagcctacaacggaccgcgagtcctgattctaaagaatcctccaaagtgccaagacacctcatttcttctgcgggtctctgtaactccagcagcctgactgaaaacgtttgggacgaatcatggaaagcaccctccgagaggccaggaacctcaagcgggacattctcccccgttcggttagatgagagcggagaagacgaagtatttttacaagaaaacaagcaacacctggagaagacccctaagccagagcgcgaccgcgagcggatctcagagcaagaagagcatgtcaaaggagaagatgaggacattctcggccctggctatacagaggatagtacagatgtttattcttcacaattcgagacaattctggacaatacaagtttatattactctgcagaaagccttgaaactctttattctgagcccgattcttacttttccttcgagatgcctcttacccctatgatccagcagagaattaaggaggggggacagttcctggaacggacttccgggggagggcatcaggatattttgagcgtgtctgctgacggcggaatcgtgatgggctactccagtggcgtgaccaacgggctgaacgatgcttctgattcaatttatacgaaaggtacacctgaaatcgctttctggggctctaacgccggtgtgaagaccacacgactggaggcccactccgaaatgggatctacagagatcttggagaaggagacacccgaaaatctctcaaatggaactagttcaaatgtggaagctgcaaaacgactggccaagcggttataccaactggatcgctttaagagatcagatgttgctaagcatctgggcaaaaacaatgaattttcaaagctagtagcagaggagtatttgaaattcttcgatttcactggcatgaccctcgaccaatctctcaggtatttcttcaaagcatttagcctggtgggagaaacccaggagagagagagagtgctgatccattttagcaacaggtacttctactgtaaccctgacacaatcgcctcacaggatggcgtccactgccttacttgtgcaatcatgctgttgaacacggacctgcacggtcatgtttcaaatatcgggaagaagatgacctgccaggagttcatcgctaatttgcagggggtaaacgagggcgtagatttctcaaaggacctccttaaggccctatacaatagtattaaaaacgagaaactggagtgggccgtggatgacgaagagaaaaagaagtctccatccgagtccacagaagagaaagcaaacggtacccatcctaaaactatcagcaggatcggttctactactaacccattcctagacataccacatgaccctaatgccgcagtgtacaaatctggctttcttgcacggaagattcacgctgatatggatggcaagaaaaccccacgagggaaacggggttggaagactttttatgccgtcctgaaaggcacggttctctacctacagaaggatgaatataagcccgaaaaggcattgtctgaagaagacctgaagaacgcggtgagcgttcaccacgccctggcttctaaggcaacagattatgaaaaaaaaccaaacgtctttaagctcaagacagccgattggcgagttctgctcttccagactcagtcccccgaggaaatgcagggatggatcaacaaaattaattgtgttgccgcagtcttctcagctccccctttcccggcagctatcggctcgcaaaagaaattctcccggcctctgctgccagccaccacaactaaattgtcccaggaggagcaactgaagtctcatgagagcaagctgaaacagattacaactgagctggccgagcaccgttcctaccctcctgacaagaaagttaaggcaaaggatgtggacgaatacaagctgaaagatcactacctggagttcgaaaaaaccagatatgagatgtacgtcagcatcttgaaagaaggtgggaaagaactgctctcaaacgatgagagtgaggctgccggactcaagaagtcacactccagtcccagcttgaatccagatacatctcctatcaccgccaaagtgaagcgcaatgttagcgaacggaaagaccatagaccagagacaccatccattaaacagaaggttacttag

SEQ ID NO: 235140 - DNA, 3171 bp, synthetic construct
  misc_feature 1..3171: note = Description of Artificial Sequence: Synthetic coding sequence
  source 1..3171: mol_type = other DNA
atgatgggtgattaccgattgcctgaccaccctcagcccatggagattctcaatctgtaccttggcgacagtcttgagcctcatccaggggagtgcccacgggaaacatgcagtcacgaagacccccctgaaccattcgaggagcagacttgggcaactgatcctccggagcccacacggcagaacgttcctccatggggttccggggtggaactcacacatctgggatcttgggtgcatcaagatggccttgagccatgtcaagaacagacaagagctacagatccgcctgagtccaccagacaggatgcccctccctgggggtcaggtgtggagctgactcatttaggctccccttcagctcaaagggaacatcgccagaacaccgcctctcccggatcccccgtgaactcccatctgcccggttctcccaagcagaacaggagcacgtctacacaggttgtgttttgggccggaatcctgcaggctcagatgtgtgtgcttgacctggaggaagaactcgagaagaccgagggacttaaggcaggactgaagtgttgcctgcccactcctcccgtagacctacccggagataccggactccacagctcccctccagaaaacgaagacagcggcgaggactcctccgaacctgagggcgaggggcaggcttggctgagggaggggacccccgacagttcgccacagtggggggctgaagaagaaagcatgttcttctccaacccactgtttctggcatctccatgttcggagaacagtgcatctggggaatgcttctcctggggagccagtgacagccatgcaggagtgcgaaccgggcctgaatcacctgccacattggaacctcccctgccagaagacaccgtgttatgggaattagagtcagaaccagacttaggagacggggctgccattagtggacactgcaccccccctttcccggtgcccatatacaagccccacagtatctgctgggcatcagtggccgcagccgagggcgcacctgcagcccctcctggccatggggagagcgagggtgaccgattaggacccgctcctagtgctgctccctgcgtcgatgaggcgctcacttgggagtctggatgtgtcggctccgatctaggtcctgcagcccaccccgtacagccctgggcgagtctgagtcctgagggctggcaacgaggtggaccgttctggcctcaggtgactctcaattcccaagaccgggatgaacgtgaaggcggtcacccccaagagtcccttccctgtactctcgccccatgtccatggagatctcctgcttcaagtccggaaccttcgagccccgagtcagagagccggggtccgggaccgaggcctagccccgcatcttcccaggaaggtagcccccaactccaacatcacagcagcggaatactgcccaagtggacactggacgcctcccagagctccttgctggagacagacggggagcagccgagcagcttaaaaaagaaggaagccggagaagctccgaaacctggcgaggaggtgaagtcagaaggcactgcaagacctgccgagacaggggatgttcaaccagacatccatctgacaagtgccgaacatgaaaatctgcggacccctatgaacagcagctggctgccagggagtccaatgcctcaagcacagagccctgaagaaggacagaggccgccagcgggtgataagttggcaaacggagtgagaaataataaggtggcctggaacctggccagtaggctttaccggcttgaggggttcaggaaatcggaagtggcagcctaccttcagaaaaacaacgatttctctcgagccgttgcagaggagtatctgtccttttttcagtttgggggacaaagcctggatagggcgctcaggagctttctccaagccttggtgctttctggagagactcaggagagggagcggattctgtaccaatttagtaggaggttccaccactgcaacccgggtatctttcctagcgtggacagcgtacatactctcacctgcgcaatcatgctgttaaatacggacctgcatggccagaacattggtaagtcgatgtcttgccaagagtttatcaccaaccttaacggactcagggacggagggaactttcctaaggagctgctgaaagcactctattggagcatcaggtctgaaaagctagaatgggctgttgacgaagaggataccgcacgacctgagaaggctcagccatccttgcccgcaggaaaaatgagcaaaccgttccttcagctggctcaagacccaaccgtgccaacatacaagcaaggaatattagctcgtaaaatgcaccaggacgccgatggaaaaaaaacaccatgggggaagcgaggttggaagatgtttcataccctgttgcgaggaatggtcctatacttcctcaagcagggcgaagaccattgtctcgaaggagaatcactggtcggccagatggtggatgaacctgtgggcgtgcatcactccctggctactcccgctacacattatacaaagaagccacatgtatttcaactgaggactgcagattggcgtctgtatctgttccaggccccaacagcaaaggagatgtctagttggattgctcgaattaatctggctgcggcaacacactctgccccaccatttcctgcggctgtggggagccagaggagattcgtcaggcccatactacccgtgggccctgctcagagtagcctggaagaacagcatcggtcacacgaaaattgcttggacgctgccgcagacgacttattggacctccagaggaacttaccggaacgcaggggccgagggagagagttggaagaacaccgcctgcggaaggagtacttagagtacgagaaaacccgctacgagacctacgtgcagttgttggtggctcgactgcattgtccttctgacgctctagacctatgggaagaacagcttggccgagaggccggaggaactcgagaaccaaaactctcgctcaagaaaagtcacagtagtccaagtctccaccaagacgaagcccctacaactgccaaagtcaagcgtaatatctcagaacgcaggacataccggaaaatcatcccaaagagaaaccgaaaccagctgtag

SEQ ID NO: 235141 - DNA, 1152 bp, synthetic construct
  misc_feature 1..1152: note = Description of Artificial Sequence: Synthetic coding sequence
  source 1..1152: mol_type = other DNA
atgccttacgtggataggcaaaaccgcatttgtggattcctggacatcgaggaaaacgaaaatagcggcaaattcttacgaagatactttattctggacactagggaagacagctttgtgtggtacatggataatccacaaaacctgcccagcgggtcaagtcgcgtgggggctatcaagctgacatatattagtaaggtcagcgatgcgacaaagctgagaccaaaggcagaattctgttttgtcatgaatgccggaatgcggaaatacttcttgcaggcaaacgatcagcaggaccttgttgaatgggttaacgtgctgaacaaggctatcaaaattacagttcccaagcagagcgatagtcaaccaaatagcgataatctttctcggcatggcgaatgcgggaagaagcaggtcagttaccggactgacatcgtggggggtgttcctataatcactccaacgcagaaggaagaggtgaatgaatgtggggaatctattgatagaaataacttaaaacgcagccaaagtcacctcccttatttcaccccgaagcccccacaggattcggcggttatcaaagcaggatactgtgtgaagcagggggctgtgatgaagaattggaagagacgttacttccaacttgacgaaaataccattggatacttcaagagcgagctcgagaaggaacccctccgagtgatcccactgaaggaggtacataaggtccaagagtgcaagcaaagtgatattatgatgagggataatctatttgagatcgtgactacctccagaactttctacgtccaggctgactcaccagaggagatgcattcgtggattaaagccgtcagcggcgctatcgtcgcccagagagggcctggccgtagcgccagcagcatgcgtcaggcaaggcgactgagcaacccatgcatccagagaagcattccacccgttctccagaaccccaacactctgagcgtccttccaactcaaccccctcccccacacattcctcagcccctggccgctaccttgtggagccaacctcttccttggaggtcagaagacttcacgtcactgttgccacgctcttcccagggaacgtctaggtcaagactcagcctgcaggaaaatcagcttccaaaatag

SEQ ID NO: 235142 - DNA, 1152 bp, synthetic construct
  misc_feature 1..1152: note = Description of Artificial Sequence: Synthetic coding sequence
  source 1..1152: mol_type = other DNA
atgccttacgtggatcggcagaaccgaatttgtggatttctcgacatagaggagaatgaaaactcaggcaagttcttgagaagatatttcattctggatacacgggaagactccttcgtgtggtacatggacaatccccagaacctgccctcgggcagcagtcgagttggcgcaatcaaactaacatacatctccaaagtgagtgacgcaacaaaactgcggcctaaagcagaattttgcttcgtgatgaacgccggtatgaggaagtattttctgcaggcgaatgaccaacaggatctggttgaatgggtcaacgttcttaacaaggctatcaagataaccgtgccaaagcagtcagattcccagccaaattctgataacttatctcggcatggcgagtgcggaaaaaaacaggtctcttatcggactgacattgtgggtggcgttccgatcattactccaacacagaaggaggaagtcaacgagtgcggcgagtcgattgatcgcaataatctgaaacgctctcaatcccacctgccttattttaccccgaagccacctcaggactccgctgtcattaaggctggttactgcgtcaaacagggagccgtcatgaaaaattggaaaagacgttactttcagctcgatgaaaacacaattgggtatttcaagtctgaactcgagaaggaacccctgcgggtgattcctcttaaggaggtgcataaagtgcaggagtgcaagcagtcagacatcatgatgagggacaatctattcgagatcgtgaccacgtcccggacattctacgttcaggctgattctcctgaggagatgcactcttggattaaggccgtttcgggagccattgttgcccaacgaggacctgggcgtagcgcttcaagcatgcgacaggccaggcgactatctaatccctgcattcagcgctcaatcccccctgtgttgcagaatcctaacaccctctcagtgcttccaacacagccacccccacctcatatccctcagccactggccgcaaccctctggtcccagccccttccttggcgaagtgaggatttcactagcctgctgccccgaagctctcaaggaacctctcgatccagactgtctcttcaggagaatcagctcccgaagtag

SEQ ID NO: 235143 - DNA, 1215 bp, synthetic construct
  misc_feature 1..1215: note = Description of Artificial Sequence: Synthetic coding sequence
  source 1..1215: mol_type = other DNA
atgccttatgttgaccgtcagaatagaatctgcggcttcctggatatcgaggaaaacgaaaattccggtaaatttctgaggcggtacttcattttagacacgcgcgaggactcctttgtgtggtacatggacaacccacagaacttgcccagcggttcaagcagagtcggcgcaatcaagctaacctacatcagcaaagtctcagatgctacaaaactgaggcccaaagccgagttctgtttcgtaatgaatgccggaatgagaaagtactttttgcaggcgaacgatcagcaagacctggtggagtgggtcaatgtgctgaataaagctatcaaaattactgtaccgaagcagtctgattcacagcccaactccgacaatctaagtaggcacggtgaatgcggcaaaaagcaggtgtcttaccgcaccgacatcgtcgggggagttccaatcataacaccaacccaaaaggaggaggttaacgaatgcggagagagcattgaccggaacaacttaaagcgaagccaaagtcacctcccttatttcacccctaagcctccacaggacagtgccgtgattaaggctggctactgtgtcaaacagggagcagttatgaagaattggaaacggaggtactttcagttggatgagaatacaattggctatttcaagtccgaactggagaaagaaccactgagagtgatacccctcaaggaggtccacaaggtgcaggaatgtaagcaatccgatattatgatgcgcgataacctgttcgagatcgttactacatcccgtactttctacgtgcaagcagacagtccagaggagatgcattcatggatcaaggcagtgagcggcgctatagtggctcagcgcggacctggcaggagcgcatcttcggagcacccacccggtccttcagagtcaaaacacgccttcaggcccaccaatgccgctactgctacttctcactccacagcatccagatccaattccctggtaagtactttcaccatggagaaacggggattttacgagtccttggcgaaagtgaagcccggaaactttaaggtgcagaccgtttctcccagagagcctgcttccaaggttaccgaacaggccctcttgcgaccacagtctaagaacgggccacaggaaaaagactgcgaccttgtggacctggacgatgcgtccctgccagtcagcgacgtttag

SEQ ID NO: 235144 - DNA, 345 bp, synthetic construct
  misc_feature 1..345: note = Description of Artificial Sequence: Synthetic coding sequence
  source 1..345: mol_type = other DNA
atgccatatgtggaccggcaaaatagaatctgtggctttcttgacattgaggagaacgaaaactctggaaagtttttgcgacgttatttcatcctggatactcgggaggactccttcgtgtggtatatggacaatccacagaacctgcccagtggcagcagtcgggtgggcgcaatcaaactgacctacatcagtaaggtgagtgacgccaccaaactgagacccaaagccgagttctgctttgtcatgaatgctggaatgaggaaatactttctacaggcaaatgatcaacaggatttggttgaatgggtgaatgttttgaacaaggccatcaaaattacatag

SEQ ID NO: 235145 - DNA, 1215 bp, synthetic construct
  misc_feature 1..1215: note = Description of Artificial Sequence: Synthetic coding sequence
  source 1..1215: mol_type = other DNA
atgccgtacgttgacaggcagaacagaatttgtgggttcctcgacatcgaagagaatgaaaatagcgggaagttcctgcgtcgttatttcattcttgatactcgcgaggatagctttgtttggtacatggacaacccgcagaatcttccttccggaagctcaagggtgggggctataaagctgacttacatttcaaaggtgagcgatgcaaccaagcttcgtccaaaggcagaattctgcttcgtgatgaatgccggaatgcgcaagtactttttacaggctaacgatcagcaagacctggttgagtgggtgaatgtgttaaacaaagctattaagataacagttcctaaacagagcgacagccagccaaattccgacaatcttagccggcatggggagtgcggtaagaagcaggttagctaccggaccgatatagtcggcggagtgccaatcattacacctacccagaaagaggaggttaacgaatgcggggagagtatcgatcgcaacaacttgaagcggtcacagagtcacttgccgtatttcacacctaagcctcctcaggactcggcagtgatcaaggccggttactgtgtgaagcaaggcgctgttatgaagaactggaaaaggagatactttcagctggacgaaaatacaatcgggtattttaaaagtgaactggaaaaggagccattacgagttattcccctgaaagaagtacacaaagtacaggaatgcaagcagtcagacattatgatgcgcgataatctgttcgagattgttacaaccagccgaaccttctacgtgcaggctgacagcccggaggagatgcattcctggatcaaggccgtgtcaggggcaatagtggcccagagaggtcccggaaggagcgctagcagcgaacatcccccaggaccctccgagtccaagcacgccttccggccaaccaatgctgcaaccgctacctctcactccaccgccagcagatccaattccctggttagtacgttcaccatggagaaacggggattctatgaatcccttgccaaagtcaaaccagggaactttaaggtgcagacagtgagtccccgagagccagccagcaaggtgactgaacaagccctgttgaggccacagtctaaaaacggccctcaagagaaagactgcgacttggtcgatctggatgatgccagtctcccggtctcggacgtgtag

SEQ ID NO: 235146 - DNA, 1215 bp, synthetic construct
  misc_feature 1..1215: note = Description of Artificial Sequence: Synthetic coding sequence
  source 1..1215: mol_type = other DNA
atgccctatgtggaccgccaaaataggatctgcggatttcttgacattgaagagaatgagaacagtgggaaatttctccgaagatatttcattctggacacgcgcgaggactcctttgtctggtatatggacaacccccagaacctcccaagtggctcatcccgcgtgggagctattaaactaacctatatctctaaagtaagcgacgccacaaagctgcgaccaaaagccgaattttgctttgtcatgaacgccggtatgaggaagtacttcctccaggcaaacgaccagcaggatctagtcgagtgggtgaacgtactgaacaaagcaatcaagatcactgttccaaagcagagcgactctcagcctaactccgacaatctatctcgccacggtgaatgtgggaagaaacaggttagctatcggacggatatcgtcggaggagtgcctataattacacccacacagaaggaggaagtcaacgagtgcggagaatccattgatagaaacaacctgaaaaggtcccagtcccacctgccctattttactccgaagccaccgcaggactccgccgttattaaggccggatattgtgtcaaacagggcgcagtcatgaaaaactggaaaagacgttacttccaacttgatgagaataccattggctatttcaaatccgaactggagaaagaacccctccgcgtgatacccctgaaagaggtccacaaggtgcaggagtgtaagcagtctgacatcatgatgagagataatctgtttgaaatagtgaccacaagcagaaccttctacgtgcaagccgactcgcccgaagagatgcattcttggataaaggcggtgtccggagctattgtcgcccagagagggcctggtagatcagccagttctgagcaccctcccggacccagtgaatctaagcatgcatttcgacccacaaatgcagccaccgctacttcacactcaacggcatcacggagcaatagccttgtatcgacatttaccatggaaaaacgaggcttctatgagtcactcgctaaggtgaaacctggtaactttaaagtgcagaccgtgagccctagggaacctgcctcgaaagtgactgaacaggccctccttaggccgcagtccaaaaatggtccccaggagaaggattgcgatcttgtggacctcgacgatgcatctctgcctgtcagtgacgtttag

SEQ ID NO: 235147 - DNA, 1005 bp, synthetic construct
  misc_feature 1..1005: note = Description of Artificial Sequence: Synthetic coding sequence
  source 1..1005: mol_type = other DNA
atgccttacgttgatcgacagaacaggatctgtggcttcttggacatcgaggaaaatgagaatagtggcaagttcctgcggcgatactttattctagatacccgggaagattcgttcgtttggtacatggacaacccacaaaatcttccctccggttcttccagagtgggcgctattaagctgacctatatctccaaggtaagtgacgccaccaagttgaggccaaaagctgaattctgcttcgttatgaatgccggtatgcgtaagtatttcctccaggccaacgatcagcaagacctggtcgaatgggtgaatgtgctgaataaggcaatcaaaattaccgtgcctaagcaaagcgattcacagcccaacagcgacaacctctcaaggcatggggagtgcggtaagaagcaggtgtcataccggaccgacatcgtagggggtgtaccaatcattactccaactcaaaaagaggaggtaaatgagtgtggtgaaagtatcgatcggaacaacctcaagcgtagccagagtcatttgccatactttacaccaaagcccccacaagattcggccgtcatcaaggccggttactgcgtgaagcaaggggctgttatgaagaactggaaacgccgttatttccagcttgacgaaaataccattggctattttaagagcgagctcgagaaagaaccgttgcgggtgatcccgctcaaagaggtgcataaggttcaagaatgtaagcagtcagatatcatgatgcgggataatctctttgagatcgttacaacgagtcggaccttttacgtgcaggccgatagccctgaggagatgcattcatggatcaaagcagtatcaggcgcaatcgtggctcagaggggcccaggtagatccgccagctccatgaggcaggcaaggcgcctgagtaacccatgcattcagagatatacgagccgcgctggtgaatgctccacgtacgtgggatctcatgcaaacgtgccatcatag

SEQ ID NO: 235148 - DNA, 1278 bp, synthetic construct
  misc_feature 1..1278: note = Description of Artificial Sequence: Synthetic coding sequence
  source 1..1278: mol_type = other DNA
atgccttatgtggataggcagaaccgaatatgtggcttcttggacatagaggagcacgaaaattccggcaagttcttgcggcgttactttatccttgacactcaagccaactgcctgctgtggtatatggacaaccctcagaatctggcaatgggcgcaggagccgtgggtgcactgcagctcacctatatctctaaagtatctattgctacccctaagcagaagccaaaaacccccttctgtttcgtcatcaatgctctgagccagcggtattttctccaggctaatgatcaaaaggacatgaaggactgggttgaggctctcaaccaagcatcaaaaataaccgtgcctaagggaggtggcctgcccatgactacagaagttctgaagagcctcgccgcaccacccgctctggagaagaagccacaggttgcctataagactgagatcatcggtggcgttgtcgtccacacaccaatcagccagaacggcggagacgggcaagagggaagcgagcccggttctcatactatactccggaggtcccagagctacatacccacatcaggctgcagggcttccacaggccctccattaattaaatccggttactgcgtgaaacagggtaatgttcgtaaatcatggaagcgcaggttctttgctctcgatgattttacaatttgttattttaagtgcgaacaagaccgcgagcctctccgcacgatctttctgaaggacgtgctgaaaactcatgagtgccttgtaaaatcgggtgatctgttgatgagggacaatcttttcgagattatcacaagttcaagaacattctacgtgcaggcagatagtccagaggatatgcactcttggatcaaggagatcggagctgctgtgcaggccttgaagtgtcatcctagggaaacctctttcagcaggtccatcagcctgactcggccaggctccagctccctgtcctcaggcccaaattctattttatgccggggacgcccaccccttgaagaaaaaaaagccctgtgcaaggctccttcggtggcgtcttcgtggcagccctggacccccgtgcctcaggcgggtgaaaagctgctgccccctggtgacacctctgaggactccttatttacgccaaggcccggtgaagggagcgcccctggcgtgttaccttcttctaggataaggcatcggagcgagcctcagcaccccaaggagaagcctttcatgtttaatctagacgatgagaacattcggactagcgacgtgtag

SEQ ID NO: 235149 - DNA, 348 bp, synthetic construct
  misc_feature 1..348: note = Description of Artificial Sequence: Synthetic coding sequence
  source 1..348: mol_type = other DNA
atgccctacgtcgacagacagaataggatctgcgggttcctggatatcgaggagcacgagaattctggaaagttcctccggaggtatttcatattagacacacaggctaattgccttttgtggtatatggacaatccccagaatctagccatgggcgctggcgcagttggggcactgcagctgacgtacatttctaaggtttccatagccactccaaaacagaaaccaaagactcccttctgcttcgttattaacgcactgagccagcgatactttttgcaggccaatgaccaaaaagatatgaaggactgggttgaagccctgaaccaggccagcaagataacctag

SEQ ID NO: 235150 - DNA, 1128 bp, synthetic construct
  misc_feature 1..1128: note = Description of Artificial Sequence: Synthetic coding sequence
  source 1..1128: mol_type = other DNA
atgggagccggagccgtgggagccctccagttgacgtacataagcaaggtctctatagctacgcctaagcagaaacctaaaacacctttctgctttgtcattaacgctctgtctcaacggtattttctacaggctaacgaccagaaggacatgaaagactgggtcgaagctctcaatcaggccagcaaaattactgtccctaaaggtggaggtctgccaatgacgacagaggtcctaaagtcccttgctgctccgccagctctggaaaagaagccacaggtggcctataagaccgagataattggaggcgtggtggtgcatactcccatttcccaaaacgggggtgatggccaggaaggctcagagccagggagccacactattctgcgtagatcgcagtcctacattcccacttcgggatgccgcgcttcaacaggtccccctctgataaagtctggatactgcgtcaagcaggggaacgtccggaagtcatggaagcggaggttctttgccctggacgattttacaatctgctacttcaagtgtgagcaggatcgggagccactgcggacgatcttcctgaaagatgtcctgaagactcatgagtgtttagtgaagtcgggcgacctactgatgagggataatctgtttgaaataataacgtcatcgcgcaccttttatgtccaggctgactcgcctgaagatatgcattcctggatcaaggaaatcggcgctgcagtccaggccctgaagtgtcacccccgtgagacaagtttctccaggtcaatctccctgacaaggccaggctcttctagcctgtcatcggggcctaactcaattctgtgtcgcggtcggccacccctcgaagaaaagaaggcattgtgcaaagcccctagcgtggccagctcatggcaaccctggactcccgtgccccaggccggtgaaaaattactcccaccaggcgatacctccgaagattctctgttcactcccagaccaggcgaaggtagcgcacctggcgtcctgccatcctctagaatccgtcaccgcagcgagccacaacatccgaaagagaaacccttcatgttcaatctggatgacgaaaatatcagaacctccgacgtgtag

SEQ ID NO: 235151 - DNA, 4083 bp, synthetic construct
  misc_feature 1..4083: note = Description of Artificial Sequence: Synthetic coding sequence
  source 1..4083: mol_type = other DNA
atgagtcgacaatccactctgtattctttcttccccaagtcacccgctctaagcgatgccaataaggccagtgccagagcttcccgggagggcggacgggctgccgctgcccctggagcctcaccctcacctgggggtgatgcggcatggtccgaagctggtcccggtcccaggccgttggcaaggtccgcttctccgccaaaggccaagaacctcaatggaggcctgcggaggagcgttgcccctgcagcacccaccagctgcgatttttcccctggagatctggtgtgggctaagatggagggatacccatggtggccttgcttagtctataatcaccctttcgacgggaccttcatccgggagaagggcaaaagcgttagggtgcacgtgcaatttttcgatgattcccctacaaggggatgggtgagcaagagactgctgaaaccctacactggatctaaaagcaaagaagctcagaaaggcggtcacttttacagcgctaaaccagaaatcttaagggctatgcagcgagccgacgaagctttgaacaaagacaaaattaagcgactggaacttgctgtttgcgacgagccaagcgaacccgaggaagaagaggagatggaggtcggcaccacctacgtcactgataagtctgaagaagacaacgaaatcgaaagtgaggaagaggtgcagccgaaaactcaggggtccagaaggagctcaaggcagatcaaaaagcgccgagtcatctctgatagtgaatccgacataggcggttccgatgtcgaatttaaacccgacactaaggaagagggcagctcagacgagatttcaagcggagtaggagactccgaatccgaaggcctaaatagcccagtaaaggtggcacgcaaaaggaagaggatggtcacaggcaacgggtccctcaagcgaaagtctagcagaaaagaaactcccagtgcaacaaagcaggccacatctatcagctctgagaccaagaacacgctgcgcgcatttagtgcaccgcaaaacagcgagtcacaggcccacgtcagcgggggaggagacgactcaagccgccctaccgtgtggtatcacgagaccctggagtggctgaaagaggagaaaaggcgggacgaacaccgaagacggcctgaccacccagactttgacgccagtacactgtacgtccccgaagacttcttaaactcatgcaccccaggcatgcgcaagtggtggcaaataaaaagtcagaacttcgacctcgtgatctgctataaggtcgggaaattttacgagctgtaccacatggacgccctcataggagtgtctgagcttgggctggtttttatgaaggggaactgggcccatagcggatttccagagatcgcttttggcaggtactccgactccctggtccaaaaaggctataaggtggcgagggtagaacagacagaaacaccagagatgatggaggccagatgtagaaagatggcgcatattagcaagtacgatcgggtcgtacggagggaaatttgcaggatcattacaaaggggactcagacgtattctgtactggagggggatccctccgaaaactattcaaagtacctgctatctctcaaagagaaagaggaggacagttctggacatacaagagcgtacggagtgtgtttcgtcgacacctctctcgggaaatttttcattggacagttttctgacgaccggcactgtagccggtttcggacgctggtggctcattatcctcctgtgcaggtgctctttgaaaaagggaatctttcaaaggagacgaaaaccatcctgaaaagttccctcagttgctccctgcaggaggggcttatccccggatcacaattctgggatgctagcaagactttgcggactctgctggaggaggaatattttcgggagaagctgtcagacggcatcggcgtgatgctgcctcaagtacttaaagggatgacgagtgagagcgattccataggtctcaccccaggggagaagtccgaactggcgctcagtgcacttggagggtgtgtgttttacctcaaaaaatgcctaatcgatcaggaacttctgtctatggcaaattttgaagaatatattccacttgatagtgacacggtttcaacgactcgtagcggcgcaatctttaccaaagcttatcagcgtatggtcctcgatgccgtaacacttaacaatctagaaattttcctgaacggaaccaacggtagcaccgagggaaccctcctggaaagagtggacacatgccatacaccttttggaaaacgccttttgaagcaatggctgtgtgccccattgtgtaatcactacgctattaacgataggctggatgcaatagaagacttgatggtcgtcccagacaagatctcagaggtggtggagcttctcaagaagctgcccgacctggagcggctccttagtaaaattcacaacgtaggctcccctcttaagtcccagaaccatcctgactcaagggctatcatgtacgaagaaacaacgtacagcaaaaagaagataattgactttcttagtgctcttgagggattcaaagtaatgtgtaaaattatcggcatcatggaggaggttgcagacggatttaagtctaagattctgaagcaggtcatttcactccagactaagaaccccgaaggcagattccctgatctaacagtggaactcaaccgctgggatacggcttttgaccatgagaaagccagaaagaccggcttgattactcctaaggcagggttcgacagcgattatgaccaggccctcgccgatatcagagagaacgaacaatcactgttagaatacctggagaaacagagaaaccggattgggtgcagaactattgtctattggggcattggcagaaaccggtaccagctggaaatacctgaaaatttcacaacccggaacctacccgaagagtatgagctcaaatcaactaagaagggatgcaaacgctactggaccaagactatcgagaaaaagctagcaaacctcattaacgcagaagaacggcgagacgtgtctctcaaagactgcatgcgccgtctgttctacaacttcgacaagaactacaaggactggcagtctgccgtggaatgcatagccgtgttggatgtattactgtgtttagcaaactatagccgaggcggtgatggaccgatgtgtcgacctgtcattttgctgcccgaggatactcccccatttctggagctgaaggggtcccgccatccctgtattacaaaaacattctttggtgatgactttatcccgaatgacatcttgatcggttgtgaggaagaagagcaggagaatggaaaagcatactgcgtcttagtcacaggccctaatatgggcggtaaatctacactgatgaggcaggccggattactggcggttatggctcaaatggggtgttacgtgccagccgaggtgtgtcggttgacacccatcgatagagtgtttaccaggttgggtgcctcagatagaattatgtctggcgagtccaccttttttgtggagctcagtgaaaccgcttctatcctgatgcacgccactgctcacagccttgtccttgtggatgagctggggcgtggaaccgctacctttgatgggacagccatcgctaacgcggtggtgaaagagttggccgaaaccataaagtgtcggacactcttttccactcactatcacagcctagttgaagattacagccagaacgtggctgtccgcttgggacatatggcctgtatggttgagaacgagtgcgaggatccttcacaggaaactatcaccttcctttataagttcatcaaaggcgcttgtccaaagtcgtatgggtttaacgcagccagattggctaacctgcctgaagaggtgatccaaaaagggcaccggaaggcacgcgagtttgagaaaatgaatcaatccctgagactttttcgagaggtctgtttagcctctgaacgatctaccgtagatgcagaggcagtccataaactgctaaccctgatcaaagagctatag

SEQ ID NO: 235152 - DNA, 2340 bp, synthetic construct
  misc_feature 1..2340: note = Description of Artificial Sequence: Synthetic coding sequence
  source 1..2340: mol_type = other DNA
atggagggttcccgacctcgttccagcctttccctggcgagctctgccagcaccatttcatccctcagctccctgtcaccaaaaaagcccacacgagcagtaaataagattcatgcattcggaaagaggggcaacgccctgagacgtgacccgaacctgcccgttcatatccgcggatggctgcataagcaggactcctcgggcctccgcctttggaaaaggaggtggttcgtgctgagtggtcattgcttgttttattataaggactcccgggaggagtctgttttggggtcagttctgctgccgtcctacaacatcaggccggacggacccggagcaccccgtggaaggcggttcacgtttacagcagagcatccaggaatgaggacatatgttcttgctgctgatacactggaggacttgcgaggttggctgagggcgctgggacgcgcaagtcgggctgaaggagatgattacggtcaacccaggtcacccgcacgccctcaacccggagaggggccaggtggccctggcggacctccagaagtctcacgaggagaggaggggagaataagtgaatctccagaagtcacgcgcttgtcccgtggcagaggccgacccagactactaacaccatcccctactaccgatttgcattccggtctgcagatgagacgggctaggtccccggatctgtttaccccactgtctcgcccaccctcccccctgagcctgcccagacctcgaagcgccccagcacgacgccctccggctcctagcggggatacagcacccccagccagaccccatacacctttgagtaggattgacgtgaggcccccactcgactggggaccccagcgccagaccctctctcggcctcccacacctagaaggggacctcccagcgaggcaggcggagggaagcctcctagatctccgcagcactggagccaggagccccgtacccaagctcatagcggatcccccacctacctgcaactacccccaagacctccaggtacaagagcctctatggttctgttgcccggaccacctctcgagtcgacatttcaccagtcgctggagacagatacgctgcttaccaaactctgtggtcaggatcggttactgcgaagattgcaggaagagatagaccagaaacaagaagagaaggagcaactggaggctgctttagaacttactcggcagcagctgggccaagccactcgtgaggccggagctcctggaagggcctggggtcggcagcggctgttgcaagatcgactcgtctccgtgagggctaccctttgccacctcacccaagagagagagagggtttgggatacatactccggccttgagcaagaactcgggacgttgagggagactttggagtatctgctgcacctgggaagtcctcaggaccgggttagtgctcaacaacagctgtggatggttgaagacacccttgctggtctgggcggaccgcagaaaccccctccacataccgagccggactcaccttcccccgtcctccagggcgaagaatcttcagaacgggaaagcctgccagagtctctggagctgagctccccccgaagcccagagaccgactgggggaggccacctgggggagacaaggacctcgcttcaccacacctcggtttgggcagcccgagggtatctcgggcatcatctcccgaggggagacacctgccgagtcctcagttaggcacgaaagcacctgtggctcgtcctcgaatgagtgcacaggagcaactagaaagaatgcgtagaaaccaggagtgcggtcgccctttcccaaggcctacttctccgcgtttgctaaccctcggtcgcaccctttcccccgctcgcagacagccggacgtggaacagcggccagtcgtcggccacagcggtgcccagaaatggctgcgcagtagcggctcatggagcagtcccaggaacaccacaccttacctccccacctctgaggggcacagagagcgggtgctgtcactttcgcaagcactggctacggaggcatcacagtggcacaggatgatgactgggggtaacctggactcccagggggatcccctgcccggtgttccattacccccaagcgatcctactcggcaagagacgccccctccaaggagtccacctgttgccaattctgggagcaccggcttctcacggcgagggagtggccgaggtgggggacccacaccctgggggccagcatgggatgctggaatagcccctccagtgctccctcaggatgagggagcctggcccttaagagtcactctcttacaatctagcttctag

SEQ ID NO: 235153 - DNA, 1752 bp, synthetic construct
  misc_feature 1..1752: note = Description of Artificial Sequence: Synthetic coding sequence
  source 1..1752: mol_type = other DNA
atggagggttctcgcccacggtctagcctgtctttggcctcaagcgcctccacaatttcctctttatccagcctctctcctaaaaagccaactcgtgctgtgaacaaaattcacgcctttgggaaacgcggaaatgcactcagacgagatcccaatctgccggtgcatatcaggggttggcttcataagcaagactccagtgggctgcggctgtggaagcggaggtggttcgttctatcaggacattgccttttttactacaaagatagcagggaggaaagcgtactcggcagcgtgcttctgcccagctataatatccggcctgatggtccgggagcaccacgaggcagacgattcacttttacagcagagcatcccggaatgcgaacgtacgttctggccgctgacactctggaagatttgagagggtggcttagggccttaggacgcgcttcacgtgctgaaggggacgactatggccagcctcgcagcccagctcgccctcagcccggagagggacccggtgggccaggcggtccacctgaggttagcagaggggaggaagggaggatttctgagtccccagaagtaaccaggctgtccaggggccgaggcagaccacggttgttgaccccatcaccaactacggatctgcattccggcctgcagatgcgaagagcacgctcacccgacttattcacaccgctgagtcgtcccccttctcccctcagtctgccccgtccacgcagcgcccctgcaaggcggccacctgctccctctggagacactgcccctccagctaggccacacacacctctgagtagaatagatgtacggccaccactggactggggaccccagagacagacactgagtcgaccgccaacacctcgtcgcggtcctccatctgaggctggcggaggcaagccacctcgctctcctcagcactggagccaggaacctagaacacagccaggcccacctttggaatctaccttccaccagtccctggagactgacactttgcttacgaaactgtgtggacaggacaggttgctgcggagattacaagaggaaattgatcagaagcaggaagagaaggagcagctcgaagctgccctggagcttacccgtcaacagctcgggcaggccaccagagaagccggagcgcctgggagagcgtgggggagacagagattgcttcaggatagactggtgtctgtgagagcaacactttgccacctcacccaggagcgtgaaagggtctgggacacttatagcggattggagcaggagcttggtaccttgagagaaacactggagtacctcttgcatctgggaagcccacaagacagggttagcgctcagcagcagctgtggatggtcgaggacaccctggctggcctgggcggtcctcagaagcccccaccccatactgagccagatagccccagtcctgtgctccagggcgaagagagcagtgagcgagaatcgttgccggagagccttgaactgtcatctcctcgtagccctgagacggactggggtcgaccaccgggtggcgataaagacctcgccagtcctcacctgggccttggatctccacgggtgtccagagctagtagtcctgagggacgtcacctgccttcccctcagttggggacaaaaagtaaagagcatcatccgctgcttgcggacttccgcaggtccccgggagcgggttctcagccattgccgtctcccggatactag

SEQ ID NO: 235154 - DNA, 3366 bp, synthetic construct
  misc_feature 1..3366: note = Description of Artificial Sequence: Synthetic coding sequence
  source 1..3366: mol_type = other DNA
atggcggcagccacagtggggcgtgacactttgcctgagcattggagctacggcgtctgccgagacggcagagtcttttttatcaatgatcagctgagatgtaccacctggctccacccaagaacaggggaacctgtgaattctggacatatgattcgctcagacctccctcggggttgggaggagggtttcacggaagagggggcatcctacttcattgatcataatcagcagactaccgcatttagacaccctgtgaccggacagtttagtcccgagaacagtgagttcatcttacaggaggaacctaacccacacatgagtaagcaggataggaaccagcgaccgtccagcatggtctcagaaaccagcactgctggcacggcaagtaccctggaggcaaagccgggacccaagatcattaagtcttccagcaaagtccacagtttcggcaagagagaccaggccatcagaaggaaccccaacgtgcccgtggtggttcgcggttggctccataagcaagactcaagcggaatgcgactgtggaaacgcagatggttcgtgttagccgattattgtctgttttattacaaggattctagagaggaggcagtgctggggagtatacctctccctagttacgtcatctccccagtggcccctgaagatcggattagtcggaagtattcttttaaagccgtgcacaccgggatgcgggctctgatttacaactccagtacggccggaagccaagcagaacagtccggtatgaggacttactatttctctgcagatacccaggaggacatgaatgcttgggtccgggcaatgaatcaagctgcccaggtattatcccgtagctctctgaagagagacatggaaaaagtggagaggcaggccgtgccacaggctaatcatactgaaagttgccacgaatgcggccgtgttggccctgggcatactagggattgtccacacagggggcatgacgatatcgtgaatttcgagcggcaagaacaggagggtgagcagtacagatcccaaagggatcccctcgaagggaaaagagatcgttcaaaagcaagatctccatactcccctgcggaggaggatgcactgttcatggatctccccaccgggccaagaggccagcaagcccagccacaacgagctgaaaaaaatgggatgcttcctgcatcttacggtccaggagagcaaaatggtaccggaggctatcagagagcattcccgcctcgcacaaatcccgagaagcactcacagcgaaagtctaacctggctcaggtggagcattgggcgagggctcaaaagggcgattcaagaagtttgccactggatcagacgctcccaagacaaggccctgggcagtctctctcatttcctgagaactaccaaactttgcctaaatctacacgccacccttctggtgggagctcccctccccctcgaaatttaccatctgattacaaatacgcccaggaccgggcttcccacttgaagatgtctagcgaggagcggagggctcaccgggacggaacagtttggcagttgtacgagtggcagcagcgacagcaattcaggcacggcagcccaaccgcccctatctgcctaggatctccagaatttacagatcagggtcgaagccgctccatgctggaggtgcctaggagcatctcagttcctccatcacctagcgacatcccgcctcccggaccaccacgtgttttcccccctcgcagaccacatacacccgctgaaagggtgaccgttaaaccaccggaccagcgcaggagcgttgatatttcacttggtgattctccgaggagggcaagggggcacgccgtgaagaatagtagccacgtggatagacggagcatgcccagtatgggctacatgacacacaccgtctctgcgcctagccttcatggcaaatctgctgacgatacgtatctacaactgaaaaaagatttggagtatctggatcttaagatgactggcagggatctcttaaaagaccgttctttaaagccagtgaaaatcgccgaaagtgacactgacgtgaagctatccattttctgcgaacaggatagagtactccaggatttggaagacaagatccgcgctctgaaggagaacaaggatcagttggagtccgtactcgaggtgttacataggcaaatggagcagtaccgagatcagccacagcatttggaaaagatcgcgtatcagcagaagctgctccaggaggacttggtgcacattcgagcggaactcagccgggagtccactgaaatggaaaacgcttggaatgagtaccttaagctggagaatgatgtcgaacagctcaagcagacactccaggaacagcaccggcgagctttcttttttcaggaaaaaagtcagattcagaaagatctttggagaatagaggacgtcacagcagggttgagcgctaacaaggagaatttcaggatccttgtcgaatctgtaaaaaatcctgagcgaaaaacagtgccgctgttcccccaccctcctgtcccgagcctgtcaacttccgagagtaagccccctccgcagccctctcctccaacttcacccgtcagaactcccctagaagtcaggcttttccctcaactgcaaacatatgtcccctacaggcctcacccaccccagctaaggaaagtgaccagccccctccagtctcccacaaaggcgaagcctaaggtggaagacgaggccccaccccgacctccactgcctgagttgtattctcccgaagatcagcctccggcagtccccccactgccaagagaggctaccataattcgacacaccagtgtgagaggacttaagcggcagtccgacgaaagaaagcgggatcgggaacttggccagtgtgtgaatggggatagtcgggtagagttacgaagttacgtgagtgaacctgaacttgcaacattgtcaggagacatggctcagccctctctggggctcgtgggtcccgagagcaggtatcagactctccccggaaggggcctgagtggttccacttcccgtctgcaacagtcctcaaccatcgcgccttatgtcaccctcagaagaggtctgaacgctgagtcaagcaaagctactttcccacgtccaaagagtgccctggagaggctgtatagcggcgatcaccagcgagggaagatgtctgcagaggagcaattagaaagaatgaagagacaccagaaggccctcgtccgagagcgaaagcgtacattaggccaaggagagcgcacaggcctgccttcctcccgctacctgagtagacctctgccaggcgacttaggtagcgtatgctag

SEQ ID NO: 235155 - DNA, 3369 bp, synthetic construct
  misc_feature 1..3369: note = Description of Artificial Sequence: Synthetic coding sequence
  source 1..3369: mol_type = other DNA
atggctgccgcaaccgtgggcagggataccctccctgagcactggtcttatggtgtctgcagagacggacgtgttttcttcattaatgatcaacttagatgcacgacctggttacaccctcgaaccggtgaaccggtgaactccggacacatgatcagatctgacctacccaggggttgggaggagggatttaccgaggagggggctagttactttatagaccacaaccaacagaccacggcattccgccaccccgtgaccggacagttttctccggaaaatagcgagtttatccttcaggaagaaccaaatccacatatgtccaagcaggatcgtaaccagagacccagtagtatggtatctgagacgtcgaccgctgggactgcaagcaccctggaggccaagccagggccaaagataatcaagagttcttccaaagtccactctttcgggaagcgagaccaggcaatacgcaggaatcctaacgtccccgtcgtcgttagggggtggcttcataagcaggactcttcaggtatgagactgtggaagcgcagatggtttgtgctggcagactactgtctattctactataaggactcacgtgaggaagcagtactggggtcaatacctcttccgtcctatgtgatctctcctgtggctcccgaggacaggatatctagaaagtacagcttcaaggccgttcatactgggatgcgtgccctcatctacaattcaagtaccgccggttcacaagccgagcaatctgggatgcgcacctactatttttcagccgacacgcaggaagatatgaacgcctgggtgcgggcaatgaaccaggctgcccaagtactgtccaggtcttctctgaagcgcgacatggagaaagtggagcgccaggcagttccccaggccaatcacaccgagtcctgtcacgagtgcggtcgggttggaccagggcacacacgcgactgcccacataggggccatgacgacattgtcaattttgaacgccaggagcaagagggcgagcagtaccgcagccagagagatcctctggaggggaagcgcgatcggagcaaggccaggtccccatatagtcccgcagaggaggatgcactgtttatggacctccccaccggcccacggggacaacaagctcagcctcagcgggcagaaaagaatggcatgttacctgcttcctatgggcctggcgagcagaacggcacaggtggctatcagcgggcatttcccccaaggaccaaccccgagaagcacagccagcgcaagtcaaatctcgcgcaggtcgagcactgggctcgggcacaaaagggagatagtcgctcactcccgctcgaccagactttgcctcggcagggcccaggccaatctctatcttttccggaaaactatcaaaccctccctaaaagcactcggcacccctccggcggttctagcccccctcccaggaacttgcccagcgactataaatacgcgcaggaccgggcaagtcacctcaaaatgtcctccgaggagaggcgtgctcatagggacggcactgtttggcagctgtacgaatggcagcagcggcagcagttcagacatggatctcccacagcccctatttgcctcggtagtcctgagtttacagaccagggtagaagtcgctccatgctggaggtgcctcggtccatctctgtgcctcccagcccttctgatatcccaccgccaggaccaccccgagtcttcccgcctagaaggccacatacccctgccgaaagagtgactgttaagcccccagaccagaggaggtcagtagacatttcgctcggcgatagtccacgacgtgccagaggccatgctgttaagaacagctcccacgttgaccggagatcaatgccttctatgggatacatgacgcataccgtcagcgccccttctctgcatggcaagtccgctgacgacacatatctgcaactgaagaaggatctggagtatctggacttgaagatgacggggagggacctgcttaaagataggagtctgaagcccgttaaaatcgcggagtctgacacagacgtcaagctgagtattttctgcgaacaggaccgggtactgcaggacctcgaggacaaaattcgggctcttaaggagaacaaagaccagctggagtctgttctggaagtcttacaccggcagatggagcagtatagggatcagccgcagcacttggagaaaatcgcataccagcaaaaactcttgcaagaggatctcgtgcatattagagccgaattgagtagagaaagcactgagatggagaacgcctggaatgagtatctaaagttagaaaatgatgttgagcaactcaagcagactctccaggagcagcaccggcgagcgtttttcttccaggagaagagtcagatccagaaagacctctggaggattgaagacgtgacagctggcctgagcgccaataaggaaaattttcggatcctggtggagagcgtcaagaacccggaacgtaaaactgtgccactgttcccgcacccgccagtgcctagcctgtctacaagcgaatccaaacctcctccacagcctagccccccaacttctccggtgcgaacacccctggaggtacggttgttccctcagcttcagacctatgtgccttacaggccgcatccccctcaactgcgaaaagttacatccccactccaatcccctactaaggctaaacccaaagtgcaggaggacgaagctccccctagaccacctttacctgagctgtactcacctgaagatcagccacccgcagtcccaccactgccccgagaggccacaattatacggcataccagcgtaaggggcctgaagaggcagtcagacgagagaaagcgtgatagggaactcggtcagtgcgtcaacggagactcccgcgtcgaactcagatcctacgtgtctgagccagaactcgctacgttatccggggatatggcgcaacccagcctgggcctggtaggcccagagtctcggtaccagacccttccgggaaggggcctgtccggaagcacttcgaggttgcaacaatccagtactatcgccccatatgtcacgttgcgccgaggtctgaatgcagagtcctccaaagctacatttcctcgacccaagtccgcactggaacgtttgtatagcggcgaccatcaacggggtaaaatgtctgctgaggagcagctcgagaggatgaaacgccatcaaaaggccctggttcgggaaagaaagaggacactggggcagggggagagaacggggttgccatccagccgatatctcagtcggcctctgcccggtgacctcggcagcgtgtgctag

SEQ ID NO: 235156 - DNA, 2262 bp, synthetic construct
  misc_feature 1..2262: note = Description of Artificial Sequence: Synthetic coding sequence
  source 1..2262: mol_type = other DNA
tgagatgccttgttcatggaccttcctaccggacctcgcggacagcaggcccagccccagagggcggagaagaatgggatgttgcctgctagctatggaccgggtgagcaaaacggcaccgggggataccaaagagccttcccgccacggaccaatcctgaaaaacacagtcagaggaaaagtaaccttgcgcaagtggagcactgggcgagggcccagaagggggactcaagatctctcccgctagatcagaccctcccacggcaggggccaggccaatctctatctttcccagagaattaccagactttacctaaaagcacaagacatccttccggaggcagcagccctccacctcggaatttaccttcagactacaagtatgcacaggatcgcgcttctcacctcaaaatgtcctcggaggagcgaagggctcaccgcgacggcacagtttggcagctatatgaatggcagcagcggcaacagtttaggcatgggagtccgactgcccctatttgcctgggcagtccagagttcactgatcaggggaggtcaaggagcatgttggaagtgccaaggtccatttccgttccccctagtccttcagatatccccccacccggaccccctagagtgtttcctcccaggcggccacataccccggcagaaagggtcacagtgaagccgcctgaccagcggaggtccgtggacatttctctgggggacagcccaagacgcgctaggggacatgcagtcaaaaactcctcccacgtcgaccgaagaagcatgccatctatgggatatatgacccacaccgtttcagctccttcattacacggcaagtctgcggacgatacatatctacagctcaagaaagacctagagtacttggatctgaagatgactggacgagacctactgaaggatcgcagcctgaaacccgtcaagatagctgagtccgacacagacgtgaagctatcgatcttctgtgaacaggaccgagtcctacaggatctggaggacaaaattcgggctctgaaagaaaataaagaccagcttgaaagcgtgcttgaagtcctacatagacagatggagcaatatagagaccagcctcagcacctggaaaagatcgcttatcagcagaagctgctccaagaagacttagtccacattagagcagaattgagtagggagtcaacggagatggagaatgcctggaatgagtacttaaagctcgagaatgatgttgaacagttaaagcagactctccaggaacagcaccgtagggccttttttttccaggagaagagccagatccagaaggatttgtggcgcatcgaagatgtgactgctgggctcagtgccaataaggaaaacttccgcatactggtggagtcagtgaagaacccagagcgaaagaccgtccccctctttcctcatccacctgttccctcactgagcacctcagaatcaaagccccctccccagcctagcccacccaccagccccgtaagaactccactggaggttagactgttcccacagctgcagacctatgtgccctataggccgcaccctccacagctgaggaaggtgactagtccgctgcaaagtcccaccaaagccaaaccaaaagtacaagaggacgaagcaccacccagaccgccactcccagaactgtacagtcctgaagatcaaccacccgcagttcctcccctaccgcgagaagccacaattatccgccacacatcggtacggggtctcaagcggcagtcggatgagcggaagagagatcgagaactgggccagtgcgtgaacggcgacagccgggtagagctgaggagctacgtttcagagccagaactggctaccttgagcggagacatggctcagccaagtttaggacttgtgggtcctgaatctcggtaccagacacttccagggaggggcttgtccggttcgacctctagactgcagcaaagtagcaccattgccccatacgtaactctgaggcggggactgaatgccgagtcaagcaaagccacgtttcccagaccgaagagcgccctggagagactgtactccggagaccatcagcgaggaaagatgtctgccgaagaacaactggagcgcatgaaacggcatcagaaagcccttgtccgtgagaggaaacgcacacttggtcagggcgaacgcactgggttacccagcagtaggtatctgtcccggccactgccaggagatctcggaagcgtgtgctag

SEQ ID NO: 235157 - DNA, 816 bp, synthetic construct
  misc_feature 1..816: note = Description of Artificial Sequence: Synthetic coding sequence
  source 1..816: mol_type = other DNA
atgcttcaggcgtgtaaaatggagggattcccgctcgtgcccccacagcctagcgaggatttagtcccctacgatacagatctataccagagacagacacatgagtactatccttacctttcgtctgatggcgaaagccatagcgaccattactgggacttccatccacatcacgttcactcggagtttgaatcatttgctgagaataacttcacagagcttcaaagcgttcagccaccacagctgcagcagctttataggcatatggagttagaacagatgcacgtgctggacacgcctatggtgcccccacacccctcactcggtcatcaggtctcatatttgccacggatgtgtctgcagtatcctagcctgagccctgcgcagccgtcatctgatgaagaggaaggtgagcgtcagagcccaccactggaagtgtccgacggggaagctgatgggctggagcccggtcctggcctgctgcctggtgaaaccggttctaagaagaagatccggctgtatcaatttctcttggacctgctacgaagtggcgacatgaaggactccatctggtgggtagataaggacaagggtacattccagttctcatcaaaacacaaggaggcattggctcatcggtggggaatccagaaaggaaacaggaagaaaatgacataccagaagatggctagggccctgagaaattatgggaaaacaggggaagtgaaaaaagtgaaaaaaaagctgacctaccagttcagcggggaggtgctcgggaggggcggactggcagagaggagacatccaccacattag

SEQ ID NO: 235158 - DNA, 732 bp, synthetic construct
  misc_feature 1..732: note = Description of Artificial Sequence: Synthetic coding sequence
  source 1..732: mol_type = other DNA
atgagccctgccgctcccgtgcctcctgactctgccctggagagcccctttgaggagatggccctggttagggggggttggctctggaggcagtcttctattctccgcaggtggaagcgtaattggtttgcactgtggcttgacggcacactggggtattaccatgatgagactgcccaagatgaggaagaccgggtccttatccattttaatgtacgcgacataaaaattggaccagagtgccacgatgtgcagccccctgaggggagaagccgggatggtctgctaactgtgaatcttcgggaaggagggcgtctgcatctctgtgctgagacaaaggatgacgcactggcctggaagaccgccctgctggaggctaacagtacacctgcacccgctggcgctaccgtacctccaagatcgcgccgtgtctgttccaaagtccgctgcgtgaccaggtcatggtccccatgtaaggttgagcgcagaatttgggtccgtgtttattctccctatcaggattactacgaagttgttcctccgaacgctcacgaagcgacctatgtaagatcctactatggccctccatacgctggtcctggggtgactcacgtgatcgttagggaagatccttgctacagcgccggagctcctctcgccatggggatgctggccggagctgccacgggcgctgctctgggatctcttatgtggtccccttgctggttctag

SEQ ID NO: 235159 - DNA, 627 bp, synthetic construct
  misc_feature 1..627: note = Description of Artificial Sequence: Synthetic coding sequence
  source 1..627: mol_type = other DNA
atgtcaccagctgcgccagtccctccggactctgcgctggaatcgcccttcgaagaaatggcgcttgtgagaggaggctggttgtggagacaaagctcaattctaaggcgttggaagcggaactggtttgctttgtggctcgacggtaccctcggctattatcacgacgagactgcccaggatgaggaagatagagttctgattcattttaacgtcagggatatcaaaattgggccagaatgccatgacgttcaacctcctgaaggcagatcgagagacggtctgctcacagttaatttaagagagggcggaagactacacttatgtgcagagaccaaggacgatgccctcgcctggaagactgcactgctggaggcaaactctaccccagtgcgagtttacagcccttatcaggattactacgaagtagtgccaccgaatgcccacgaagcaacctacgtgagaagctactatggacccccttatgcaggcccaggcgtaactcatgttatcgtccgcgaggatccctgctactctgccggagcgcctctggcgatggggatgttagccggtgcagctacaggcgctgcgttggggtctctgatgtggtcaccgtgctggttttag

SEQ ID NO: 235160 - DNA, 675 bp, synthetic construct
  misc_feature 1..675: note = Description of Artificial Sequence: Synthetic coding sequence
  source 1..675: mol_type = other DNA
atggcgctggttcgaggtggctggctgtggagacaatccagcatcctgcgcaggtggaagcggaattggtttgctctctggctcgatggcaccctgggctactatcatgatgaaactgcacaggatgaggaggatcgggtcctgatccacttcaatgtgagggacattaagattggtccagaatgccatgacgtccaaccaccagaaggcaggtcacgtgacggccttcttaccgttaatctgcgcgaaggaggcagacttcacctttgtgccgaaaccaaagacgacgctcttgcgtggaagaccgctctgctagaggcaaattctactcccgctcccgcaggagcgaccgtgccaccacggagtcgtagagtatgctcgaaagtccggtgtgtgaccagatcctggtcaccctgcaaggtcgaaagaagaatatgggtacgggtttacagtccttatcaggattactacgaagtggtgccacccaacgcccatgaggcaacgtacgttaggagctattacggcccaccgtacgctggcccaggagtgactcacgttatcgtacgcgaagacccctgctactctgctggcgcaccgctggctatgggcatgttagcaggtgccgctacgggtgctgcgctcggaagcctcatgtggtccccgtgctggttttag

SEQ ID NO: 235161 - DNA, 570 bp, synthetic construct
  misc_feature 1..570: note = Description of Artificial Sequence: Synthetic coding sequence
  source 1..570: mol_type = other DNA
atggctctggtccggggagggtggctctggcggcagtctagtatccttcgcaggtggaagcgcaattggtttgctctctggcttgatggcactttaggctactaccacgacgaaacggcccaggacgaggaagatcgggtcctgattcactttaacgtacgtgatattaagattgggccagaatgtcatgacgtacagcctcctgagggcaggagcagggacggtttactcaccgtaaaccttcgcgagggcggtaggctacacctctgtgcagagaccaaagatgacgcactggcatggaagacagccttgctcgaagctaattcaaccccagtcagggtgtactccccataccaggattactatgaggtggttcctcccaacgctcacgaagcgacctacgtacgttcttattacggccctccatatgctggccctggcgtgacacacgttattgtcagggaggacccctgctacagcgcaggagcccctctggctatgggcatgctggcgggagcagcgacaggcgctgccctgggcagcctgatgtggtccccttgctggttttag

SEQ ID NO: 235162 - DNA, 354 bp, synthetic construct
  misc_feature 1..354: note = Description of Artificial Sequence: Synthetic coding sequence
  source 1..354: mol_type = other DNA
atggctctggtgcgtggcggttggctctggcggcagtcttcgatactacggcgatggaaacggaactggttcgcactctggttagatggtaccctcggttattaccatgacgagactgcccaggatgaggaggatagggtcctcatccactttaacgtgcgggacatcaaaattgggcctgaatgccatgacgtccagccccctgagggcagatcccgggacgggctcttaaccgttaacctgcgggagggcggacgccttcacctgtgtgctgaaaccaaagatgacgcactggcatggaagactgcactcctcgaggcaaacagcaccccggtgcgggtctactcgccctag

SEQ ID NO: 235163 - DNA, 492 bp, synthetic construct
  misc_feature 1..492: note = Description of Artificial Sequence: Synthetic coding sequence
  source 1..492: mol_type = other DNA
atggctctcgtaagaggcggatggttgtggaggcagtcaagcatcctacggaggtggaaacgcaactggttcgccctgtggctggatggaacattgggctactatcacgacgaaaccgcacaagacgaagaagacagggtcctaattcactttaatgtcagagatatcaagattggtccagagtgccacgatgtacagccgcctgagggcaggagtagagatggtctgctcactgtgaacctacgcgaggggggacgacttcacctgtgcgcagaaacaaaggatgatgccctggcttggaagacagcgcttctcgaggccaattctacgcccgtgcgcgtgtattccccttatcaagactactacgaggttgtgccaccaaacgctcacgaagctacatatgtcaggagctactatggccctccatatgcgggacctggcgttacgcacgtaatcgtgcgtgaagacccttgctacagcgcgggagcgtag

SEQ ID NO: 235164 - DNA, 480 bp, synthetic construct
  misc_feature 1..480: note = Description of Artificial Sequence: Synthetic coding sequence
  source 1..480: mol_type = other DNA
atggccctggtaagaggtgggtggctttggcgtcagagttcgatcctgagacgctggaaacgcaattggtttgctctatggttggacggaacgcttggttactaccacgatgagacagcccaggatgaggaagatagagtgcttatccattttaatgtccgtgatatcaagatcggaccggaatgtcatgacgtccagccgccagagggtaggtctagagatggtctcctgacagttaatctgcgcgaggggggtcgccttcatttgtgcgcagagaccaaggacgacgctttagcctggaaaacagctctgctcgaagcaaacagcacaccaatgatccgcctgaaactgattcacccccacaataagtatctcctgtcatgctattccgctggcgcaccactggcgatgggtatgctagccggagctgccacaggcgctgccctggggtcgctgatgtggtccccttgctggttctag

SEQ ID NO: 235165 - DNA, 483 bp, synthetic construct
  misc_feature 1..483: note = Description of Artificial Sequence: Synthetic coding sequence
  source 1..483: mol_type = other DNA
atggcactagtccggggaggctggctctggcggcagtctagtatacttcgacgttggaaacgaaactggtttgctctttggctggatggcaccctgggctactatcatgacgaaactgcccaggacgaagaggatcgggtcctgatccactttaatgtgagagacatcaaaatcggcccagagtgtcacgatgtgcagccccctgaaggaaggagcagggatggcctcctcactgttaatctgagggaaggaggacgactccatctatgcgccgagactaaggacgacgccctagcctggaaaacagccctgctggaggctaactcaacgcctgccccagcgggagccacggtcccccctaggtccaggcgggtctgctctaaggtccgctgtgtcacccggagctggtctccctgcaaggtagagcgcagaatttgggttcgggtgtactcaccctaccaggactattacgaagtagtatag

SEQ ID NO: 235166 - DNA, 465 bp, synthetic construct
  misc_feature 1..465: note = Description of Artificial Sequence: Synthetic coding sequence
  source 1..465: mol_type = other DNA
atggcactggtccgcggaggatggttgtggcgacagtcatctatccttagaaggtggaagagaaattggtttgctctctggctggatggcactcttggctactaccatgacgaaactgcccaggacgaagaagaccgagtgctcatccattttaatgttcgtgacatcaagattggcccagaatgccacgatgtgcagcctccagaaggcaggtcaagagacggattgctcacggtgaatctgcgcgagggagggcgactgcatctatgtgccgaaactaaggacgacgctttagcctggaagaccgccctcctggaagccaattcgacgccagtgcgcgtttactctccctaccaggactattacgaagtggtgcccccaaatgcacatgaagctacttacgtccgcagctattacggcccaccctatgccggaccgggagtgacccacgtaatcgtccgatag

SEQ ID NO: 235167 - DNA, 258 bp, synthetic construct
  misc_feature 1..258: note = Description of Artificial Sequence: Synthetic coding sequence
  source 1..258: mol_type = other DNA
atggctttggtgagaggcggttggctctggaggcagtcctccatactgcgacgctggaagcgtaattggttcgccttatggttggacggcacattaggctactaccacgacgagactgcacaagacgaggaggacagggtactcatccatttcaatgtaagggatataaaaattggacccgagtgccacgacgtgcaaccccctgagggacggtctcgcgacgggcttttgacagtgaatctccgggagggtggttag

SEQ ID NO: 235168 - DNA, 3576 bp, synthetic construct
  misc_feature 1..3576: note = Description of Artificial Sequence: Synthetic coding sequence
  source 1..3576: mol_type = other DNA
atggaacggcctctggaaaacggagacgaatctccagattcccagggtcatgccacggattggaggttcgctgtctgctccttccgtgacgcttgggaggaagaagagcctgctagccagatgcatgttaaggatccaggaccgcctcgaccaccagcgggtgccacacaagacgaggagctgcaaggcagccctttgtcacggaagttccaactaccaccagccgctgatgaatccggagacgctcagcgaggtaccgtggagtcaagctccgtccttagtgaaggacctggaccatccggcgtggaaagcctgttgtgtcccatgtcgagccacctgagtctggcccagggcgagtcagatacaccaggagtaggcttggtgggcgaccctggcccttctagggcaatgccatcgggattgtctcccggagccttggattcagatcccgtaggcctgggcgacccattaagcgaaatcagcaagctgctagaagcggctccctccggcagtggcctccccaagccagctgactgtttgttagcccaggacttgtgctgggagctcctggcttcaggtatggctaccctgcctggcaccagagatgtgcagggaagagctgtgctactcctgtgcgctcattcacctgcatggctgcagagcgagtgttccagccaggaacttatccggctgttgctctacctgcgctcaatccccagaccagaagtgcaggctttgggcctcactgttctcgtggatgctcggatttgcgcccctagctcaagcctcttctccggactctcccagcttcaggaagccgcacccggagctgtgtaccaggtgctgctggtaggaagcactttgttaaaagaggtcccgtcaggcctgcagttggaacagctacctagccagagcctgctgacgcatattccaacagctggtctaccaacctcactggggggagggttaccttactgtcaccaagcgtggctagacttccgtcggcgattagaggctctgctgcagaactgccaggccgcatgcgccctgctacagggggctatcgaatccgtgaaagccgttccccagcccatggagcctggggaggtgggacagctccttcagcagaccgaagttctcatgcaacaagtccttgatagtccatggctagcctggctgcagtgccaaggcggtcgcgaactcacctggcttaaacaagaggtgcctgaagtaacactaagccctgactacagaacggccatggataaggctgatgagctctatgacagagtggacggactgctccaccagcttaccctccagtccaatcaacgcatccaggccttagagctggttcagaccctggaagccagggagagcggactgcaccaaattgaagtttggctgcaacaggttggttggccagcactggaggaggctggggaacctagcctggacatgctgttgcaggctcagggatccttccaagagctctatcaagtggcacaggagcaggtacggcagggcgagaagttcctgcagcctctgaccgggtgggaagctgccgagctggatccacccggtgcccgattccttgctctccgtgcacagctcactgaattttcgcgggcactggcacaaaggtgccagagactggccgatgccgaacgactttttcagctgtttcgagaggctctgacttgggctgaggagggacagcgcgttctggctgagctcgagcaggaacgtcccggagtggtgttgcagcaactacaacttcactggacaaggcacccagacctgcctcccgctcacttccggaaaatgtgggcgcttgccaccggcctcgggtccgaggcaatccgccaggagtgtcgatgggcatgggcccgatgccaggacacatggttggcgttggaccagaagctcgaagccagccttaagcttcctcccgtaggctctacggcctctctttgcgtgtcacaggtgcccgctgccccagcgcaccctccactgcgcaaagcttactcctttgatcggaatctgggacaatcgcttagtgaaccagcctgtcattgtcaccatgctgctactatagcagcctgccggaggcctgaagcaggagggggagctctgccccaggcaagcccaactgtgcccccacccggttccagcgaccctcgcagccttaaccggctgcagctggtactagcagagatggtggcaacggaaagggaatacgtgagagctctcgaatacactatggagaattactttccagaactggaccggccagacgtgcctcagggcttgcgaggccaaagagcacacctattcggcaatctggagaaacttcgagactttcactgccacttctttctgcgggagctggaggcttgcaccagacatcctccgcgagtggcctatgcctttctaaggcacagagtgcaattcggcatgtatgcactttactccaaaaataagcctcggagcgacgccctgatgtctagctatggacatactttcttcaaagataagcagcaagctctcggcgaccacctggatctcgcatcataccttctgaaacccatccaacggatgggcaagtatgccctgctgctccaggaactcgctcgcgcatgtggtgggcctacacaggaactttccgcactgagggaagcccaaagtcttgttcactttcagctgagacatgggaatgacctgctcgccatggatgccatccagggttgtgacgttaacctaaaggagcagggacaacttgttcgtcaggatgagtttgtcgtccggacaggtaggcacaaatcagtcaggcggatcttcctgtttgaggagctgctgctgttctcgaaaccgaggcatgggcctacgggcgtggatacgttcgcctacaagagatcctttaaaatggcggacctgggcttaacggaatgttgcgggaatagcaatctgagatttgagatctggttccggaggagaaaggctagagatacatttgtgcttcaagcatcaagtctggctatcaagcaagcgtggaccgcggatatctcccatttactgtggaggcaggctgtgcacaataaggaggtccgtatggccgaaatggtatccatgggggtaggtaacaaggcctttcgggatattgcgccaagtgaggaggccatcaatgaccggaccgttaactacgtactgaagtgtcgagaagtgcgcagtcgcgcaagtatcgctgttgcccctttcgaccacgatagcctgtacctcggcgcatcgaactccctgcccggtgatccagcatcttgcagcgtcctaggatctctgaacctccacttgtacagggaccccgcactgttaggcttgagatgtccactgtacccatcctttccagaagaagcagccctagaggcagaggcagaattaggagggcagccatccttaacggctgaggacagcgagatctcctctcaatgtccttccgcatccggatcctcggggtcagattcatcatgtgtctcaggacaggcactggggaggggcctggaggatctgccgtgcgtctag

SEQ ID NO: 235169 - DNA, 3576 bp, synthetic construct
  misc_feature 1..3576: note = Description of Artificial Sequence: Synthetic coding sequence
  source 1..3576: mol_type = other DNA
atggagcggccactagagaacggtgatgagtcacctgattcccaaggccatgccactgactggagattcgccgtgtgttcctttcgcgacgcttgggaggaagaggaaccagcctcacagatgcacgtcaaggatcccggacctcctcggcctcccgcaggagcaacccaagatgaggaactccagggaagccccctctcacggaaattccaactaccacccgctgccgacgagtctggtgacgctcagcggggaaccgtcgaatcgtctagcgttcttagtgaaggccctggtccctcaggagtcgagtccctgctctgtccaatgtcatctcacctgtcccttgcccagggcgagtctgatactccgggagtgggccttgtgggcgaccccggtccctctagggccatgccttcaggactgtctcctggcgcattggatagtgacccagtcggcctgggggaccccctgagcgaaatctccaagctgcttgaggcagcccctagcggatctggcctccccaagcctgccgattgccttctggcccaggacctctgttgggaattactcgcatctggcatggccactttgcccggtactcgggacgtgcagggacgtgcggttttgttgctctgtgctcattcaccagcatggctgcagagtgagtgttcctcacaggagcttattcggctgctcctgtacctgagaagcataccacggcctgaagtgcaggcccttggcctcactgttctggtagacgctagaatctgtgctccatcaagctcattgttcagcggcctgagtcagctccaggaagccgcacccggtgccgtgtaccaggtcctattagtgggaagtacccttctaaaggaggttcctagtggtcttcagctggagcaactgccttcccagtctctcctgacacacataccaacagccggattgcctacatctttgggcggaggtcttccatactgtcatcaggcatggctggacttccgcagaagactcgaggccctcctgcagaattgtcaggctgcttgcgctctgctgcagggggcaattgaatctgtgaaagctgttccccagcctatggagcctggtgaagtagggcagctcctgcagcaaaccgaagtcctgatgcagcaggtgctggatagcccctggttagcctggctgcagtgtcaagggggtagggagctgacgtggctgaaacaggaggtcccagaagtgacattatctccggattataggaccgccatggacaaggctgatgagctgtatgacagagtcgacggcctcctacatcagttaactctgcagtcgaatcagagaattcaggcgctggaattagttcaaactctggaagctagagagagcggattacaccaaattgaggtgtggctgcagcaggtgggttggccagcactcgaagaagcgggtgaaccgtcgctggatatgctcctgcaggctcagggatcattccaagagctctatcaggttgcccaagagcaggtacgccagggggaaaaatttcttcagccgttgacaggctgggaggccgcagaactcgaccctcctggcgcaagattcctggcactgcgggcacagctgacggagttttcccgagcgctcgctcaaaggtgccagagactggccgacgctgaacggctgttccaactttttcgggaggcactgacatgggcagaggagggccagagagttcttgcggaattggaacaggagcgccctggagtggtgctgcagcagttacagctgcattggacacgacatcctgatctaccacctgcccactttagaaaaatgtgggccttggcaacaggtctgggatctgaagccatccgtcaagaatgcaggtgggcgtgggctagatgtcaagacacttggcttgctttggaccaaaagcttgaggcaagccttaaacttcccccagttggttcgacagctagcctgtgcgtcagccaggtgcctgctgcacccgctcacccgcctctcaggaaggcctacagctttgatcgtaaccttggccagtcgctcagcgaacccgcttgccactgccaccacgccgcaacgatcgcagcttgccgcaggcctgaagcaggtggcggagctctgccacaagctagtcctacagtgcctccacctggctctagtgacccacgcagcctcaatcgcctacagttggtactagccgaaatggttgcgacagagcgtgaatatgttcgagcactggagtacactatggaaaactattttccagagctggatagacccgacgtgccacagggcctgaggggccaaagagcccacctgttcggaaatctcgagaaactgagggatttccactgccactttttcttacgcgagttagaggcttgtacaaggcacccacccagggttgcttacgctttcctgagacacagagtgcagttcggaatgtacgccttatactccaagaataaaccgaggtctgatgccctgatgtcctcctatggccacaccttcttcaaggataagcagcaagcgctgggagaccacttggatttggcctcgtacttgctgaagcctatacagagaatgggcaagtatgccctgttgctgcaggaactggccagggcctgtgggggacccactcaggagctgagtgctctgagagaagcccagtctttagtgcattttcagctaaggcacgggaacgatctgttagctatggacgctatccaggggtgtgatgttaatctgaaagaacaaggtcaactggtccgacaggatgaattcgttgtgcggacaggacgtcataaatcagtgcgacgtatcttccttttcgaagaacttttgcttttttcaaaaccaaggcacggcccaaccggtgtggacacttttgcatataagaggagtttcaagatggcagacttgggactcacagaatgttgcggcaattccaatcttcgctttgagatctggttccgcaggaggaaagctagagataccttcgttctgcaggcgtccagtctggctatcaaacaagcttggaccgccgacatcagccatttgctctggcgtcaggcagttcacaataaagaagtgagaatggctgagatggtttccatgggcgtggggaataaggccttcagagatatcgcgccttctgaagaagccatcaacgacaggacagtcaactacgttttgaaatgccgtgaggtgcggtctcgagcctccattgcagtcgctccgtttgatcatgacagtttgtatctgggcgcatctaatagcctgccaggcgatcctgcctcatgctctgtcctcgggtccctgaatctccacctgtatagagacccagccctgttaggtttgcggtgtccactgtatccgtccttcccagaagaggccgctctcgaggccgaagctgaacttggcggacaaccaagcctcacagccgaggactccgagatctctagccagtgtccctctgctagcgggtcctccggatccgattctagttgcgtgtccggccaggcactggggcgtggtctggaggatttgccatgtgtgtag

SEQ ID NO: 235170 - DNA, 582 bp, synthetic construct
  misc_feature 1..582: note = Description of Artificial Sequence: Synthetic coding sequence
  source 1..582: mol_type = other DNA
atggaaagacccctcgaaaacggcgatgagtccccggactcccagggccacgcgaccgattggcgcttcgccgtctgtagcttccgtgatgcctgggaagaagaagagccagcttctcaaatgcacgtgaaagatccaggccctcctcgccctcccgcaggcgctactcaggacgaagagctgcaagggagccccttatcccgtaaattccagctcccacctgcggcagacgagtcgggtgacgctcagagagggacggtagagtccagcagcgtgctgtccgaaggcccaggccctagcggagtggaatccttactgtgcccgatgtcttcgcatctgtccctagcacagggagagagtgacacgcccggagtgggactggtgggtgaccccggtcccagccgtgccatgccatccggattgagcccaggtgcactggactccgaccccgtggggctaggggacccactttcagaaattagtaagctgctggaggcgggtaaagagggatgggccagggaagtctgggaagggaatggagatgcatggcgtgacgaatgccaggactttggagggctgtag

SEQ ID NO: 235171 - DNA, 3576 bp, synthetic construct
  misc_feature 1..3576: note = Description of Artificial Sequence: Synthetic coding sequence
  source 1..3576: mol_type = other DNA
atggagcggcctctggaaaatggtgacgagagcccggacagtcagggccatgctaccgattggcggtttgccgtgtgttcattccgagacgcctgggaggaggaagagcctgcctcgcagatgcatgtgaaagaccctgggcctccaaggcctcccgcaggagcgacacaggatgaagagttgcagggcagccccttgtccagaaaattccagctccctcccgctgccgatgagagcggggatgcccagagaggcaccgtggaatcaagcagtgtccttagcgaggggcctggacccagtggcgtcgagagtctactctgtcccatgagtagtcacttgtccctggcccaaggcgagtcagacaccccaggagtgggtctggttggggaccccggtccgagtcgggctatgcccagtgggctgtcaccaggggcactcgatagcgatcctgttgggctcggtgatccgctgagtgaaatctctaaactgctcgaagcggcaccatccgggagtgggctgccaaagcccgcagactgtttacttgcgcaggacctttgctgggaactcctggcctctggcatggcaaccctgcctggcacccgcgatgttcaggggagagcagtgttactactctgcgctcatagtccagcctggctgcaatcggagtgtagtagccaggaactcattcggctgctgctttatttaaggtcaatcccaaggcctgaggtacaggccttaggactgacagtgctggttgacgccaggatttgcgccccatcctcttccctgttttccggattatcccagttgcaagaggctgcgcctggcgcagtctaccaagtcctgctcgttggctctacgcttctgaaggaagtgccctcgggccttcagctcgaacagttacccagccaaagcctcctgacccacattcccactgctggcttacccacttctttggggggaggcctcccatactgtcatcaagcttggttagattttcgtcgaagacttgaagccctgctgcagaactgccaagctgcatgcgccttgctccagggagccatagaaagcgtgaaagcagtgcctcagccaatggaaccgggtgaggtcgggcaacttctacagcagacggaggtactcatgcagcaagtgctcgattctccgtggttggcatggttgcagtgccaaggagggagagagcttacttggctcaaacaggaggttcccgaggtgacacttagcccggactacagaacagccatggataaggccgatgagctttacgatagggtggatggcctgctgcaccagctaactctgcagtctaaccagaggatacaggccctcgagttggtacagaccttggaagccagggaaagcggcctgcatcagatcgaggtgtggctgcagcaagtgggatggccagcactcgaagaggcaggagaaccttccttggacatgcttctgcaggcccagggctctttccaggagttataccaagttgctcaggagcaggtgcgccagggcgagaagttcctgcaaccattgactggatgggaggccgctgagctggacccacccggagccagattcctggctctcagagcccagctgacggagttctctcgagcccttgcacaaaggtgccaacgcctggcggacgctgagaggctctttcaactcttcagggaagcactgacctgggctgaggagggccagcgggtgctggcagagttagagcaagaaagaccaggggtggtactccagcagctgcagttgcactggacccggcaccctgatctgcccccagcgcacttcagaaagatgtgggcacttgctaccggcctggggagcgaggccatccggcaggagtgtcgatgggcatgggctcggtgtcaggatacttggctggccctcgatcagaagctggaagcgagcttgaaattgccccctgtgggcagcactgcatcattgtgtgtatcacaggtgccggcagccccagcccacccaccactgaggaaggcttatagttttgaccgcaatctgggtcaaagtctgtctgagcctgcctgccactgtcaccacgccgcaacaattgcagcctgcagacgccctgaagccggaggaggtgccctccctcaagccagcccgacggtcccaccgccaggatcttccgatcctagatcacttaaccgcttgcagcttgtgcttgcagagatggttgccacagaaagggaatatgtgcgagccctggaatataccatggagaactattttcctgaattagataggccagatgtccctcaaggcctgagaggacagcgggctcacctgttcggcaatttagagaagctccgcgactttcactgccactttttcctgcgagagctcgaggcctgcaccagacacccgcctcgggttgcttacgctttcctgcgacatcgtgtccagttcggtatgtatgccctgtacagcaaaaacaagccacgctctgatgctttgatgtcgtcctatggccataccttcttcaaggacaagcagcaggcacttggcgatcacctcgatctggctagctacttgctcaaacccatccagcgcatgggcaaatatgcattacttctgcaggaactcgcacgtgcttgcggagggccaactcaggaactctccgctcttcgggaagcccaaagtcttgtgcactttcagcttcgacacggaaatgatctgctggcgatggatgctatacagggatgcgatgtcaacctgaaagagcaggggcagctggtgagacaggatgaattcgttgttcgcactggaagacataagtcagtgagaagaatcttcctttttgaagagttgttgctcttctctaagcccagacacggccctacaggggtggacaccttcgcctacaagcgaagcttcaagatggctgacttggggttgaccgagtgctgtgggaacagcaatctcaggtttgaaatctggtttcggagacgcaaagcgagggatacctttgtgctgcaggcttcaagcctggcaatcaagcaagcatggaccgcagatatctcacacctactgtggagacaggctgtgcataataaggaggtcagaatggccgagatggtgagcatgggggtcggtaacaaggcgtttcgcgacattgcccctagcgaggaagccatcaatgaccgcactgtcaactatgtgctgaagtgccgcgaagtgagaagccgcgcatccattgccgtggccccattcgatcatgactctctgtatctgggagcgtctaattccctccctggcgacccagcctcctgtagcgtcctgggctcccttaatcttcacttgtaccgggacccagcccttctggggctgcgctgtccactctacccgtctttcccagaagaagccgcactggaagccgaggccgagctggggggtcagccgagccttacagctgaggattccgagatttcgtcacagtgtccctctgccagcggcagttctggatcggattcctcctgtgtcagcggccaagccctggggagaggtcttgaagatcttccctgtgtgtag

SEQ ID NO: 235172 - DNA, 3333 bp, synthetic construct
  misc_feature 1..3333: note = Description of Artificial Sequence: Synthetic coding sequence
  source 1..3333: mol_type = other DNA
atggagcggcctctggagaatggggatgaatccccagatagccagggtcatgctaccgactggcgattcgcagtgtgctccttccgtgacgcatgggaggaagaggagccggcatcccagatgcacgtgaaggaccctggtcctccgaggccgcctgccggagcaacccaggatgaggaacttcagggcagccctttatcacgcaaattccagctgcctccggcagcagatgagtcgggggacgcacagcgcggtactgtggaatcatccagcgtgctcagtgaggggcctggcccttcaggcgtggagtcactgctgtgtcctatgagtagtcacctcagtttggcacaaggcactcgggacgtccaaggacgggctgtactgctgctctgcgctcatagccctgcttggctgcagtcagagtgttcctctcaagaactgattcgtctgctcctgtacctgcgcagtatacctaggccagaggtgcaggcgctgggtctgactgtgctggtcgatgcaaggatttgcgctccatcctcctctctgtttagcgggctgtcccaattgcaagaggccgcacccggagcagtttaccaggtgttactcgtgggcagtacactgctcaaggaggtgcccagtggattacagttagaacagctgccctcacaatctctgttgacgcatattcccaccgcaggacttcctacaagcctgggaggaggactcccctattgtcatcaggcctggctcgacttccggaggaggctagaagcgttgctgcagaactgccaggcagcctgcgccctactccagggcgcaatcgaatcagtaaaggccgtgcctcaaccaatggagcccggtgaggtgggccagttgctgcaacagacagaggttctaatgcaacaagtcctcgacagcccttggctcgcctggttacaatgccaggggggaagagagctcacttggctgaaacaggaggttccggaggtgaccctttccccggactacagaaccgctatggataaagccgacgagctctatgatcgcgtggacgggttgctccaccagctgaccctgcagagcaaccaaagaattcaggctttggagcttgtgcaaactctggaagcacgggagtctggcctgcatcagatcgaggtgtggctccagcaagtcggatggccggctttggaggaggccggtgagccaagcctagacatgctgctgcaggcacagggaagttttcaggaactgtaccaggtggcacaggagcaggtaaggcagggcgaaaagttcctccagccgctgaccggttgggaggctgcagagctggacccccctggcgctcggttcctggctttgagggcgcagttaacagagtttagtcgagccctcgcacagaggtgccagagactggcagatgccgagagactattccaactgtttagggaggcgctgacttgggctgaggaaggccagagggtcctggcagagctcgagcaagagcgaccaggggttgtcctccagcagctgcagttacactggacccgccatcccgacctgcctccggcacactttcgcaagatgtgggctttggccacagggctcggtagcgaagccattcggcaggaatgccgctgggcttgggccaggtgtcaggatacctggcttgctcttgaccagaagctcgaagcttccctgaaactgcctccggttggtagcaccgctagcttatgtgtcagccaggtccccgctgctccagcgcacccaccactgcgcaaagcgtactccttcgaccggaatttgggacagagcctgagtgagcccgcatgtcactgccatcacgctgcgaccatagcagcctgtcgacggccagaagcgggtggaggcgctctgccacaggctagccctaccgtgcctccacccggttcatccgaccctagatcactgaatcgcctgcagttggtactcgcagagatggttgccactgaaagagaatacgtgagggccctagagtacaccatggaaaattatttccccgagctagatcgccctgacgttccccaagggctccgcggacagcgggctcacctctttggcaatctggagaaattgagagactttcactgccatttctttctgcgggagctggaggcctgtacaaggcaccctccacgcgtggcctatgctttcttacggcacagggtccagttcggcatgtatgcactatactcaaaaaataagcctaggtctgatgcattaatgagtagctacggccatacattctttaaggataaacagcaggcgctcggtgatcacctcgatctggcctcctacctgctcaagcccattcagaggatgggcaaatatgcacttctgctccaggagcttgctcgtgcctgcggcggaccgacacaggaactgtccgcgttgagagaagctcagtccctcgttcactttcagctgcgtcatggcaacgacctgctggctatggatgcaattcagggctgtgacgtaaatttgaaggaacagggacagctcgtacgccaggatgaatttgtcgtgcggacggggaggcataagagcgtgagacgtatctttttgtttgaagagctgctcctgtttagtaagccccgtcacggccctacgggggtggatacctttgcttataaaaggtcattcaagatggctgacctcggcttgaccgagtgttgcggaaactccaatctgcgctttgagatatggttcagaaggaggaaagccagggataccttcgtcctgcaggccagttctcttgccataaagcaagcatggaccgctgatatcagccaccttctctggcggcaggccgtgcacaacaaggaggtccggatggccgagatggtctcaatgggggtcggaaacaaggcattccgagatatcgccccatcagaggaggccataaacgaccggaccgtgaattatgttctgaaatgtcgcgaagtgcgaagcagagcttctatcgcggtggctccttttgaccatgattcactttatctgggagcttccaattctctcccaggagatcccgctagttgtagtgtcctcggatccctgaatttacatctctatcgcgacccggctctcctgggactacggtgtccgttatatccatctttccctgaagaagctgctttggaggccgaagcagagctcgggggacagccctcactaaccgccgaggactccgaaatatcctcccagtgtcccagcgctagcggctcttccgggtcagatagctcctgtgtgagcggacaggcacttggccgaggtctggaagatctgccctgcgtgtag

SEQ ID NO: 235173 - DNA, 3021 bp, synthetic construct
  misc_feature 1..3021: note = Description of Artificial Sequence: Synthetic coding sequence
  source 1..3021: mol_type = other DNA
atgcactatgacggccacgtgcgtttcgacctcccacctcaggggtccgtgctcgccagaaacgtgtctactcgcagctgtccaccacggacatccccggctgtcgacttagaggaggaagaagaggaatcctccgtcgatggtaaaggtgatcgaaagtccactgggctgaaattgagtaaaaaaaaagcaaggaggcgccataccgatgatccctcaaaggagtgcttcactcttaagtttgatctaaacgtcgatattgagacagaaattgtccccgctatgaagaaaaagtctctgggcgaagtgctgctgccagtgttcgagcgcaaaggcattgcactcggtaaagtagacatctacctagatcagtccaacacaccactttctttgacgttcgaagcatatcgcttcggaggtcattatctaagggtaaaggcccctgcaaagcccggagacgaagggaaagtcgagcagggcatgaaggattcaaagtctttaagcctgcccatcctacgtccagccggtaccggcccaccagcgctcgagcgcgtcgacgcccaatcccgccgtgagtctttagacatcctcgctcccggtagaaggcgtaaaaacatgagcgagtttttgggggaggctagcattcctggacaggagcccccaactccaagctcttgttctctcccctccggttctagcgggagcactaacacaggcgattcttggaagaaccgcgcagcctcacgcttcagcgggtttttttcatcggggccatccactagcgcatttggccgtgaagtcgacaaaatggagcagctggagggcaaactgcacacctacagcttgttcgggcttcccagactgcccagagggctgaggttcgaccacgattcatgggaggaggaatacgacgaggatgaagatgaagataatgcatgtctgcggttagaagactcatggcgggagctgattgacggccatgagaagttgactcggaggcagtgccaccaacaagaagccgtgtgggagctccttcacacagaggcaagttacatccggaaactgcgagtgattattaacctgtttttgtgttgtctcctcaatctgcaggaatccggcctcctctgcgaggtagaggccgaacgcctgtttagtaacatcccagagatagcgcaactgcatcgtcgcctatgggcatccgtgatggcacccgtcttggagaaggcacggcgaacccgcgctttgctgcagcctggggatttcttgaagggcttcaagatgttcgggtctctgttcaaaccctacattaggtactgtatggaagaagaggggtgcatggaatacatgcggggtctgttacgcgacaatgatctttttcgggcatacatcacctgggccgagaagcatccccagtgtcagcggctgaagctctctgacatgctggccaagcctcaccagcggctgactaagtatcctctgctccttaaaagcgtgctgcgcaagactgaggagcccagagctaaggaggctgtggtcgccatgatcgggtccgtggaacggtttattcaccacgtgaacgcttgtatgcgacagcgccaggaacgacagcgcctggctgctgtggtgtctaggatcgatgcttatgaggtggttgaaagctcaagcgacgaggttgacaaattgctgaaggagttcctgcatctcgacttgacggcccctatcccaggtgcctctccggaggaaactcggcagctcctgctagaaggcagtttgcggatgaaggaggggaaagactccaaaatggatgtctattgctttctgttcaccgatctcctcttggtcacaaaggctgtgaaaaaggcagagcgtacccgcgtcattaggccacccttgcttgtggataaaattgtgtgcagagaactgagagatcctggctcatttcttctgatatacttgaatgaattccacagtgccgtgggagcctacacgtttcaggcctccggtcaggctctgtgccgcggttgggtggacaccatctacaacgctcagaaccagctgcagcagctcagagcccaggaacccccagggtcccagcaaccattgcaaagcctggaggaggaagaggacgagcaggaggaggaagaagaagaggaggaagaggaggaggaaggagaggattctggcacctcagctgcttcgtcccccacaatcatgaggaagtccagcggctctccggattcccaacactgtgcttcagacgggtcgacagaaacgcttgcaatggtcgtggtggagccaggtgataccctatctagccccgaatttgactctggccctttctcatcgcagagtgacgagacaagccttagcacgacagccagctccgcaactcctacgtcagagttgcttcctttgggccctgtcgacggaagatcctgttctatggatagcgcatacggcacattgagccctacatcgctacaggatttcgtcgcaccaggacccatggccgagctggttccacgcgcacccgaaagtccacgtgtgccctccccaccaccaagcccaaggctccggaggcggactcctgtacagctcctttcttgtcctccccaccttttgaaatctaagtccgaagctagtctgttacagcttcttgctggcgctgggacccacggcaccccaagcgctccatcacggtctctctctgaattatgcctggctgttcccgctccaggaatcaggactcaggggtctccccaagaagccggaccatcttgggactgtagaggcgcaccctctcctgggtccggccctggcttagtcgggtgtcttgctggtgagcctgccggaagccatcgcaagagatgcggcgacttaccctcaggcgcatctccgagagttcagcccgaacccccacctggagtttcagcacagcaccggaaactaacccttgcccagctctaccgcattagaaccacattgctcctcaactctaccctgaccgcatccgaagtctag

SEQ ID NO: 235174 - DNA, 2793 bp, synthetic construct
  misc_feature 1..2793: note = Description of Artificial Sequence: Synthetic coding sequence
  source 1..2793: mol_type = other DNA
atgcattacgatggccatgttcgctttgatttgccacctcagggctccgtactggctaggaacgtgtcaactcgaagctgtccccctaggacctctcccgcagttgacctggaagaagaagaggaagaatcctccgtggatggaaagggcgacagaaagtcaacgggcctgaagcttagtaaaaaaaaggcacggaggaggcacaccgacgatccgtccaaggagtgtttcaccttgaagtttgatcttaacgtggacatcgaaactgagattgtaccggctatgaaaaaaaagtctctcggggaagtgctgcttcccgtcttcgagcgtaaaggcatcgccctgggtaaggtggacatctaccttgaccagtctaataccccactcagcctgacgttcgaggcttacagatttggaggacattacttgcgagtgaaagcacccgcaaagcctggcgacgaggggaaagttgagcaaggaatgaaggattctaagtctctgtccttgccaatactcagacccgctggaactggacccccagcacttgagagggtcgacgcccagtcacggagggagtcactcgatattttagccccaggcagacggagaaagaatatgtcagagtttctcggggaggcctctattcctggccaagaacccccaacgcccagctcttgcagtctccctagtgggagttcaggctcaacaaacacaggtgacagttggaaaaatcgggcagcatcgaggttcagcggctttttcagcagcggccctagcacaagcgccttcggaagagaagtggacaagatggaacaactggaaggcaagctgcatacttatagtctctttgggctccctagactgccacggggtctgcggttcgaccacgatagttgggaggaggagtatgatgaagatgaggacgaagataatgcctgccttcgtctggaggactcctggagggaattgatcgacggacacgagaaactcacgaggagacagtgccatcagcaggaggcagtctgggagctcttgcacacggaggcttcttatatacgtaagctcagagtgataatcaacttattcctgtgttgtctgctcaatttacaggaatcaggtcttctgtgcgaagtagaggcggaacgactgttttctaatatccctgagattgcccagctccatcgccgactgtgggcctctgtgatggcacccgtcttggagaaggctagaaggacgcgcgctcttctccaaccaggagactttttgaaaggctttaagatgtttggaagcctgttcaagccatacattcgctactgtatggaagaagaggggtgtatggaatatatgcgcggacttctgagggataacgacctgttccgagcgtatattacttgggcggagaaacacccccagtgccaacgcctgaagttgtccgatatgctggctaaaccacaccagcggctgacgaaatatcctctgctgttaaagtccgtgctgaggaaaacagaggaacctcgggctaaagaagccgtcgtcgcaatgattggcagcgtagaacggttcattcaccatgtgaatgcctgtatgcgtcagcgccaggagaggcagagacttgccgctgtggtctctcggattgacgcatacgaggtcgttgaaagcagctcagatgaagtggacaaactgctgaaagagtttctccacttggatctgaccgccccaataccgggagcttcaccagaggaaacacgccagcttctgcttgagggttccctacggatgaaggagggtaaggattcaaagatggatgtctactgcttcttatttaccgatctgctccttgtgacaaaggccgtgaaaaaggctgaacgaacccgcgttatccggccaccattgttagtggacaaaatagtctgccgggagcttcgagacccaggttcattcttattaatttacctcaatgaattccattcagctgtgggggcttacacttttcaagccagcggacaagctctctgtcgagggtgggtggacaccatatataacgcacagaaccagttgcaacagctgagagcacaggagcctccagggtcccaacagcctctccagagcctggaagaggaggaagatgagcaagaggaggaggaagaagaggaagaggaagaagaggagggagaggactctggaaccagtgcagcatcttccccaactatcatgcgcaaatccagcggctccccggatagccagcactgcgcaagcgacggttccacagaaactctcgcaatggtggtggtcgaaccaggtgacacccttagctctcccgagtttgatagcggcccttttagcagccagtctgacgaaacatccctctccacgacagcaagctcagcaacacctacatccgaacttctacctctggggcctgtcgacgggaggtcatgttccatggatagtgcctatggaactctgtcccctacctccctgcaagacttcgtagcccctgggcctatggccgagttggtgccgagggcacccgaatctcctagggtgccgtccccgccaccaagccccagactacgcaggcgaacaccagtccagttgctgagctgtccccctcacctgctgaagtcaaaatctgaggccagccttctgcagctgcttgccggagccggtacgcacgggactccatccgcacctagtcgctccctgtccgaattatgtctggctgtcccagccccagcgcaggaagccgaccctggcccagcattgccaaatcaggaccacccagcagcatag

SEQ ID NO: 235175 - DNA, 3021 bp, synthetic construct
  misc_feature 1..3021: note = Description of Artificial Sequence: Synthetic coding sequence
  source 1..3021: mol_type = other DNA
atgcactatgacggacatgtacgcttcgaccttccccctcaaggatcagtgctcgctcgaaacgtgtccacaagatcatgtcccccacggacctccccagccgtggatctggaggaggaggaagaggagagttccgtggatgggaagggggatcgcaagtccaccggcttgaagctctccaagaaaaaggcacgccgaaggcataccgacgatcccagcaaagaatgcttcacactaaagttcgacctgaatgttgatatcgaaaccgaaatcgtacccgctatgaagaaaaagtctttaggggaggttctgctgccggtgtttgaacgaaaaggaatcgcactggggaaggtggacatctatctcgaccagtccaatacgcctctctccctcactttcgaggcttaccgcttcggcggtcactacctcagagtcaaggcgcctgctaaacccggagacgaggggaaggtggaacaagggatgaaggacagcaagtcattaagcctaccaatactgcgcccagctgggaccggccctcctgccctggagagagtggacgctcaaagtcggagggagtcccttgatatacttgctcctgggagaagacgcaagaacatgtcggagtttcttggcgaagcctctattcctggtcaggagccccctaccccatccagctgcagcttgccgtcaggcagttcaggaagcactaacaccggggattcttggaagaatcgtgcagccagtcggtttagcggatttttcagttccggaccttccaccagtgctttcggacgcgaggtggataaaatggagcagttggagggtaaactccacacgtacagcctcttcgggctcccaaggctccctcggggtttgagattcgaccacgattcttgggaagaggagtacgatgaggacgaagacgaggacaatgcctgcttgaggctggaggatagctggcgcgagctaatagacgggcatgagaagctgaccaggaggcagtgccatcaacaagaagcagtatgggagctgttgcacacagaggcatcatatatcaggaagctgagagtcataataaatttgtttctgtgctgcctactcaatttgcaggagtccggtcttctctgcgaagttgaggcagaacgcctcttctccaacataccggagatcgctcagctacataggcggctgtgggcctccgtcatggctccagtgttagaaaaagcgcgtcggaccagagcactgctccaaccaggtgacttccttaaagggtttaaaatgttcggctccctctttaaaccttatattcggtactgtatggaggaagaaggatgtatggagtatatgagaggcctgctgcgggataacgatctgttccgggcttatattacttgggcagagaagcatcctcagtgccagagattgaaactgagtgacatgctggctaagcctcatcagaggctgaccaaatatcctttgctgctaaaaagcgtgctgcggaagacagaagagcccagggccaaagaggcagtagtggcaatgatcggcagtgtagaacgctttatccaccacgttaatgcatgcatgcggcagaggcaggagaggcagaggctggctgctgtagtttctcgaatcgacgcttatgaggtagtcgaatcttcatcggatgaggtggataagttgctgaaggaatttttgcatctagatctaactgctccaatccccggtgcttctcccgaggaaacccggcaattgctgcttgaaggaagtctgagaatgaaagaagggaaagactctaaaatggacgtgtattgctttctgttcaccgacttgctgcttgtgaccaaagccgtgaaaaaagcggaaaggacaagagtcatccgccctccccttttggtggataagatagtttgccgcgagcttcgcgaccccggaagctttctgttgatctatctgaatgaatttcatagtgcagtgggcgcatacactttccaggcaagcgggcaggctctttgcaggggctgggttgatacgatctacaatgctcaaaatcaattgcagcaattaagggctcaggaaccacctggaagccaacagccattgcagtcgctagaagaggaggaggatgagcaagaggaagaggaagaagaggaggaagaagaggaggagggcgaagatagtggaaccagtgctgcatctagccctactattatgaggaagagcagcggaagccctgactctcagcactgcgcaagcgacggatcaaccgagactctcgcaatggtggtcgttgagccaggtgacaccctctctagcccagagttcgattcaggacctttttcatcccagtctgacgaaaccagtctctccacaacagcctctagcgcaacccccacttctgagctgctcccactggggcctgtggacggcagaagctgctcaatggatagcgcctacggaaccttgagtcctacaagcttacaggatttcgtcgcaccgggacccatggctgaactggtaccacgcgcacccgaatcaccccgagttcctagccccccaccgagtcctaggctgaggcgcaggacccccgtgcagctcctcagctgtccaccacatttactaaagtcgaagtcagaggcctccctcctgcagttacttgccggtgcgggaacccacggaacaccttcagctccttcccggtcactgtcagaattgtgtcttgcggtgccggctcctggaatacgtactcagggctctcctcaagaggccggtccctcctgggactgtcggggtgccccttctcctggaagtggccctggcctcgttgggtgtctagccggagagccagccggaagccatagaaagcgctgcggagacctgccttcaggtgcaagtccaagagttcaaccggagcctccacctggtgttagcgcccagcatagaaaactgacccttgcccagctgtacagaatccgtacaaccttgttgctcaatagcacgctcaccgcgtctgaggtgtag

SEQ ID NO: 235176 - DNA, 3132 bp, synthetic construct
  misc_feature 1..3132: note = Description of Artificial Sequence: Synthetic coding sequence
  source 1..3132: mol_type = other DNA
atggataaggggagggccgctaaggtgtgccaccatgcagactgccagcaactccaccgtcggggacctctgaacctttgtgaggcctgcgactccaagtttcacagtaccatgcattatgacgggcacgtgaggtttgatctgccccctcagggcagcgtgctcgcacgcaacgtgtcaaccagatcttgccctccccgaacctcacccgcagtcgacttggaagaagaggaggaggagtccagcgttgatgggaagggcgaccgcaagtcgacaggccttaaattgagcaagaagaaggctcggcgtcggcatacggatgatccaagtaaggagtgttttactcttaaatttgacctgaatgtcgatattgaaacggagattgtgcccgctatgaagaaaaaatctctgggcgaggtgctcctgcccgtgtttgagcgcaaagggattgccctgggcaaggtggatatctacttagatcagagcaatacgcccctgtccctgacttttgaagcctaccgattcggtggccattatcttcgggttaaggccccagctaagcccggagatgaaggcaaggtggaacaggggatgaaggattccaagtccttgtcactgccgatcctgcgcccagccggtacagggccacccgcattggagagagtagatgcgcagtctagacgggaaagcttagacatactagctcctggtcgcaggcggaaaaatatgtccgaattcctgggcgaggcctcaatacctggccaggaacctccgacgccctcctcatgtagtctgccatcgggaagctcgggatccacgaataccggcgactcatggaagaatagagctgcctcccgtttctcaggattcttttctagcggaccttcaacttctgccttcggacgagaggtggataaaatggaacaactggagggaaaactgcatacctattcactgttcggccttcctcggctgccgaggggactgcggtttgatcatgactcatgggaggaggagtatgatgaagatgaggacgaagacaatgcttgtctccggctggaggactcctggagagaactgatcgacgggcacgagaagcttacccgcagacaatgccatcagcaggaggcggtttgggagctgctgcataccgaggcctcatatatcagaaaactgcgagtgatcatcaacctctttctctgttgccttctgaatcttcaagaatccgggctcctctgcgaggttgaagccgagaggttattctccaacataccagagattgctcagctgcacagaaggctgtgggcctccgtgatggcccctgtactggagaaagcccgaagaacacgggcactgctccagccaggcgactttctgaaaggttttaaaatgtttggctctctgtttaaaccctacatccggtattgtatggaggaagaaggctgcatggagtacatgaggggcttgctgcgagacaacgatttgtttcgcgcttacatcacctgggcagaaaagcacccccagtgccaaagactaaaattaagcgacatgctcgctaagccccatcagagactcactaaataccccctgttgcttaaaagcgtgctgcggaagacagaagagcctcgagcaaaggaagcagtcgttgccatgatcggcagcgtggagagatttatccatcatgtcaacgcctgtatgaggcagagacaagaaagacagcgcctcgcagctgtggtgtctaggattgatgcttatgaggtggtagaaagttcctctgacgaggtggacaagctgctcaaggaattcctgcatttggatttaaccgctccaatcccaggggctagtcctgaagagactcgacaactgcttctggaggggagcctgcgcatgaaggagggcaaggactcgaaaatggacgtttactgttttcttttcaccgatctgcttcttgtgacaaaggccgtgaagaaagcagagagaacccgcgtgattcggcctccactattggttgataaaatagtatgtcgcgaactccgggatccgggttcttttctactgatctatctgaacgaattccactctgcggtgggagcgtatacctttcaggcttctggccaagctctgtgcaggggatgggtcgatacaatctataatgctcagaaccagctccagcagttaagagcccaggagcccccaggaagccagcagcccctgcagagtctggaggaagaagaagacgagcaggaggaggaggaggaagaagaagaggaggaggaggaaggcgaagattctggcacttctgcggcttcaagccctacaatcatgcgaaaatctagcggcagtcctgattcccagcactgtgcttccgatggcagtactgaaacattggctatggtggttgtggagccgggagacacactgtcttccccggaatttgatagcgggccattctctagtcaatctgatgagacatctttatcaactacggcttcaagtgctacacccaccagcgagttattgcccctgggcccagttgatggccgttcctgctcaatggattccgcctatggcactttgagccctacatccctccaggactttgtagcgcctgggcctatggccgagctggtccctagggcccctgagtccccgagagtgccaagtccacctccttcgccaagacttcggaggagaacacctgtccagctgctgtcatgtccaccgcatcttttgaagagtaaatccgaagcctcgctgttgcagctgctagccggagctggaactcacggtactccttcagcgccaagtaggtccttgtccgaactgtgtctggcagttcccgctccagggattcgaacacaaggctccccccaggaagctgggcctagctgggactgccggggagcaccgagtcccggttctggccctgggcttgtgggttgtctggccggagagcctgctggaagccataggaaacgttgtggggatctgccctccggagcgtctccgagggtccagcccgagcccccaccaggagtctcagcacagcaccggaaactcaccctcgcgcagctctacaggattagaacgactttgctgctgaactcaacccttacagcctcagaagtttag

SEQ ID NO: 235177 - DNA, 3021 bp, synthetic construct
  misc_feature 1..3021: note = Description of Artificial Sequence: Synthetic coding sequence
  source 1..3021: mol_type = other DNA
atgcactacgacggacatgttagatttgacctccctccgcaaggttctgtgctagctagaaacgtgtctacaaggagctgtccacccagaacaagtccagcggttgacctggaggaggaggaggaagaaagctcagtggacgggaagggagatcgcaagtctaccggcctgaagttatccaaaaagaaagccaggagaagacacacagacgacccatcaaaggagtgttttacacttaagtttgacctcaatgtggacatagaaacggagatcgttcctgcaatgaagaagaaatctctgggggaagttttgctgcccgtcttcgaacggaaaggcatcgcgctgggcaaggtggatatctatctcgatcagagtaatacacccctcagtctgactttcgaggcttatcgcttcgggggacactatttgcgcgttaaagctccggctaaaccaggtgatgaaggtaaagtggagcaagggatgaaagacagtaaaagcctctccttgcctatcctccggccagcgggtaccggccctccggcattagaacgcgtcgacgctcagtctagaagagaaagtctcgacattctggccccaggacggcgaagaaagaacatgtccgagtttctaggagaagcatctattcctggccaggaacctccaactccgagctcctgctccttacctagcgggagctcaggttcgaccaatactggggacagctggaaaaatcgcgcagcatcaagattcagcgggttcttcagttcaggaccttcaacttcagcgtttggccgtgaagttgacaaaatggaacagctggagggtaagctgcacacgtacagcctatttggcctgcctagactccccaggggcctcagattcgaccacgacagctgggaggaagaatatgacgaggacgaggacgaggataacgcctgcctcaggctggaggactcctggagagaactgatcgatggacacgaaaagctgactaggcggcagtgtcaccagcaggaagcggtctgggagcttctacatacagaagcaagctatatcagaaaactgcgcgtcattatcaacttgtttctctgttgtctgctgaacctgcaggagtctggtctactctgcgaggtggaggctgagcgcctatttagcaatatccccgaaattgcacagctgcaccgccgactgtgggcgtcagtgatggcacctgtgctggaaaaagcgcgacgcactagagccctgctacagcccggtgacttcctgaaaggattcaaaatgttcgggtctcttttcaagccatacatcaggtactgtatggaagaagaaggctgtatggaatatatgcgaggtctgttgcgcgataatgacctcttcagggcctacatcacatgggcagaaaagcacccacagtgtcaacggctgaagttatcagacatgctcgctaagccgcaccagcgactcaccaaatacccattgctccttaagtcagtcctgagaaagacagaagagccacgagcaaaggaggccgtggtcgccatgatcgggtcggttgaacgctttatacatcatgtgaacgcctgcatgagacagcgccaagaaaggcagaggctcgctgcagtggtttctcggatagatgcttacgaggtcgtcgaatctagctccgacgaggtggacaagctcctaaaggaatttcttcacttagatttgacagctcccatccctggtgcaagtcccgaagagacccgacagttgctgctcgaaggctccctcaggatgaaggagggcaaagactcaaagatggatgtttactgcttcttatttacggatctcctgttagtgactaaagctgtcaagaaagctgaacgaactcgggtgatccgccctccactcctcgtagacaaaatagtgtgccgggaactaagggacccgggatcctttctgctaatatacctcaacgagtttcactccgctgtgggggcttataccttccaagcttccggccaggctctttgcaggggatgggtggatacaatctacaatgcacaaaaccagctccagcagttacgggctcaggagccaccagggtcccagcaacccctgcagagcctggaagaggaggaagacgaacaggaagaggaagaggaggaggaagaagaggaagaggagggcgaggacagcggtacctccgcagcgtcttccccaacaataatgaggaaatcgagtggaagtcccgacagtcagcattgcgcttctgacggatctacagaaaccttggcaatggtggtggtagaaccaggcgatactctgtcctctccagaattcgactcaggcccattcagttctcagtccgatgagacctcgcttagcacaacggcttccagtgcaacacctaccagcgaacttctgccactgggcccagtggatggtcgctcttgcagcatggattctgcttacggcaccctctctcccaccagcctccaggactttgtcgcgcctggacctatggctgaactggtgcccagggccccagagagcccccgtgtccctagcccgcctccttctccgaggctacggagaagaacccccgtacagctgctgtcttgcccaccacatctgctgaaatcaaaaagtgaggcgtcactcttgcaactgctagccggagccggtacccacggaaccccctccgcaccgagccggagtctgagcgagctgtgcttagccgtgcccgcaccagggattcggacccaagggtcgccacaggaagcgggtccttcatgggactgcagaggggctccatctccagggtccgggcctggactggtcgggtgtctggcaggggagcccgctgggtcgcatagaaagcgttgcggcgatctgcccagtggcgcaagcccacgagtacaacccgagcctcctccaggcgtctcggcgcaacaccggaagcttaccctggctcagctctaccggatacgcacaacacttctgttgaacagcacactgactgcaagcgaagtttag

SEQ ID NO: 235178 - DNA, 2559 bp, synthetic construct
  misc_feature 1..2559: note = Description of Artificial Sequence: Synthetic coding sequence
  source 1..2559: mol_type = other DNA
atgaattctgtgctcacaaaacatgggtctccaccgaggagctggctcagtttatgctcaggcaccgatgaccagtccccagctgagaagaaagggttgcgctgccagaatcccgcatgtatggataagggcagagctgccaaagtgtgtcaccacgctgactgccagcagttgcataggcgaggcccactgaacctctgtgaggcctgcgactccaaatttcatagcacgatgcactatgatggccacgtgagattcgatctgcctcctcagggctctgttctggctcgcaatgtgagtacacgtagttgccctcctcgcacatccccagccgtggatctggaggaggaagaagaagaaagcagtgtggacggcaagggcgataggaagtcaacaggtttgaaattgtctaagaagaaagccagacggaggcacactgatgatccaagcaaagaatgcttcacactgaaattcgacctgaacgtggacattgaaacagaaattgtgccggcaatgaaaaagaagtccctaggtgaagttctactgccagtgtttgaacgtaaaggtattgcactgggaaaggtggatatctacctggaccagtccaatacgcccctttctctgacctttgaggcttaccggtttggcggacactatctccgagtcaaagcgcctgcaaagcccggagatgaagggaaagtggagcagggcatgaaagattcaaaatctcttagcctgcccattttgcgacccgctggtacaggccctccggcactcgagcgggtggatgctcagagccgcagagaaagcctcgacattctggcccctgggaggcgtcggaagaatatgtcagagttcctgggggaggccagcatccccggacaggagcctcctaccccatccagctgctccttgccctccggttcgagcgggtccaccaacacaggcgactcttggaaaaatcgggctgccagtcgcttctcagggttcttctcaagtgggccttctacatccgcttttggccgtgaggtggataagatggagcagctggaaggaaagctgcacacctacagtttgttcggtttgcctcggctgccaagaggacttagattcgaccacgatagctgggaagaagagtatgacgaggacgaagacgaggataacgcctgcctaaggttagaggatagctggagagagctcatcgatggccacgagaagcttactcggaggcagtgccaccagcaggaagcagtgtgggaactgctgcacacagaagcctcttacattcgaaaactgcgggtgatcatcaatctattcctttgctgtctgctgaaccttcaggaatcaggtctactgtgcgaagtagaggcagagaggctgttcagcaacattcccgagatcgctcagctgcaccgcaggctctgggcatccgtcatggctcctgtgttggaaaaggcacgaagaacgagggctttactccagcccggtgactttctgaagggctttaaaatgtttggcagtctgtttaagccatatatacgatattgtatggaagaagaggggtgcatggagtacatgaggggcctgctgcgcgataatgacctgtttagagcgtatataacatgggccgagaagcatcctcagtgccaaaggctcaagctgagcgatatgttggcaaagccacaccaaagactgacaaaatatccgcttctcttgaagtccgtgctgcggaaaactgaagaaccgagagctaaagaagccgtcgttgccatgattggctctgtggaacgtttcattcaccatgttaacgcctgcatgagacagagacaggagaggcagcgcttagctgccgtggtcagtaggatcgatgcttacgaagttgtcgaatcttccagcgatgaagttgacaagctcctcaaggagttcctccatctggatctgaccgctccaattccaggagcatcccctgaagagacacggcagctgctgctggagggaagcttaaggatgaaggagggtaaggactcaaagatggacgtctattgcttcctgttcactgatctgctccttgttactaaagccgtgaagaaagccgagcggacgcgcgttatcagacccccattattggtggataagatcgtctgtcgtgagctgagagacccaggttcgttcctccttatttatctcaacgagtttcactcagctgtgggcgcatataccttccaagcctccggacaggccttgtgtcggggttgggtggatactatatataacgctcagaaccaacttcagcagcttcgagctcaggaaccacccggaagccagcaacctctccaaagtctggaagaggaggaggacgaacaggaggaggaggaggaggaagaggaggaggaggaagagggcgaggatagtggaactagtgctgcctcttccccaaccataatgagaaaaagcagcggtagccccgacagtcagcactggaagctcacactcgcacagctgtaccgtatacggacaaccctgctgctgaactcaaccttaacagccagcgaagtttag

SEQ ID NO: 235179 - DNA, 3252 bp, synthetic construct
  misc_feature 1..3252: note = Description of Artificial Sequence: Synthetic coding sequence
  source 1..3252: mol_type = other DNA
atgaacagcgttctcactaagcatggctctccacctcgcagttggctttccctgtgttcagggacggacgatcagtccccagcggagaagaaaggcctaaggtgccaaaacccggcatgtatggacaaaggccgagccgcaaaggtctgccatcacgccgactgccaacagctccatcgtcgcggtcccctgaacctttgtgaggcatgcgattcaaagtttcactctactatgcactacgacggccacgttaggtttgatttacctcctcaaggctccgtgctcgcgaggaatgtcagcacaagaagttgtccacctagaacgagccctgcggttgacttggaagaagaggaagaggaatcctccgtggacgggaaaggcgaccgtaagagtaccggcctcaagctgagcaagaagaaggcacgcaggaggcacaccgatgatccaagtaaagaatgcttcaccttgaaattcgacctcaatgttgacattgagaccgaaatcgtgcccgctatgaagaagaagagcctcggagaagtgcttctacccgtgtttgagagaaaaggaatcgccctgggaaaagtggatatttacctggaccagtctaatacgcccctgtctctgacatttgaggcatatcgcttcggcggacactacctcagagtgaaggcgcctgccaaacccggagacgagggcaaagtggagcaaggaatgaaggactcaaagtctctgtccttgccaatcctccgccctgccggaactggacctccagccctggaacgcgtcgatgctcagtcccggagggagagcctggacatccttgcaccaggacgtaggcgaaaaaacatgtctgagttcctaggagaagcttctatccccggacaggagcctcctaccccttcgagctgctctttaccttcagggtcttccggatctaccaatacgggcgatagttggaaaaatagggcagcaagtcgtttttccggcttcttcagcagcggtccaagcacctccgccttcgggagagaggtggataagatggagcagctggaaggaaagcttcacacatacagtctcttcgggctgcctcgcttacctaggggcctgcgattcgaccatgactcatgggaggaagagtatgatgaagacgaggatgaagataacgcctgcctgagactggaggattcatggcgcgagctgatcgacggacatgaaaagttgactcgtaggcagtgccatcaacaggaagccgtttgggaattgctccatactgaggccagctatatcaggaagctgcgtgtcatcatcaatctgtttctgtgttgtctgctgaatctacaagagtcgggtctgttgtgcgaagtagaggccgagcgtttgttttctaacattcccgagatcgcacaattgcataggagattgtgggcaagcgtaatggcacccgtgttagagaaagccaggagaactcgcgctctgctccagccaggcgattttcttaaagggtttaaaatgtttggatcattgtttaaaccctacattagatattgcatggaagaagaaggctgcatggaatacatgagaggtctgctgagggacaatgacctatttagagcatatattacatgggccgaaaaacaccctcagtgccagaggctgaaactgtctgatatgcttgctaagccgcatcaaaggcttaccaaatacccacttctactcaaatctgtcctacggaagacagaggagcctcgggcaaaggaggccgtggttgcaatgataggatccgtggaacggtttatccatcacgtgaacgcttgcatgcggcagcggcaggaaagacagaggctcgcagcggtggttagcaggattgatgcatacgaggtcgtggaatcttctagtgatgaggtcgacaagctgttgaaagagttcttgcatcttgacctgactgcacccatccccggtgcgtctcctgaagaaacaagacagctgctgctggagggttccctaagaatgaaagagggcaaggacagtaagatggacgtctattgcttcctcttcactgatctgttattagtcacaaaggccgtgaagaaagcagaacggacgcgagtcatcaggccccctctcctggtggataaaattgtctgcagagaactccgggatcctgggtctttcctgctcatctacttgaacgaatttcattcagcagtcggcgcttacacatttcaggctagcggacaggcactttgtaggggttgggtggataccatctacaacgcacagaatcagctccagcaattgcgggctcaagagccccctggctcacagcagcctttgcagtcactggaagaggaggaggatgaacaggaagaggaagaggaagaagaggaggaggaggaggaaggggaggactctgggaccagtgccgcatccagcccgaccattatgaggaaaagcagcggaagcccggatagccagcactgtgccagtgacggttctacagagaccctggcaatggttgtggtcgagcccggtgatactttgtccagtcccgagttcgattctggacccttttccagccagtccgacgaaacgagcctctccaccacggccagctcagcaacacccacgtcggagctgttgcccctggggccagtggacggacggagctgtagcatggattcagcttacggtaccctgtcccctacaagcctacaggacttcgtggcgcctggccctatggccgagctggtaccaagggcgccagagagcccacgcgttcccagtcctcccccatctccccgtctcagacggagaacacccgtacaactcctgtcgtgtcctccacacctcctgaaatccaaatctgaagcctcactattgcaactcctggccggagccggaacccacgggacaccatctgctccgagcagatccctcagcgaactctgcctggccgtcccagccccagggatccggacccagggttcaccccaggaggctggcccatcctgggactgccgaggggctccttcacccggaagcggccctggactggtcggttgcttggctggagagcccgctgggtcacatcggaaacggtgtggggatctgccttcaggcgcaagcccgcgtgttcagcccgaacctcccccaggtgtgtcagcccagcatcggaaactgactttagcccaactctacaggattcgcacgactctactgctcaactcgactctgacggcctctgaggtctag

SEQ ID NO: 235180 - DNA, 3021 bp, synthetic construct
  misc_feature 1..3021: note = Description of Artificial Sequence: Synthetic coding sequence
  source 1..3021: mol_type = other DNA
atgcactatgatggccatgtgcgcttcgatctgccgccacagggttcagtgcttgccagaaacgtcagtacacgatcttgtcctccaagaacctcccccgctgtagatctggaggaggaggaggaagagtcctcagtcgacggcaaaggagaccggaaaagcaccggtctgaaactcagcaagaagaaggccagaagacgacacactgacgatccgtctaaagaatgcttcactctgaagttcgacctgaacgtggacattgaaactgagatcgtgccagcgatgaaaaagaaaagcctgggggaggtactgttgcctgtctttgagcgtaagggcatagccctgggcaaggtggatatctacctggatcaatccaacaccccactctctctgacctttgaagcctaccggtttggtgggcactacctcagagtgaaggcccctgccaaacccggtgacgaaggaaaagtggaacaagggatgaaggattctaagagcctttctcttccaattctgcgcccagccggtacagggcctcctgctctggagagggtagacgcccagtcccgcagggagagcctggacatcctggcaccagggaggcgcagaaagaatatgtccgaattcttgggtgaggcttcaatacctggtcaggaacccccaacccccagttcatgttctttaccaagtggatcaagcggctcaacgaatactggagactcttggaaaaaccgagccgcatccagatttagtggattcttctcaagtgggccttctaccagcgcttttggcagagaggtcgacaagatggagcagttagaggggaagctgcacacctacagcctattcggactgccaagactgcctcggggattgaggtttgatcacgattcctgggaggaagaatatgacgaagatgaagacgaggataacgcctgtctacgactggaggatagctggcgcgaactaattgatggacacgagaaactgacccggcgacagtgccaccagcaagaggcggtgtgggagctgctgcatacagaagcttcctacatccggaagttgagagtgattatcaatctgtttctgtgttgcctgttgaacctgcaggagagtggcctgctctgtgaggtggaggcggaacgcctgttttccaacattcccgaaatcgctcagttacaccggaggctctgggccagcgtaatggcacctgtgctggaaaaagcacgtaggaccagagctctgctccagccaggggactttcttaagggctttaaaatgtttggctcccttttcaaaccttacatccgatattgcatggaggaggaaggatgtatggagtatatgcgcggtttgcttcgggataatgatcttttcagggcatacattacctgggcagagaaacatcctcagtgccaaagattaaaactgtccgacatgttggccaagcctcaccagcgcttgactaaatatcccctgctcttaaagagcgtacttaggaagaccgaggaaccacgcgcaaaggaggccgttgtggccatgataggcagtgtcgagagatttatccatcatgtgaatgcatgtatgcggcaacgtcaggagaggcagaggctcgcagcggtcgtctccaggattgacgcgtatgaggtggtggagtccagcagcgacgaagtcgacaaactcctgaaagaatttctccacctagacctgactgcacctatccctggggcatctcccgaagaaacccgccagctcttgctggaaggctctctgcgtatgaaagagggaaaagacagtaagatggacgtctactgcttcctattcaccgatcttttgctggtgacgaaagcagtgaagaaggccgagcgcactcgggttattcgcccacccctgttggttgataagatcgtgtgtcgggagcttagagatccaggatcctttttgctcatatatcttaatgaattccatagtgcagttggagcttacactttccaggcatctggccaagccctgtgtcgcggatgggttgacaccatttataacgcacagaaccaattgcaacaactgcgggcacaagaaccgccaggatcacagcagccactgcagtctctggaagaagaggaagacgaacaggaagaggaggaggaggaagaggaggaagaggaggagggggaagacagcgggacatcagctgccagctcgccgactattatgaggaaatcctctggctctccagacagccagcactgtgccagtgatggctccaccgagaccctcgccatggttgtggtagagccaggagacacgctcagtagtccagagtttgactccggcccattttcttcacagtcagacgagaccagcctgtctacaaccgcgagctctgctactcccactagtgagctgctgccgctcggccctgtggatgggcgatcatgttcaatggacagcgcgtatgggactctctcacccactagcctgcaggactttgtagcacctggcccaatggccgagttggtgcccagggcacccgaatctccacgcgtgccttctccccctccgtcaccccgtctgaggaggcgtacccctgtgcaactgctctcatgtccgccacacctcctgaagagcaaatcggaggcatcactcctccaactgctggccggtgccggaactcatggaacacctagcgccccttcacgttctctgtctgaactgtgtctggccgtgccggctcccggaatcaggactcaggggtctccacaggaagccggaccctcctgggactgccgcggtgcgccttcccccggaagcgggccaggcttggtagggtgcctcgctggtgagccggcagggagccaccgcaaacgttgtggcgacctgcccagcggggctagcccacgggttcaaccggagccccctccaggcgtctccgcgcagcatcgcaaacttacattggcacaactgtatcggatcagaaccacactgctcctgaattccacgctgacagcttccgaggtttag

SEQ ID NO: 235181 - DNA, 3189 bp, synthetic construct
  misc_feature 1..3189: note = Description of Artificial Sequence: Synthetic coding sequence
  source 1..3189: mol_type = other DNA
atggacgaccaaagtccagccgagaagaaaggcctgaggtgtcagaaccccgcatgcatggacaaaggacgcgcagcgaaggtgtgccaccatgcagactgtcaacagctgcacaggcgcggacctctgaacctgtgtgaggcgtgtgactcaaagttccactctactatgcattatgatggccacgtgcggttcgatttaccccctcagggctcagtccttgccaggaatgtctctactcggtcctgtccacccagaacgagccctgccgtggatcttgaagaagaagaggaggagagtagcgtagacggaaagggtgaccgtaaaagcaccggtctaaagctcagtaagaaaaaggctaggcgccgacatactgacgatccaagcaaagagtgcttcacactcaagtttgatctgaacgtggacattgagacagaaatcgtgcccgcaatgaagaagaagtccctgggggaagtcctcctccccgtgttcgagcgcaaaggaattgcattggggaaggttgacatctatttggatcagagtaacacccctttgtcactaacttttgaggcatatcggtttggaggacattatttacgtgttaaagcgccagcgaaacctggcgatgagggcaaagtcgaacagggaatgaaggactcgaagagccttagcctgcccatcttgagaccagcaggcaccggcccacctgccctggaacgagtcgacgcccagagccgcagggaatcacttgatatcctggcacccggaagacggcgtaagaacatgtccgagttcctgggggaggcctctattccgggacaagaaccaccaaccccttcatcttgtagcctccccagcggcagttctggcagcaccaacaccggtgacagttggaagaatcgggctgcctcccggttcagcggattcttcagttccggtccaagtacttcagcctttggccgagaggtggacaagatggagcagctggaaggtaagttgcacacctactcccttttcggtctccctcgcctgcctcgtgggctgcgctttgaccacgacagctgggaagaggaatatgacgaagatgaggatgaggacaacgcctgtttgaggttagaagatagttggagagagcttattgatggccacgagaaactcacacgcagacagtgccatcaacaggaggctgtatgggagttgctgcatacagaggcctcctacattcgcaagctgagagtgatcataaatctgttcctgtgctgcttgctgaatcttcaggagagcggcctgctgtgcgaggttgaagccgagcggttattctccaatatccctgaaatagcacaactgcacagaagactgtgggcaagtgtgatggccccagtacttgaaaaggccagacgcacccgggctctacttcaaccaggtgattttctgaaaggatttaagatgttcggatcactgtttaagccctacattagatactgcatggaggaagaaggttgcatggaatatatgaggggtctactccgggataacgacttgttccgggcatacataacttgggcggaaaagcatccacaatgtcagagattaaagctgtccgacatgctagccaaacctcaccagcggctgacgaagtatcctctgctcctcaagtctgtgcttagaaagacagaggagcctcgtgccaaggaggccgtggtggccatgataggcagtgtggagcgtttcattcaccatgtgaatgcatgtatgagacagaggcaggaaaggcagcgtcttgcagccgttgttagtaggatcgacgcatacgaagtcgtcgagtcttcttcggatgaagtggataaactgctgaaggagttcctccaccttgacctgactgctcccatacctggagcatctccagaagagaccagacaactgctgctggagggctccttgaggatgaaggaggggaaggacagtaagatggatgtctactgcttcctcttcacagacctcctgcttgtcacaaaggctgtaaaaaaggctgagagaacaagagtgatccgccctccgctgctggtcgacaagatcgtgtgcagggagttacgggacccaggatcatttctgctgatttacctgaacgagttccatagcgcagtgggagcatacacatttcaggcctccggccaggcgttgtgtagaggttgggtggacacgatctataatgcgcagaatcaactgcagcagctgagagcacaggagcctcccggttcccaacaacccttacagtccctggaggaagaggaggacgagcaggaggaagaggaagaggaagaggaggaggaggaagagggcgaagacagcggaacttccgccgcatcatctccaacaatcatgcgcaagtcctctggatcacccgatagccagcattgtgcgagtgacgggagcactgaaactctggctatggtggtcgtggaacctggagataccctgtcaagtcctgaattcgactctggcccattttcttcacagagcgatgagacgtcactgtcgacaacagctagtagcgctacccctacatccgagttacttcccctgggaccggtggacgggaggagttgctcaatggacagtgcttatggcacactgagccccacgtctctccaggactttgtggccccaggccctatggccgaactggtcccacgggcaccagaatctcctcgtgtacctagcccacccccaagccccagactgagaaggagaacaccagtgcagctcctgtcctgtccccctcacctgctgaaatccaagtccgaagcctcactactccagctgctagctggcgctggcacccatggtacacccagcgcaccgtctagatccttgagtgaactgtgcctggcagtcccagcccctgggatcagaacccagggctccccacaggaggcaggcccttcctgggactgtcggggagcgccttcccccggttccggtcctgggttggttggctgcctggcaggtgagcctgcaggaagccacagaaagcggtgcggcgaccttccatccggggcatctccacgtgtccaacccgaacctccacccggtgtgtccgcacagcacagaaaactgaccctggctcagctgtataggatacggactacactcttgctgaattcaacgcttacagcatcggaggtgtag

SEQ ID NO: 235182 - DNA, 3228 bp, synthetic construct
  misc_feature 1..3228: note = Description of Artificial Sequence: Synthetic coding sequence
  source 1..3228: mol_type = other DNA
atgggcactggcccaggagttagcgggagacttgctgcctcgcgccctggaccgggattgcctctgcgcgacagcgagcccagctgggcaggtggaagagcacgggatggggactcccaagtgtgtcatcacgccgactgtcagcagctgcacaggaggggtccgttaaatctgtgtgaagcctgcgactcgaagtttcacagcaccatgcactatgatgggcacgtgcggttcgatctgcctccccagggaagtgtgttagcgagaaacgtgtcaaccagatcatgtccccctcgcacgtcaccagccgttgatttagaagaggaagaagaggaatcttctgtagacggaaaaggcgaccggaaaagcacggggctcaaactgagtaaaaaaaaggcccgtcgaaggcacacagatgatccctcaaaggagtgctttaccctcaagtttgatctgaatgtggatatcgagaccgagatcgtgcccgcaatgaaaaagaaaagcctaggcgaggtgctcctgcctgtgttcgagcgaaagggcatcgcactgggcaaagtggatatctacctggaccagagcaatacacctctgtctctgactttcgaggcttatcggttcggagggcattatcttagggtgaaagctcctgctaagccaggtgacgagggaaaggtggagcaggggatgaaggattctaaatcactttcactgcctattctccgcccagccggaactgggcctccagctctggaacgcgtggacgcccaatcaagacgggaaagcctcgacatccttgcaccaggcaggcggagaaaaaacatgagtgaattcctgggcgaagcatctataccaggccaggagcctcccactccttcgtcatgttctcttccgtctgggagttcggggagcaccaacaccggagactcatggaaaaacagggctgcctccagattctcggggttcttttcatctggcccatccacctctgcctttggtcgcgaagtggataaaatggaacagctcgagggaaaactacatacttattcattgttcggtctgccacgcctgccacggggattgcgttttgaccacgactcctgggaagaagaatatgatgaagatgaagatgaggacaacgcctgtcttaggctggaagatagctggcgggagttgatagacgggcacgagaaattaaccaggcggcagtgccaccagcaggaagcagtttgggagctcctccacaccgaagcatcctacatccggaagctccgagtgataatcaatctgttcttgtgctgcctcctgaacctgcaggaaagtggcttactttgtgaagtcgaggctgaacgccttttctccaatatcccagaaattgcgcagctccacagaaggctctgggccagcgtgatggctcccgtattggaaaaggcaaggcggacccgcgctctcctgcagccaggggactttctgaaggggtttaaaatgtttgggtccctatttaagccttatattcgttattgcatggaggaagaaggttgtatggaatatatgcgcggtttgttgagagacaatgacctgttccgcgcttatatcacttgggccgaaaagcatcctcagtgccagagactgaagttgagcgacatgctggcaaaaccacaccaacgcctcaccaaatatcctctgctcctgaaatctgtgctgcgaaagacagaagaacctagagccaaggaggcagtcgtggcgatgattggatccgtggaaagattcattcatcacgtaaacgcctgtatgcgtcaacggcaagagcgccagcggctcgccgctgtggtttctcgcatcgatgcttacgaagtcgtggagtctagcagcgacgaagtggataagcttctcaaagaattcttgcatcttgacctgactgcgcctattcctggagctagccctgaggagacccgacagttactgctggaaggaagcttgcgcatgaaggagggcaaggattccaagatggatgtgtattgctttctgtttactgacctcttgctggtgacaaaagcggtaaaaaaagcagagagaacgcgagttatacggccaccccttctcgtcgacaagatagtgtgtagggagttgcgagaccccggatcattcttgctgatttacttaaatgaattccattcggccgtgggcgcatacaccttccaggcaagcggacaagcattgtgtcggggttgggtagatacgatctataacgcccagaaccagcttcaacaactccgcgctcaggaacctcccggatctcagcagcccctgcaatctctggaggaagaggaggacgagcaggaagaggaggaggaagaagaagaggaggaagaggaaggtgaagactccggtacgtctgcggctagttcacctaccataatgcggaagtccagtgggtcaccagatagtcagcactgcgctagcgatggtagcactgagactctggcgatggtcgtcgtagagcccggagataccctttcttctcctgaattcgattctgggcctttctcaagccagagtgatgaaactagtctttcaacaacagccagtagcgccactcctacctccgagttgctgccactgggacccgtggatggtaggtcttgctcaatggattctgcctatggtacgttgtcccctacatcgttgcaggattttgttgcgccaggacccatggcggagttggttccacgcgctccagaatcgcccagagtgcccagccctccacctagtccgagactcagacgcagaactcctgtgcaattgttgagttgccccccacaccttctgaaaagtaagtctgaggcctcactactgcagctgctcgccggagcaggcacgcacggcacgcccagtgcaccttctaggtctctctccgaactgtgcctggcagtaccagcacccggtatcaggacccagggtagcccccaggaggctggtccatcctgggactgccggggtgcccctagcccaggctctggccctggactggtgggttgccttgccggagagcctgcagggtcccataggaaaagatgcggtgacctcccttcaggggcatcccccagggtgcagcctgagccgcctcctggggtatcagcgcaacatagaaagctgacattggcccagctgtatagaatcaggacaacgttgcttctgaactctacgctgaccgcgagtgaggtttag

SEQ ID NO: 235183 - DNA, 2739 bp, synthetic construct
  misc_feature 1..2739: note = Description of Artificial Sequence: Synthetic coding sequence
  source 1..2739: mol_type = other DNA
atgaagaaaaaatctctaggcgaagtactgctgcccgtatttgagcgcaaaggaatcgctctcggcaaagtcgatatttacctcgaccagtccaatactccactttctctgacgtttgaagcctacagattcgggggacactatctccgcgtcaaggcccctgcaaagccaggagacgagggcaaggtagagcaaggcatgaaggactctaagagtctgagcttgcctatcctccgacctgcgggaacaggtccgcctgctcttgaacgggtggacgcccagagccggagggagtcccttgatatccttgcccctggccgacgcagaaagaacatgtctgagttccttggcgaagctagcatcccgggacaagaaccgccaaccccaagctcttgctcccttccttccgggagctcaggcagtacaaatacaggagattcatggaagaatagagccgcatctcgcttctcaggctttttcagctctgggccaagcacgagcgctttcggtcgggaagtggataagatggaacaattggaggggaaactccacacgtactccctgttcggcttaccaaggctgccgcgagggcttcggttcgatcacgactcctgggaagaagagtacgacgaggacgaggatgaggacaatgcctgcctgcggttagaggatagttggagggaactcatcgacggacacgagaaattgaccaggcggcagtgtcatcagcaagaggctgtctgggagctattgcatacggaagcttcttatattcgcaaacttagagtcattattaatcttttcctgtgctgtctcctcaaccttcaagaaagcggcttgctatgtgaggtggaggccgaacgactgttcagtaacattcctgaaatcgcccagctgcatcgtaggctgtgggcgagcgtgatggccccagtcctggagaaagccaggcgaactcgggctctcttacagcctggtgattttctgaagggcttcaaaatgtttgggtcattattcaaaccctacatcagatactgcatggaggaggaggggtgcatggaatatatgcgcggtttgctcagggataatgatctatttagagcatacatcacttgggctgagaagcatccgcagtgccagcggctcaagcttagcgatatgctggcgaagccgcaccagaggctgactaaatatccccttctgctcaagtccgtgttacgaaagacagaggagcccagggccaaggaagccgtcgttgccatgatcggcagcgtagagcggttcatccatcatgtgaacgcatgtatgcgtcagaggcaagagcggcagagactcgccgcagtcgttagcagaattgatgcttacgaggttgtcgagagtagttcagatgaggtggacaaactattaaaggaatttttgcacttggacctgaccgctcccatacccggtgcctctcccgaagaaacaaggcagttgctgctcgaagggtctctgcggatgaaagaaggaaaagactctaaaatggacgtctactgcttcttgtttacagacctgctgctggttacaaaggccgtgaagaaggccgagcggactagagtaataagacccccactgctagtagacaagattgtgtgccgggagttgcgggaccctgggtcatttctgcttatctacctgaatgagtttcatagtgctgtgggcgcttatacctttcaggcttccggacaagctctgtgccgaggttgggtggacacaatttacaacgctcaaaatcagctccagcagctcagggcgcaagagccgcctggctcgcagcaaccactgcaatccctggaggaggaggaggatgaacaggaagaggaagaggaagaggaagaagaggaggaagagggcgaggattcaggcacaagcgccgcatcctcacccactataatgcggaaaagttccggctcgccagattctcagcattgtgcctctgatggttctaccgaaacattggccatggttgtggtggaaccaggagacacgctgagctctcccgaatttgacagcggacctttctcatcccagtcagacgaaacaagtttgtctaccactgcaagcagcgccacacctacatcagaactactgccattgggcccagttgacggtaggagctgttcgatggatagtgcatacgggaccctaagcccaactagcttacaggacttcgttgccccaggaccaatggctgaactggtgccgcgagcaccagagtctcctcgagtgccaagccctccaccttcccccagactccgtagaagaacccctgtccaattgctgtcttgcccgccacatctactcaagtcaaaaagcgaggccagcctgcttcaactgctcgctggtgctggcactcatgggactccgagcgctcctagccgctctctctcagagctttgtctggctgtgccagccccaggcatcagaacacagggaagtcctcaagaggccggtccctcatgggactgccgtggtgcaccatcccccggttccggaccaggacttgtgggctgcctggccggagagccagcaggatctcaccggaagaggtgtggggatctcccttccggagcatcacccagggttcagccagagccccctcccggagttagtgcgcaacatcgaaagctgactctggctcagttataccggatcaggacaacccttctgctcaacagcaccctgaccgcatcagaagtatag

SEQ ID NO: 235184 - DNA, 3258 bp, synthetic construct
  misc_feature 1..3258: note = Description of Artificial Sequence: Synthetic coding sequence
  source 1..3258: mol_type = other DNA
atgtcattgggagagagagggagtccccaaacctttggagggtcatctgtcagcaaggggtcagatgccggacacgatcaatctcccgcagaaaagaaagggctgagatgccagaatcccgcatgtatggataaggggcgagcagctaaagtctgccatcatgcggactgtcagcaactgcacaggcggggtcctttaaacctatgcgaggcatgcgacagcaagttccactctactatgcattatgatggccacgttcgttttgacctcccccctcaaggttcagtgctggccagaaacgtgagcacccgatcatgcccccctcgcacttcccctgccgtggatctggaggaggaggaagaagagtcctccgtcgatggtaaaggtgaccggaagagtaccggtctcaaactcagcaaaaaaaaggcacgccgaagacacacggatgacccttcaaaggaatgcttcacactgaagtttgatcttaacgttgatattgagaccgagatcgtgccggcaatgaaaaagaagagcctcggcgaagtgttactgcccgtgtttgagcggaagggtattgcgcttggaaaggtggacatttatctagaccagagcaacacccctctatcgctcacatttgaggcctatcgctttggaggacactacctgcgggtgaaggcccctgcaaagcccggagatgagggaaaggtggaacaaggaatgaaagatagtaagtctttgagtttgcctattctgcggcctgctgggactggtcctcctgctttagaacgcgttgatgcccaatcccggagagagagcctggatatcctggctcccggtagacggagaaaaaacatgtcagagttcctaggagaagcttcaattcccggacaggagcctcccactcccagctcttgctccctcccgtccggttcgtctggctcgacaaacaccggggactcatggaagaacagggctgctagccgattttcaggctttttttcttctggcccatcgacgtcagcgttcgggcgtgaggtcgacaagatggaacagttggagggaaagctgcatacctactccttatttggcctgcctcgattgcccagagggctgagattcgaccacgattcttgggaggaggagtatgatgaagatgaggatgaggataatgcctgtcttagattagaggactcgtggagggagctgattgacgggcatgaaaaattaactcgcaggcagtgccatcagcaggaggcggtgtgggaactgctgcacaccgaggcttcctacattaggaagctgagagtgatcatcaacctttttctctgctgcttgctcaacctgcaggagagcggcctgctgtgtgaagtggaagccgaacgcctgttttctaatatccccgaaatagcacagctccaccggagactctgggcctcagtaatggcccctgtgctggagaaggctcgcagaacgcgagcgctcctgcaacccggtgactttctgaaaggattcaaaatgtttggcagcttgttcaagccttacatccgttattgcatggaagaagaagggtgcatggaatacatgaggggcctgctccgcgacaatgatcttttcagggcatacatcacttgggcagaaaaacatccgcagtgtcagaggttgaagctgagtgatatgctggccaagccccaccagcgcctaaccaagtacccactactcctgaaaagcgtgctgaggaaaacagaggagccacgggctaaagaagccgtggtggcaatgatagggtcagtggagcgttttatccaccacgttaacgcctgtatgcggcagcggcaggagagacaacgactcgccgctgtggtgtctcgaatcgacgcatatgaagtagtcgagtcctccagtgatgaagtggacaagcttctgaaggaattcctgcacctcgaccttacagctcctatccccggagccagtccagaagaaaccagacagttactgttggagggcagtttacgcatgaaggaaggaaaggacagcaaaatggacgtgtactgtttcttgtttacagatctgctcctggtgactaaagccgtcaaaaaggcagagaggacccgagtgatacgccctccgctgttagtcgataaaattgtctgcagagagttgcgggaccctggcagctttctccttatatatctcaacgagtttcactcagcagtcggcgcttatacattccaggccagcggtcaggcactctgtcggggttgggtcgacaccatttataacgcgcagaatcagttgcagcaactcagagcacaagagcctccaggctcccagcagcctttgcagtccctggaagaggaagaagacgagcaggaggaggaggaagaagaggaagaggaggaggaggaaggtgaggattcgggcacatctgccgctagctccccaacaatcatgcgcaaatcatcgggatcaccagattctcagcattgcgcttcagacggaagcactgagacactggccatggtggttgttgaacctggcgacacgctgtcaagccccgaatttgactcaggaccattttcaagtcagagtgacgagacctccctcagcaccaccgcatctagcgccacacctacctccgaactcctgcctctcggccctgtcgatggcaggagctgctctatggattcggcatacgggacccttagccccacatcgctccaggatttcgtagcccctggcccaatggctgagctcgtgccgagggcgccagaatctcccagagttccctctcctcctccctctcctcggcttcgtagacggaccccggtccagctcttatcatgcccccctcatcttctcaagagtaagagcgaggcctcactcctgcagctgcttgctggggctggaacccacggcactccctctgctccctctcgcagcctgtcagagctttgtttggccgtcccagcacctgggattcgcacacaaggcagtccccaggaagccggtccatcatgggactgtcgcggagccccttcacctgggtccgggcctgggctcgtggggtgtcttgccggagaacccgcaggctcccaccgtaaacgttgtggggatctcccttctggtgcatctccacgtgttcagcccgagcccccaccaggcgtgtctgctcagcacaggaaactgacacttgcccagctttataggatccggaccactctccttctaaattccacactgaccgcctccgaggtttag

SEQ ID NO: 235185 - DNA, 2793 bp, synthetic construct
  misc_feature 1..2793: note = Description of Artificial Sequence: Synthetic coding sequence
  source 1..2793: mol_type = other DNA
atgcattacgatggacacgttaggtttgatctcccgccacaggggagtgtgttggcaagaaatgtctcaacgagaagctgccccccacgtacttcccccgctgtggatctggaggaagaggaggaagagtctagtgtggatggcaagggagacagaaaatccaccggtctgaaactatccaagaagaaggctaggaggcgtcacactgatgatcccagcaaagagtgctttactctaaaatttgacctgaatgtcgacatcgagactgaaatcgtgccagccatgaagaagaaaagtctgggggaggtactgctgccagtgtttgaacgtaagggaatcgccctgggcaaagtagatatctatctagatcagagtaatacgccactgagcctaactttcgaagcctatcgctttggcggacactaccttagagtgaaagcccctgctaaacctggcgatgaaggcaaggttgagcagggaatgaaagatagcaaatccctctctctgccaattctgcggccagcagggacgggtcccccagccctggaacgtgttgatgcccaatctcgccgagagtctctcgacatactagcgcctggccgacgcagaaagaacatgtccgaatttttgggtgaggcctccattcccggtcaggagcctccgaccccaagctcctgctctttgccctctggatcctcaggctcaaccaacacaggggacagctggaaaaaccgcgctgcctccagattctccggctttttttccagtggcccaagcacctccgcttttgggcgagaagtggataaaatggagcagctagaagggaagctacacacttatagtctgtttgggctccctagacttcctcgcggattgcgctttgaccacgattcttgggaagaagaatacgacgaggacgaggacgaagacaacgcttgcctcagactggaggattcctggagagagctgatagacggtcacgagaagctcacgcggagacagtgtcaccaacaggaggcagtatgggaattgctacacactgaagccagctacatccggaagttaagagttataattaaccttttcctctgctgtcttctcaacctgcaggaatctggactgttgtgcgaggttgaggcagaacgactcttttctaacattccagagatagctcaactgcaccgaaggctatgggcctccgtgatggccccagtcctggaaaaggcacgcagaaccagggcactgttacagccaggcgactttttgaaaggctttaaaatgttcgggtcactgttcaagccctacataaggtactgtatggaagaagagggctgcatggagtacatgcggggactcctgcgcgacaacgatctgttcagggcctacatcacgtgggcagagaagcacccacagtgtcagcgtctgaagctttctgacatgctggctaagcctcatcagcggctgaccaagtatcccttgctgctgaagtcagtgctgaggaaaactgaggagccccgtgccaaggaggcagtcgtggccatgattggcagcgtcgagaggttcattcaccacgttaacgcctgcatgcgacaacggcaggaacgacaacgcttggctgctgttgtgtctcgaattgacgcttatgaggttgtcgagtcaagttctgatgaggtcgacaagttgctgaaggagttcctccacttagacctcaccgcacccattccaggcgctagccctgaggagaccaggcaactgctcctggaaggttcacttagaatgaaagaggggaaggattctaaaatggacgtgtactgttttctgtttaccgaccttctgctggtaaccaaggctgtgaagaaagccgagaggacgagagttatccggcctcccctgctggtcgataaaatcgtgtgcagagaattacgagatcccggatctttcttactaatttatctcaatgaattccattctgcagtgggagcgtatacctttcaagccagcggacaggcactgtgtagagggtgggtggacaccatttataacgcacaaaaccagcttcaacagctgagggcacaggaacctcctggttctcagcagcccctgcaatcccttgaggaggaagaagatgaacaagaggaggaagaggaagaggaagaggaagaagaagaaggggaagactctgggacttcagcagcctcttccccaaccatcatgcggaaatcatcgggcagtccagattcacaacactgcgcaagcgatggatccacagaaactctcgccatggtggtcgtggaaccgggtgacacactcagctctcccgagttcgattctgggcctttctctagccaaagcgacgagacaagcctatcaacgaccgccagcagtgctacgccgacatccgagctgctgccgcttggaccagttgacgggcgtagttgctccatggacagtgcttacggcactctttcccccacgagcttgcaagacttcgttgcacctggaccgatggccgaactcgtccctagggccccagaaagccctcgcgtcccctcgccacctccttccccaagactgcgaaggaggacgccagtccagctgctttcttgcccccctcaccttctgaaatctaagtccgaagcatccttgcttcaattactggcaggcgcagggacccatggaacccctagcgccccatcccggtcactgtccgaactgtgtttagctgtgccagctcccgctcaagaggccgacccaggccctgctttgccaaatcaggatcaccctgcggcatag

SEQ ID NO: 235186 - DNA, 2373 bp, synthetic construct
  misc_feature 1..2373: note = Description of Artificial Sequence: Synthetic coding sequence
  source 1..2373: mol_type = other DNA
atgaaagcttttggacctccccatgagggcccactgcagggactcgttgcctccaggattgaaacctacggcggacgacatagagcgtctgcacaatcaactgcaggtaggctgtaccccaggggttaccctgtgttggacccgagccgcagacgcctccagcagtacgtgcctttcgccagggggtcaggacaggcgaggggactgtcgcccatgcgcctgcgcgaccctgagcctgagaagcggcatggaggccacgttggagcgggattgctgcacagcccaaagctgaaggagctcacaaaggcccacgagctcgaagtgaggttgcacacctttagcatgttcggaatgccacgtctcccgccagaggataggcggcattgggaaatcggagaaggcggagactcagggctgactatagagaaatcttggcgagaactggtgcccggacacaaggaaatgtcacaggaactgtgccatcaacaggaggctctctgggagctgttgacaacggagctgatctacgttcgcaagctgaaaatcatgaccgacctcctggctgcagggctgctcaacctgcagagggtggggctcctgatggaggtgagcgcagagacgttatttgggaacgtaccctccctcatccggactcaccggagtttttgggacgaagttctggggccaacgctcgaggaaacacgtgcgagcgggcagcctttggatcctataggattacagtccggtttcctcacgttcgggcaaaggttccacccctatgtgcagtactgcttaagagtgaagcagaccatggcatatgctcgcgaacaacaggagaccaatccattgtttcacgcattcgtgcagtggtgcgagaaacataaacggagcggaagacagatgctctgcgatcttctcattaagcctcaccagcgaataaccaagtacccactgttgttacatgcagtccttaaaaggtcacccgaggctagggcccaagaggctcttaacgccatgatagaggcagtcgaatcatttctgagacatatcaacgggcaagtccgtcagggagaagagcaagagagtcttgccgctgcggcacagagaatcgggccttacgaggtactggagcctcctagcgacgaagtggaaaagaacctgagaccctttagcacactagatctgaccagtccaatgctgggagtggccagcgagcacacccggcagctgctgctggagggcccagttagggttaaggaaggcagggaaggcaagctcgatgtgtatctgtttctgttctctgatgtgcttcttgtcactaagccccaacggaaggcagacaaagctaaagtcatccggcctcccctgatgctggagaaattagtgtgccaacctctgagagatcctaattctttcttattgattcacctgaccgagttccagtgcgtcagctccgctctgcttgtacactgtccctccccaaccgatcgggcacaatggctcgaaaagacccagcaggctcaggcagctctccaaaagctgaaagcagaggaatatgtccaacagaaaagggagctgctcactctataccgtgaccaagaccgggaatcaccatccacccggccaagcactccgtccctcgaagggtctcagtcatctgcagagggacgtacaccagaatttagcacgatcatccctcacctcgttgtcactgaggacactgatgaagatgctcctctagtgcccgatgacacatctgactccggatacgggaccctcatcccaggaacgcccacaggatctcggtccccgctaagtcgtctacggcagagggcactgcgcagagaccctcggctgacattcagcaccctcgagctgcgggatattccattacgcccacatcctccggatccgcaagccccacaacggaggtccgcaccagaacttcccgagggcatcttgaaggggggaagtctccctcaagaagaccctcctacctggtcagaagaggaagacggagcctccgagcgaggcaatgtggtggtggagactttacacagggcaaggctgcgaggacaattaccctctagccccacacatgccgacagcgcaggggagtctccatgggagtcttcaggggaagaggaggaagagggtccactgtttctgaaagctggccatacaagcctgcgccctatgcgcgctgaagacatgctacgggagatcagagaggaacttgcctcgcaacgcattgagggcgctgaggagcccagagacagcaggcccaggaagctgacccgtgcacaacttcagcgaatgcgtgggcctcacatcatccagctggacacgcccctgtccgccagcgaggtgtag

SEQ ID NO: 235187 - DNA, 963 bp, synthetic construct
  misc_feature 1..963: note = Description of Artificial Sequence: Synthetic coding sequence
  source 1..963: mol_type = other DNA
atgtgcccaagggagggcggacgcgcaagtactatccaccagaagactgaaaaagcctttggtcaacttctgtgtcagccccttggtgagcccaagatccagcatccgctgaaagcggctctccagaaactcaaggcggaagaatatgttcagcaaaagcgggaactgctcacattatatcgagatcaggatcgggagtcaccaagcactcggccttcaacacctagtcttgaaggtagccagagctcagccgagggaagaacccccgagttctcaactatcattcctcacctcgtagtgacggaggacacggacgaagatgcgcctctcgtgcccgacgacacaagtgattctggctacgggaccctcattcccggtacaccaacaggtagcaggtctccgctcagtcggctgcgacagcgtgccctccgccgtgacccgagactgacgttttcaaccctggagctccgcgatatacccctccggcctcaccctcctgatccacaggctccccagagacggtcagctccagagctacccgaagggatcctgaaggggggatcactgccccaagaagaccccccaacttggtctgaggaggaggacggggcatccgagcgaggcaatgtggttgttgagaccctgcaccgggcaagactgcggggtcaactaccttctagccccactcatgctgattctgcaggggagtctccatgggaatctagtggcgaagaagaggaggaggggcctctgttcctcaaggccggacacacaagcttacgacctatgagagctgaagatatgctgcgagaaatacgcgaggaactggctagccagcgaattgagggtgcagaggaaccacgggattccaggcctcgcaaactcactagggcccagctgcagagaatgaggggacctcacatcatccagttggatacaccgctgtcagcttccgaggtttag

SEQ ID NO: 235188 - DNA, 2373 bp, synthetic construct
  misc_feature 1..2373: note = Description of Artificial Sequence: Synthetic coding sequence
  source 1..2373: mol_type = other DNA
atgaaagcattcggccctcctcacgaaggcccactgcaaggcctggtggccagccggattgaaacctacgggggtaggcaccgggcatccgcccaatccaccgcaggaaggctctatccacggggatatccggtcctggatcctagccggagacgcctgcaacaatacgttccatttgcccgaggcagtgggcaggctcgaggattgagtccaatgcgcctcagggaccccgagcccgagaaaaggcacggtggccatgttggtgctgggcttcttcacagtccaaaactgaaagagttgactaaggcacacgagcttgaagtgaggctccataccttcagcatgttcgggatgcccagactcccccctgaggatcggagacattgggagatcggtgaggggggtgattctggcctaactattgagaagagttggcgcgagcttgtgcctggtcacaaggagatgtctcaggaactttgtcaccaacaggaggctttgtgggaactgctgaccacagagctgatatatgtgaggaagcttaaaattatgacagacctcctcgccgcaggcctgctgaatcttcagcgcgtgggccttttgatggaggtttccgctgagacactgtttgggaatgttccctctctaatcaggacacatagaagtttttgggacgaggtgctgggtccaactctcgaggaaaccagggccagtggtcaacctctcgaccccatcgggctccaatcaggctttctgacctttggccaacggttccatccgtatgtacagtattgtcttcgggtgaaacagaccatggcatacgctcgggaacagcaggagactaatccgctctttcacgccttcgtccagtggtgcgaaaaacacaaaagaagtggacgtcaaatgctatgtgacttactgatcaagcctcatcagcggattacaaaatacccgctgctgctacatgccgtgctaaagcgttctccagaggcacgggcacaggaggccttaaacgccatgattgaagcggtcgagagttttctcagacacattaacggccaggtgcgacagggcgaagagcaggagtcccttgccgcagctgcccagaggataggcccatatgaagtcctggagcctccatcagacgaggtcgagaagaacctgaggccctttagcacactggacctgacgagcccaatgctaggcgtggcaagtgagcacactcgtcagctattgctagagggcccagtacgcgtgaaggaaggcagggagggaaagctagatgtctatttgttcctgttctcagatgtgctgctggtgaccaaaccgcaaagaaaggctgacaaagccaaagttattcgccctcccctgatgctcgagaagctggtttgtcagcctttgcgggacccaaattctttcctgctgattcacctcactgagtttcagtgcgtgtctagcgccctactggtccattgtccctccccgactgacagagcccagtggttggaaaagacacaacaggcacaggctgccctacagaaactaaaagctgaggagtatgtgcagcagaagagagagctcctcacactgtaccgtgatcaagaccgcgaaagtccgagtactcgcccttctacaccatcccttgaggggtcccagtctagtgctgagggcaggaccccagagttttccacaattattcctcaccttgtggtgactgaagacacggatgaagacgcgcctctggtgcccgacgacacttctgacagtggctacggcactcttattccaggcactccaacggggagccgaagtccactgagtagattgcggcagcgggcactaaggcgcgatccaaggctgacattcagcaccctcgaactacgcgacatcccgctgaggccacatccccctgacccacaggcccctcagcgaagatcagctcctgaactccctgaaggcatactcaagggcggatccctgccacaagaggaccctcctacctggagtgaagaggaggatggtgcctccgaaagaggcaacgtagttgtggagactctccacagagcccgactaagggggcagcttccaagcagtccaacccatgcggattctgcaggggaatccccgtgggaaagcagtggggaggaagaggaggagggccctctgtttctcaaggcaggacacacatctctccgccctatgcgggctgaggatatgctgagagagataagggaggagctcgctagccagcgtatagagggagccgaggaaccacgcgacagtcgtccaaggaagctgaccagagcgcaactgcaaagaatgaggggaccacacataatccagctggacaccccgctgtcagctagtgaagtgtag

SEQ ID NO: 235189 - DNA, 2277 bp, synthetic construct
  misc_feature 1..2277: note = Description of Artificial Sequence: Synthetic coding sequence
  source 1..2277: mol_type = other DNA
atgggctgccgtttacatgcccctggagagaaagctgcgcatgatccatctaggcggaggctgcagcagtacgttccattcgccagagggagcggccaggctcgagggctctcgcccatgagactgcgtgaccccgagccagaaaagagacatggcggtcatgtcggcgctgggcttctccatagcccgaagctcaaagagttaactaaggctcatgagttggaggtgaggttgcacaccttcagcatgttcggtatgccacgcctcccacccgaagatagacggcattgggagatcggagagggaggcgactccggactgacgatagaaaaatcatggcgcgaacttgttcccggtcacaaagagatgtcgcaggagttgtgtcaccaacaggaggcgctgtgggaacttctcaccactgagctaatatatgtccgcaagttgaagattatgacagatttgctcgccgctgggctgctgaacttacagcgggtaggcctcctgatggaggtttccgcggagacgctgttcggcaatgtgcccagcttaattaggactcacaggtctttttgggacgaggtactcgggcctactttggaagaaacacgcgcaagcgggcaacctcttgatcctatcggactgcagtcaggtttcctgacttttggccagcgtttccatccttacgtccaatactgtcttcgcgttaaacaaaccatggcttatgccagagagcagcaggagactaatcctttattccacgcattcgtgcagtggtgcgagaaacacaagcgcagtggacgacagatgctgtgtgacctcctgataaagccccatcagaggattactaaatatcctcttttgctccatgcggtgttgaagagatccccggaggccagggcccaagaggccctcaatgcgatgatagaagctgtagagagctttctgcgacatattaacggacaggtcaggcagggggaggaacaggagtctctggctgctgccgctcagagaatcggcccatacgaggtcctagagccaccctccgatgaagtggaaaaaaatttgcgcccattcagcactctggatcttacctctcccatgctcggtgtggcctccgaacatacacgacagttgctcttggaaggccctgtccgcgttaaagaggggcgtgaaggcaagctggatgtttacctgtttttgttctcagacgtgttattagtgacgaaaccgcagcgcaaggcagacaaagcaaaagtgataaggccccctcttatgctcgagaaattggtgtgccaacccctgcgagacccgaattccttcctgctgatacacttgacagagtttcaatgcgtgtcctcagccctgcttgtgcattgcccaagccctaccgaccgggctcagtggttagaaaaaacccagcaggctcaagcagccctgcagaaattgaaagcggaggaatatgttcagcaaaaacgcgaactgctgaccctttacagagaccaagatagagagagcccgtccactcgaccctcaacaccatccctggaaggcagccagtcttccgcggaggggagaactcctgaatttagcactattataccgcatctcgtggtgacagaggatacagatgaggacgccccattagtccctgatgacacatctgattcaggatacggcacgctcattccaggcaccccgacggggagccgttctccactcagtcgcctgaggcagagagcccttcgcagggatcctaggctgacattcagcaccctggaactgagggacattcccctccgaccacacccccctgatccacaggcacctcagcgaagaagtgcccctgaactccccgagggaattctaaaaggagggagcctgccccaggaggacccaccaacctggagtgaagaggaggatggcgcttccgagcggggaaatgtggtcgtggagaccctccacagggcacgattgagggggcagctgccaagttcccccacacatgccgatagtgctggcgaaagtccttgggaatctagtggtgaggaagaggaggagggacccctctttttaaaagccggacatacatccctccgtccaatgcgggcagaagacatgctgagagagatcagagaggaacttgccagccagaggatagaaggcgctgaagagccacgggactctcgcccacgaaagctgacgcgcgctcagctccagcggatgagagggccacacatcatccagctcgacacgcctctgtccgcatccgaggtctag

SEQ ID NO: 235190 - DNA, 4482 bp, synthetic construct
  misc_feature 1..4482: note = Description of Artificial Sequence: Synthetic coding sequence
  source 1..4482: mol_type = other DNA
atggctgagctgagtgaaccagagggacccgtcgactggaaggagaggtgtgtggctttagagagtcaactgatgaaattccgagtgcaggcaagcaaaataagagaactgctagcggagaaaatgcaacagctggaacgtcaagtaatcgacgccgagagacaggctgaaaaagcattccagcaggtccaggtcatggaggataaactgaaggccgctaacatccagacctccgagtccgaaacacgactctacaataaatgtcaggacctcgaatccctgatacaagaaaaagacgacgtgattcaaaatctggagttgcagctggaagagcagaagcaaatcaggattcaggaggccaaaatcattgaagaaaaagctgctaagatcaaagagtgggtgaccgtgaaactcaacgagctggaactggaaaaccagaatctgaggcttatcaatcagaatcagaccgaggaaatacgaacaatgcagagtaaattacaggaggtacaggggaagaagagctccacggtgtcaacattgaagctcagtgagggccagcgcctgagctcattaacctttggatgctttctgagccgtgctagatcgccgccacaagtggttaaatccgaagagatgagtaagatctccagtaaggagcctgagttcacagagggtaaagatatggaggaaatggaaatcccggaaaaaagcgttgataaccaggttctcgagaacaaccgcggtcagcgtaccctccaccagactccatgcgggtctgagcagaaccgcaaaacgaggacaagcttcgctacagacggcggaattagccagaatagcggagcgcctgtgagcgattggtccagtgacgaagaagacggcagcaaagggagatctaaatctcggtgcacttcaaccttgagctctcacacctcagaggaaggggtccagtgcagcagaatgggcagtgaaatgtacctgacagcaagcgacgattcatcgagtatctttgaagaggaaactttcggcatcaaacgacccgagcacaagaaactgtattcctggcagcaggaagctcagtggaaggcgttaaacagcccattagggaagggcaacagtgagctgtcgaaaaaagaacaggacagcagcagcgacgagctgaataagaagttccagagccagaggcttgactactcaagttcctcatctgaggccaataccccatcgcccattctgacgccggctctgatgcccaagcatcctaacagcctcagtgggaaaggcactcaactggttccgagcagccatttgccgccacctaagctgcgcattcccaatgtgttctctatttcagttgcgctggcaaaaaggcacctgagtcaaccgcaattatccagtgacagaatgtttgggactaatcggaatgctattagcatgattaggcctctgcggccacaggagacagatcttgacttggttgatggagactcaaccgaggtattagagaacatggataccagctgtgatgacggcctcttctcatacgactcgctggatagtcccaacagcgacgaccaagaacactgtgactcagcaaaaaaggtggcttacagcaaaccccctacacccccactccaccgcttccctagttgggagtcacgtatttacgcagtggccaaaagtggcatcaggatgtcagaagcttttaatatggaatctgtaaacaaaaatagtgcggctacgcttagctacaccacatctggtctgtacacaagcctaatttataaaaacatgacaacacccgtgtataccaccttaaagggtaaagccactcaaatctcatcatctccatttcttgacgatagcagtggatccgaagaggaggattcatccaggtcttcgtctagaacatcagagtccgactcgcgctcccgctccggcccaggaagtcccagggccatgaagagaggggttagtctatccagcgtagccagcgaaagcgactatgccatccctcctgacgcctactccaccgatacggaatactcgcagcctgagcagaagcttccaaaaacttgttcgtctagctccgataatggtaagaacgaaccactggagaagtctggatacttgttgaagatgtccgggaaggtaaaaagttggaaacggagatggtttgtgctaaaagggggtgaactcctgtattataagtccccctcggatgttatccgaaaaccgcaggggcatatcgagctgtctgcatcttgctctatccttagaggcgataataagcagactgttcagctgactaccgagaaacacacctattatctcaccgcagactcccccaacattttagaggagtggatcaaagttctgcagaacgtcttaagagtccaggcagcaaacccgctgtctttgcagcccgaaggtaaacccaccatgaagggcctgcttacgaaggtcaaacacggatacagcaagagagtgtggtgcacccttataggcaaaacactttattattttcgatcccaagaggataaattcccactgggccagatcaagctgtgggaggctaaagtggaggaagtcgataggagctgtgactcagatgaggattatgaagcttccggcagatccctacttagtacgcattatacaatcgtgattcatccaaaggatcagggacctacatacctcttgattggctctaaacatgagaaagatacatggctttatcacctgacggtggctgctggatccaacaacgtgaatgtcgggagtgaatttgagcagctcgtatgtaagctccttaacatagatggggagccaagcagccagatttggcggcatcctaccctttgtcatagtaaagaagggatcatatctcccctcacgaccctgccaagcgaagcattgcagacggaggcaatcaagctgttcaaaacatgccagttatttattaatgccgctgtcgactctccagcaatcgattaccatatctccttagctcaatcggcgctgcagatctgtctcacccatccagagctccagaatgagatttgctgtcagctcataaagcaaactcggcgtcgccagccgcagaatcagcccggtcctttgcagggatggcaattgctggcattgtgtgtgggcctgtttctcccccatcatcccttcttatggctcctgcggctgcacttgaaacgcaacgccgactccagaacagagttcggtaaatatgccatatattgccagcgctgcgttgagcggacacagcagaacggggacagagaagcaagaccatcccgcatggaaatcttatccaccctgctgcggaacccttaccatcattccttaccattttccatccccgtgcacttcatgaatggtatttaccaagtcgtgggctttgacgccagcacaacggttgaggagttcctcaataccctgaatcaggacaccggaatgcgaaagcctgcccagtcgggttttgccctgtttaccgacgatccaagcgggcgtgatctagaacattgcctgcagggcaacataaaaatctgtgatattattagcaagtgggaacaggcctccaaagagcagcagcccggtaaatgcgagggaacccgaacagtgcgtctgacctacaagaatagactgtacttctccgtccaggcccgaggcgagacagacagagagaagctactactgatgtaccagactaacgaccagattattaacgggctcttccccctgaacaaggatttggcgcttgagatggctgcattgttgagtcaggtggaaataggggatttcgaacggcctttctcaacccccgcaggtcatgttacaaaccaatgcaaagtgaaccaaactctcaaacaggtcattgaaaagttctatcccaagaggtatcgggacgggtgttcagaagagcagctgcgccagctatgccagcggctgagcactcgctggatggccttgaggggacattctgctgccgactgtgtgagaatctatttgacagtggccaggaagtggcctttcttcggcgctaagctcttccttgcgaagcctatcacacctagttccttggggtctactttcctgtggcttgccgtgcacgaagacggcctgtcactccttgagtataacagcatgagactcatagtgagctacgtgtataaaagcctgatgacttttggaggctatcaagatgactttatggtcgtgatcaataacacacattcaaaggataagcctacggagaagttacttttcgcgatggctaagccaaagatcctggagattactcttctgattgcttcatacataaataacttccaccagcagaaggctgccttccatcatctgagtgctccggcactgctgtccgctcagactcggggacctcaggcacgcatgatgggttcgcagcctttgctctcatccagtcgcccaacaaagggtcccaccctgctatag

SEQ ID NO: 235191 - DNA, 2904 bp, synthetic construct
  misc_feature 1..2904: note = Description of Artificial Sequence: Synthetic coding sequence
  source 1..2904: mol_type = other DNA
atggattggacccctcgcctaccttcccgtcatataatctcagaactggaacatcttacctttgtcaacacggatgttggccgatgtcgcgcttggctcaggttagcgctgaacgacgggctcatggagtgctatctcaaactgctgctccaggaacaggccaggctgcatgagtactatcaacccaccgccctccttcgggacgctgaggagggagagttcctgctgtcgttcctgcaggggttgaccagcctctcatttgaattaagctacaagagtgctattctgaatgaatggacattgacccccctagctctctccgggctttgtccactgtctgagttggatcccctgagcacttctggggcagagttgcagcgaaaagagagtctcgattcaattagtcattcatccggttcagaggatatcgaagtgcaccacagcggccacaaaataaggaggaatcaaaaactgacagcatcttctctgagccttgataccgcttcttcctcacagctctcatgctccttgaactcagactcctgcctgctccaggagaacggctccaagtcacccgatcattgcgaggagcctatgtcctgtgattccgacctcgggactgcaaacgctgaagatagtgatagaagtcttcaggaggtgctgctcgaattctcaaaggcacaggtgaattctgtgccaactaatggcctgtctcaggagactgagatcccaaccccccaggccagtcttagcttacacggacttaatacatctacatacctgcactgcgaggcccctgccgaacccctgccagcccaggctgcttctggaacacaggacggcgtccacgtgcaggagccacggcctcaagcgcctagtcctctcgatttgcagcagcctgtcgaatccactagcggccagcagccatcttcaaccgtctccgaaactgcgcgagaagtaggtcagggcaacggattgcagaaggcacaggcgcacgacggtgccggactgaaactagtggttagttctcctactagccccaaaaataaatcttggatatctgaggacgacttctatcgcccaagccgagaacaaccactagagtccgctagcgaccatcccatagcgtcttaccgaggaacacccggatctcgccctggcttacaccgccatttcagtcaggagccgcgtaaaaactgcagccttggcgctcttgaccaggcctgtgtcccatcacctggacgacgtcaagcccaggcagccccatcccaaggacataagagctttcgtgtagtgcaccgcagacagatggggctgtccaacccattcaggggcctgatgaagctgggtacagtcgaacgtagaggggcaatgggcatttggaaggagctgttttgcgagctgtcccccctggagttccgcctttacttgagcaacgaagagcacacatgtgtagaaaactgttccctgctgcggtgcgagagcgtggggccagcacattctgatgggaggtttgagctggtattctccggcaaaaaactggcactgcgggcttcttcacaggatgaggcggaagattggcttgacagggtgcgagaagcactccagaaagtcagaccccagcaggaggacgaatgggtgaacgttcaatacccagatcaacctgaggagcctccagaggcgcctcagggttgtttgtctccttccgacttactttctgaaccagcagctctgcaaggaacacagttcgattggagcagtgcgcaggttccggagcccgatgcgatcaaagagtcactgctctatctctacatggatcgcacgtggatgccgtatatattcagcctatccttggaggctctgaagtgttttcgcataagaaataacgagaagatgctgtctgactctcacggcgtcgaaacgatccgggacattcttcctgatacaagcttaggtggtccttcattcttcaaaatcataacggcgaaggcagtccttaagcttcaggccggtaacgcagaggaggccgcactgtggcgcgatctggtgcggaaagttcttgccagctacctagagacagccgaagaggcagttactctgggtgggagcctggacgagaactgtcaggaggtcctgaaattcgctacaagagaaaacggtttccttctgcagtacttggtggctattcctatggagaagggacttgattcccagggatgtttctgcgcaggctgctcacggcagatcggctttagttttgtgaggccgaagctgtgtgcattctcaggcctatactattgcgatatatgtcatcaggatgatgcgagcgttatccccgctcgcatcattcataactgggacttgacgaagagaccgatctgcagacaggctctaaagttcctcacacagataagggcccaaccactaatcaacttgcagatggtaaatgcctctttgtacgagcacgttgaacgcatgcacctcataggaagacgaagagaacagttaaaactcctgggagactatctcgggctctgcaggagtggcgctcttaaggagttgtctaagagactgaatcacaggaactacctgcttgaaagtccacatagattttcagtggcggacctccaacaaattgccgacggtgtgtatgagggatttctgaaagctttgattgagtttgccagccagcatgtttatcattgcgacttatgcactcagcgtggtttcatttgccaaatttgccagcaccacgacatcatctttccctttgagttcgacaccacagtgagatgcgccgaatgcaagacagtgtttcaccagtcttgtcaggccgtggtgaagaagggttgtcctcgatgtgccagacggcgtaagtaccaggaacagaacatcttcgcctag

SEQ ID NO: 235192 - DNA, 3171 bp, synthetic construct
  misc_feature 1..3171: note = Description of Artificial Sequence: Synthetic coding sequence
  source 1..3171: mol_type = other DNA
atgcttagtgtggtggagaacggactggacccccaggccgcaattcccgtgatcaagaaaaaattagtgggcagtgtgaaggctcttcaaaagcagtacgtcagcctggatacagtcgtcacaagcgaagacggggacgccaatacgatgtgttctgcactagaagccgtgttcatccatggacttcacgctaagcacatccgcgctgaagcgggtggtaaaaggaagaaatccgcccaccagaaacccctcccacagcctgtgttttggccactgctcaaagcagtgacacataaacacataatcagcgagttggagcacctgacgttcgttaacaccgatgtgggcagatgccgtgcttggctgcgcctggcgctgaatgacggtctaatggagtgctaccttaagctcctgcttcaggaacaggctagactgcacgaatactatcagccaaccgcattactcagagacgctgaagaaggcgaatttttgctctccttcctgcaggggctgacttcactgtcatttgagctcagttacaaaagcgcaatcctgaatgagtggaccctgacccccttggcactgtctggtttgtgcccactgtccgaactggatccactttctacatccggagccgaactccagagaaaggagagccttgacagtatatcccactcttctgggtcagaagatatcgaggtacaccactccggccataagatcagaaggaatcagaaactcactgctagcagtttgtcactggacaccgctagcagttcccagctatcatgctcccttaatagcgactcatgtttgttacaggaaaacggctccaagagtcctgatcattgtgaggaacctatgtcctgcgacagcgacctagggaccgccaatgccgaagattcagaccggtctctgcaggaggtcctgctcgagttctccaaggcccaagtcaattctgttccgactaatggactctcccaggagacagaaatcccaacaccccaggccagcctcagcctacatggtctgaacacatctacctaccttcactgtgaagccccagccgagcctctacctgcacaggctgcttcgggcactcaggacggcgttcacgtgcaggaaccaaggccgcaggccccatcccctctcgacctccagcaaccagtcgagtctacttctggacagcagccaagctccacagttagcgaaaccgcacgggaagtgggtcaggggaatggtctgcagaaagcacaggcccacgatggcgctggattgaagctcgtggtgagctccccaacaagccctaagaataaatcatggatctccgaggatgacttctatcggccttctagagagcaacctttggagtctgcctcagatcaccccattgcttcctacagaggcactccaggctctaggcctgggctccaccgccacttttcccaagaacctaggaagaattgtagtcttggggctctggaccaagcctgtgtcccttcgccagggcgacggcaagcccaggccgctccaagtcaaggtcacaaaagctttagggtcgtgcaccggcgacaaatgggcctatcaaatcctttcagggggctcatgaaacttggtacggtcgaaaggagaggagctatgggcatctggaaagagcttttctgcgagctctcaccattagaatttcgcctgtatctgagcaacgaagagcatacttgcgtggagaattgtagtctcttacggtgcgagtcagtagggcctgcacattccgacggtagattcgagctcgtttttagcgggaagaagctagcccttcgcgcatcctctcaggacgaggcagaagactggctggatagggtgcgggaagctctccagaaagttcggcctcagcaggaggatgaatgggtaaatgtgcagtatccagaccagcctgaggagccccctgaagcccctcaaggctgcctaagtccctctgacctgctgtcggagccagcggcattgcagggaacacagtttgactggtcttcagcacaagtgcccgaacccgacgcgataaaggagtctctgctctacctctacatggatcgaacttggatgccctatatcttttcactctcactggaagccttgaagtgttttagaataagaaataacgagaagatgctgagtgactctcatggtgttgagaccatcagggatatactccccgacaccagcctcggtgggccttccttcttcaagattatcaccgccaaagctgtccttaaattgcaggccggtaatgcagaagaagctgccttgtggcgcgaccttgtcaggaaagtactggccagctacctcgaaaccgccgaggaggccgtgacgctcggcggttccctggacgagaactgccaggaagtgctgaaatttgctacccgagagaatggatttctgctgcagtatctagttgccatacctatggaaaaagggctcgattcacaaggatgcttttgcgccggttgttccaggcagatcggatttagctttgtcaggccaaaactgtgcgcattctccggcctgtattattgtgatatctgccatcaagacgacgcatccgtaatcccagccagaatcatccataattgggacctcacaaagcgtccaatctgccgccaggctcttaagtttctcacccaaatccgcgcacagcctctcatcaatctccagatggtgaacgccagtttgtatgagcatgttgaacgaatgcacctcattgggaggaggcgtgagcaactgaagttgctaggcgactacttggggctgtgccgttccggagctctgaaggaacttagcaagcggctcaatcatcgaaattacctgctcgaaagccctcatagattctccgtcgcagatttgcagcagatcgctgatggagtgtacgaaggattcttaaaggccctgattgagttcgcatcacagcacgtgtatcactgcgacctgtgtactcagagaggctttatctgccagatatgtcagcaccatgatatcatattccctttcgagtttgacaccacagttcgatgcgccgaatgcaagaccgtgtttcatcaatcctgtcaagcggtggtgaaaaaaggctgcccacggtgtgccaggaggcgcaagtatcaggaacagaatatctttgcatag

SEQ ID NO: 235193 - DNA, 3003 bp, synthetic construct
  misc_feature 1..3003: note = Description of Artificial Sequence: Synthetic coding sequence
  source 1..3003: mol_type = other DNA
atggtggaatgtttcgagtctggaggaactaggcttagcctgtcctcttttaacgtatcatgcgattcgctgagggagcagctccgagagtggaggtgctttcagtggtggcgcatggattggactcctaggctgccctctcggcatatcatctcagaactcgagcacctcacctttgtcaacacggatgtggggaggtgtcgggcttggcttcgacttgcattgaatgacggtctaatggagtgctatttaaagctcctgttacaagaacaggcgagactacacgaatactatcaacccacggctcttctccgggacgcagaagagggggagtttttactgtcttttctgcagggccttacttccctgtcattcgagctgagctacaagtcggccatcctgaacgagtggactttgaccccattggcactttcggggttgtgccctcttagcgagcttgatcctctctccacttctggcgcagagctacagaggaaagaatcgctcgacagcatcagtcacagctccggctcggaagacatcgaggtacaccacagtggtcacaaaatccgcaggaaccagaaattaactgctagctccctttcgctcgacaccgcctcttctagtcagctgagttgttcgctgaactcagattcgtgcctgcttcaggagaacggcagcaaatcaccagaccattgcgaggagcctatgtcatgtgatagcgatctgggcacggcaaatgccgaggatagcgaccgaagtctccaggaagtcctgttggagttttctaaagctcaagtgaatagtgtccccaccaatggactttcccaagagaccgagatacctaccccgcaagcctcactgtcactccacggattaaatacctctacgtacctgcattgcgaggcacccgcagagccactccctgcacaagccgctagtggaacgcaggacggagtgcatgtgcaggaacccagacctcaagctccctcgcccttagacctgcagcagccagtggagagcacctctgggcaacagccctcttcgaccgtgtccgagacagccagagaagtaggtcaaggcaatggtctccagaaggctcaagcgcatgatggtgcaggacttaaattagtcgtaagctctcctaccagcccaaagaataaatcatggatttcggaggatgatttttacagaccttcccgtgaacagccactggaatccgcttctgatcacccaattgccagctaccgaggcactcctggttcacgcccaggcctgcacagacacttttcccaggaaccccgaaagaactgttcgctgggagcactcgatcaagcatgtgtgccttcacccggacggagacaagctcaggccgctcctagccaggggcacaaaagctttcgcgtggtccatcgcagacagatgggtctgtctaatcctttccgtggtctgatgaaattggggaccgtggaacgccgaggggctatgggtatctggaaggagctgttctgtgaactcagccccctggaattcagattgtatctaagcaatgaggaacatacctgcgtggagaactgcagtttgctccgctgcgagtccgtcgggcctgcccacagcgacggaagattcgaactcgtgttctcagggaaaaagctggctctccgcgcatcttcacaggatgaggcagaggattggctggatcgtgttagagaggcacttcagaaagtccgaccacagcaggaggatgagtgggttaacgtgcagtacccagatcagccagaagagcccccagaagccccacaggggtgcctatctcccagcgacctgttgtccgagccagccgcactacagggcactcaatttgactggagctctgcccaagtcccagaacccgacgctattaaggagtcactcttgtatttatatatggatagaacttggatgccctatatcttctccttatctctggaggcgttgaaatgctttcggattagaaacaatgagaaaatgttgagcgactctcacggtgtggagactataagggacatactccctgacacctcattagggggaccttcctttttcaagattattacggcaaaggctgttctgaaactccaggcagggaatgccgaggaggctgccttgtggagagacttggttcgcaaggtgctggcgtcttatttagaaacagccgaggaggctgtaactttgggaggatcattggatgagaattgtcaggaggtgctgaaattcgccactcgcgagaacggtttcctgctccagtatttggtggccatcccaatggagaagggtctcgattcccagggctgtttttgtgctggatgcagcagacaaattggcttctcgttcgtacgacctaaactctgcgcgttcagcggcctctactattgcgacatttgtcaccaggatgacgcaagcgtaattcccgcacgcataatccacaactgggatcttacaaagcgacccatctgtaggcaggcactgaaattcttaactcaaattagagcccagccattaataaatttacaaatggtgaatgcctctctgtacgagcacgtagaacgtatgcacctcatagggaggcgtcgggagcagctcaagttgctaggtgattaccttggtctatgcagatctggggctctgaaggaattgtccaaacgacttaatcatcggaattatctgctagagtccccccaccgttttagcgttgccgacctccagcagatcgctgacggtgtttacgagggctttagccccaaagtgccaagtgaggccgcaggattaagaccgtggggagcccgatcccctgaagcagcatccgcgttccgatgcatcgattcgagccggctgccaagcctgcgaaaggtggtgccgactttgtttcttaaatgctattttatgcaatatacagtgccctccgaacagggatccggtcccgaggaatctcttcagtgcatcgaaggcatagccgcagtttag

SEQ ID NO: 235194 - DNA, 5466 bp, synthetic construct
  misc_feature 1..5466: note = Description of Artificial Sequence: Synthetic coding sequence
  source 1..5466: mol_type = other DNA
atgagttgcgagagaaaaggtttgtctgaactccgaagtgagctgtactttctgatcgcccgattccttgaggatgggccttgtcaacaggctgcgcaggtactcatccgagaggtggcggaaaaggagttgctccccagaagaaccgattggacagggaaggaacatccgcgaacttaccaaaatttagtgaagtattatcgacacctggctcctgatcatctgctgcagatttgccacagactcggaccgctgcttgaacaagaaataccccaaagtgtgcccggagtccagaccttgttaggagctgggaggcaatcactgctccggactaacaagagctgcaaacacgttgtgtggaaggggtctgccttggcggctctgcattgcgggagacctccagagtcccctgtgaactacggctcccccccatcaatcgcagataccctattttcacgcaagctcaatggaaaataccgattggagagactcgtgcctactgccgtctatcagcacatgaagatgcacaaacgcatcctggggcacctgtcctcagtctattgcgtaacctttgacaggaccggacggagaatcttcactggatccgacgattgtttagtgaaaatctgggcaactgacgacggcaggctcctcgccacattgaggggccatgcggcagaaatcagtgatatggcagtgaactacgagaatacgatgattgctgcaggttcgtgtgacaaaatgatccgagtatggtgcctgaggacctgcgcgcctctcgctgtgctacaaggacactccgctagcatcacttctcttcaattttctccactgtgtagtgggagtaaacgctacctgtcatctactggcgcagatgggacaatttgtttttggctttgggacgcaggcaccctgaaaatcaaccctaggccagccaagtttacggaaagacccaggccgggagtgcagatgatttgcagttcattcagcgccggaggtatgtttcttgctacgggcagcacagaccacataattcgagtttatttctttgggtctggccagcccgagaaaatctccgagcttgagttccatactgacaaagtcgactcaattcaattctcaaacacctctaacagattcgtgtcagggagccgcgatggtaccgctcggatctggcagttcaagagaagagagtggaagtctattctcctggacatggcgacgaggcccgcagggcagaatctgcagggtatcgaggacaaaatcacaaaaatgaaggtcaccatggtagcctgggataggcacgataacaccgttattaccgcagtaaataatatgactctgaaggtgtggaatagttatacaggccagcttattcacgtgcttatgggccatgaggacgaggtgttcgtgttggagcctcatccctttgacccccgtgtgctctttagcgccggacacgacggtaacgttatagtttgggaccttgcaagaggcgtaaagatacgtagctacttcaatatgatcgagggccagggccacggcgcagtgttcgattgtaagtgcagtcccgatggtcaacacttcgcttgcaccgattcacatggacaccttctcatcttcggcttcgggtctagtagcaagtacgacaagatagccgatcaaatgttttttcattctgattatcgtccactgatcagggatgccaacaacttcgtgttggacgagcagactcagcaagctccccacctgatgcctcctccgtttctcgtggacgtggacggtaatccgcatccttcacggtaccagcgccttgtgcccggacgagagaattgtagggaggagcagttgatccctcagatgggagtgacttcttccggactgaatcaagtactatctcagcaggccaatcaagaaatcagcccactggacagtatgatccagcggcttcagcaggagcaggacctgcggcgtagtggcgaggccgtgatctccaatacttccagactgtctcgcggtagtatttcttcgacatccgaagtgcatagtcctccaaacgtggggcttaggcgctccgggcagatcgagggtgtcagacaaatgcactcgaatgcacctcgatctgagatcgcaacggaaagagatttagttgcctggagtcgtagggttgtggtgccagagttaagcgcaggcgtggcctcaagacaggaggagtggaggacagccaaaggtgaagaggaaatcaaaacctaccgcagcgaagagaaacggaagcacctgaccgtgccaaaggagaataaaatcccgacggtctctaagaatcacgcccatgagcacttcctcgaccttggggaatccaaaaaacaacagaccaaccagcacaattaccgcacccggagcgccctggaggagacccctcgaccaagtgaagaaattgaaaatggctccagctccagcgacgagggggaagttgtcgccgtctctggcggaacatcagaggaagaggagcgcgcatggcattcggatgggagcagctccgattacagtagcgattatagcgactggactgccgacgcaggaatcaatcttcaacctcccaagaaagtgccaaagaacaaaaccaagaaggcagaatccagctcagatgaagaagaggaaagcgagaagcaaaagcagaagcaaattaaaaaggaaaaaaagaaggtcaacgaagagaaggatgggccaataagcccaaaaaagaagaagcccaaagaacgtaagcagaaaagactggccgtaggtgaactcactgagaacgggctgaccttagaggaatggctccccagcacttggatcaccgacacgattcccaggagatgtcccttcgtaccgcagatgggagacgaggtgtattatttccggcaggggcatgaggcctatgttgagatggccagaaaaaataagatctactcgatcaaccccaagaagcagccatggcacaaaatggaactccgcgagcaagaactcatgaaaattgtggggataaagtacgaagtgggcctgccaactctgtgctgtctcaagcttgcatttctggaccccgacacaggtaaactcacaggcggaagctttacaatgaagtaccacgacatgcccgatgttatcgattttcttgtgctgcgacagcagttcgatgacgctaagtaccgacgttggaatattggagaccgcttcagaagtgtgatagacgacgcgtggtggttcggcactattgagtctcaggagccgctgcagctagagtaccctgactctctgttccaatgctataatgtgtgctgggacaacggagatacagagaagatgagtccttgggacatggaactgatccctaataatgccgtgttccctgaggaactcggtacgtctgttcccctgaccgacggagagtgtcgctcccttatctataagcccttggatggcgagtgggggactaaccccagggacgaggagtgtgaaagaatcgtggctggaatcaaccaactcatgaccttggacattgcatctgccttcgtggctcccgttgacctgcaggcctaccccatgtactgcaccgtcgtggcatatcctacagacctctcgactataaaacagaggctggaaaaccgcttctacaggagagtctcttcccttatgtgggaggtcaggtacatcgagcacaacacccgtacatttaacgaaccaggcagccctatcgtgaaaagtgcaaaatttgtgaccgacctgctcctgcacttcatcaaggatcagacatgctataatatcattcccctgtataacagcatgaaaaagaaggtgctttccgacagtgaagacgaagagaaggatgctgatgtgccgggaacctctactcgtaagcgcaaggatcaccagccaagacgccgactgcgcaacagggcgcagagctacgatatccaagcctggaaaaagcagtgtgaggaacttcttaatcttattttccagtgcgaggattcagagcccttccgacagcctgtagatctgttggagtatccagattaccgggatatcatcgatactcccatggactttgcgacggtaagggagacactcgaggcaggcaactatgaaagccccatggaactgtgcaaggatgtaaggctgatttttagtaacagcaaagcctatacacccagtaaaaggagtcggatttacagtatgtctctgagactatccgctttcttcgaagagcatattagcagcgtactcagcgactacaagtccgctctccgatttcacaagagaaataccattacaaaacggagaaagaagaggaatagatcttcatctgtgtctagctccgcggctagttcgcctgagagaaagaaaaggatcctgaagccgcagttgaaatccgaaagctcaacctctgcgttcagcaccccaacccgatccattcctcccaggcacaacgcagcacaaatcaacggaaagaccgagagcagtagcgtcgtacgtacgcggtccaaccgagtcgtggtggaccctgtggtgactgaacagccctcaacgtcctccgcagccaagactttcattacgaaggctaatgcatccgccatccccggaaagacgatcctcgaaaacagcgtgaagcattccaaggcactgaacacattatcctctccaggacagagcagtttttctcacggtacacggaataattccgccaaggagaacatggaaaaagagaagccggttaaaagaaagatgaagagctccgtcttacccaaagccagcactctgtctaaatcttcagccgtgatcgaacagggcgattgcaagaacaatgctctagtgcctggtactatccaagtcaatggtcacgggggacagccttccaaattagttaaaagaggcccaggtcgaaagcctaaggttgaggtgaataccaactctggcgaaatcatccataaaaagcggggacgcaaacccaaaaaacttcagtacgccaagcctgaggatctggagcagaacaacgtccaccccatccgcgacgaagtactgccatctagcacatgcaactttctgtccgagacaaataacgtaaaggaggacctgctgcagaagaagaatagaggaggaagaaagccaaaacgaaagatgaaaacacagaagcttgacgcggatctgctggtgccggcatcagtcaaagtgctgcggcgaagcaatcgcaagaaaatcgacgatcccatcgacgaggaagaggagtttgaagaactgaagggatctgaaccacacatgcgcactaggaatcagggacgcagaaccgcattttacaatgaagacgatagtgaggaggagcagcgccagctgctctttgaggacacgtctcttactttcggaacctcatctcggggaagggtgaggaagttaacagagaaagccaaagctaacttgattggctggtac

SEQ ID NO: 235195 - DNA, 1197 bp, synthetic construct
  misc_feature 1..1197: note = Description of Artificial Sequence: Synthetic coding sequence
  source 1..1197: mol_type = other DNA
atgaagaagaaggtgttgtctgactctgaggatgaagagaaggacgcggacgttcctggcacatctacccggaagaggaaagaccaccagccgcgtcgacgactcagaaatcgcgctcagtcatacgacatccaggcctggaagaaacagtgtgaagaacttttgaatctgatttttcagtgtgaggacagcgagcctttccgacagcccgttgatctcctggaataccctgactaccgcgatattattgatacgcccatggactttgcaaccgtacgggaaaccctggaagctggaaattacgagtcccccatggagttgtgtaaggatgttcggcttattttcagcaactccaaagcctataccccctcgaagcgctctcggatttattctatgtcgctgagactttcagcctttttcgaagagcatatcagtagcgttctgtctgactacaagagcgcccttcggtttcacaagcgcaatacgataacgaagcgcagaaagaagcggaataggagttcatctgtctcatcttcagctgccagctcgcctgagcggaagaaaaggattcttaaaccccagcttaagagcgagagcagcacaagcgcattcagtactccaacccggtctatcccccctcgccacaatgcagcacagatcaacggcaagaccgagtcctcttcagtggtgcggacacggtccaatagggtggtagtggatccagtcgtgacagagcagcccagcaccagctccgcagcaaaaacttttattactaaggcgaatgcctcagctatcccaggcaaaacaattctcgagaacagtgttaagcacagtaaggccctgaatacactgagttcacctggtcaatcatccttcagccacgggacgagaaataactcagccaaggagaacatggagaaagaaaaacccgttaagcgcaaaatgaaaagtagtgtgctgcctaaagccagtacactgtcaaagagctccgctgtaattgagcagggcgattgtaaaaataatgctctggtgcccggaacaattcaggtgaatgggcacggtggacaaccatccaagttagttaagagggggccaggaaggaagcctaaggtggaagtgaatatcgtggtcaaactgtataccaggaagggagtcgaatccccaaagagctactcaatgcaatcacaaaagatctag

SEQ ID NO: 235196 - DNA, 1206 bp, synthetic construct
  misc_feature 1..1206: note = Description of Artificial Sequence: Synthetic coding sequence
  source 1..1206: mol_type = other DNA
atgcgcagggctcctgctgccgagaggctgttagagctgggtttcccccctcggtgcggtcgccaagagcctcctttccctttaggtgtcactagaggctggggccgttggcccatccagaaacgtcgcgagggagcgaggccagtccctttttccgagaggtcccaagaggacggcagaggaccggcagctcgttcctccggtactctttggcgaattcggacaaggttgagcctgtgtagggatcccgaaccgccacctcccttgtgtctcctgcgagtgagcctcttgtgcgccctgcgtgcagggggaaggggcagtcggtggggagaggatggtgcgagactgcttctcctcccccctgctagggcggcaggtaacggagaggccgagccatcagggggacctagctacgccggaaggatgctagaatcctctggctgtaaagcgctgaaggaaggggtactggaaaagcgatccgatggcctgttgcagctgtggaaaaagaagtgttgtatcctgaccgaggaaggtctgctgctgatcccccctaaacaattacagcatcagcaacagcagcagcagcagcagcagcagcagcaacagcaacagcctggacagggacctgccgagccgtcgcaacccagtggccctgctgttgcgtccctggagcctccagtgaagctgaaagaactccatttcagcaatatgaagactgttgactgtgttgagcggaaggggaaatatatgtactttactgtagtcatggcggaggggaaggaaattgactttcgctgccctcaggaccaagggtggaacgctgaaattactttacagatggtccagtataaaaacaggcaggctattcttgccgtcaaaagcacaagacagaaacagcagcatttggttcaacaacagcctccttctcaaccgcaacctcagccccagttacagcctcagccccagccacaaccacagccccagccgcagccacaaagccaaccgcagccccagccccagcccaagccacagccacagcagttacatccttatcctcacccacatccccacccacacagccacccccatagccacccacacccccatcctcacccacacccccaccaaatcccacaccctcacccacagccacatagccagcctcacgggcatcggctgctgcgcagtacttccaattcggcctag

SEQ ID NO: 235197 - DNA, 660 bp, synthetic construct
  misc_feature 1..660: note = Description of Artificial Sequence: Synthetic coding sequence
  source 1..660: mol_type = other DNA
atgctcgagtcgagcgggtgtaaagcccttaaggagggcgttttggaaaagagatcggacggactgctgcagctgtggaaaaaaaagtgctgtatcttgaccgaagaagggctcctcctcattccccctaaacaactgcagcaccaacagcagcagcagcagcagcagcagcaacagcagcagcagcagcccggtcagggaccggctgaaccatcccaaccatctggaccagccgttgctagtctggagcccccagtcaaattgaaggagctgcacttctctaatatgaagaccgtggattgtgtggagcgaaaaggtaagtatatgtacttcactgtggttatggccgagggaaaggagatcgatttcaggtgtccgcaggatcagggttggaacgcagagataaccctacagatggtccagtataagaacagacaggccatcctggctgtgaagagcacacgacagaagcagcaacatctcgtccagcagcagcttcacccatacccccatccccaccctcacccccacagccaccctcattcccacccacatccacacccacacccccatccccatcagatcccccatccgcaccctcagcctcatagccagccacatggacacaggctgctgcgatctacaagtaactccgcctag

SEQ ID NO: 235198 - DNA, 459 bp, synthetic construct
  misc_feature 1..459: note = Description of Artificial Sequence: Synthetic coding sequence
  source 1..459: mol_type = other DNA
atgaagtccccagacgaagtcttacgggaaggagagctcgaaaaacggtcggacagcctatttcagctatggaagaagaaacggggtgtattaacctctgatcgactttccctctttcctgcatctcccagggcacgccctaaagagctgcggttccactctattttaaaggtagattgcgtggagcggactggaaaatacgtctatttcacaatcgtaacaaccgatcacaaggaaattgacttccggtgcgccggtgagagctgctggaacgctgccattgccctggctttgatagactttcagaatcggagggccctgcaagactttcgatccagacaagagcgcaccgcccctgcggcaccggctgaagacgcggtggccgctgctgctgcggcaccctctgagccgagcgaaccttccagaccttccccacagccaaaacctcgaaccccgtag

SEQ ID NO: 235199 - DNA, 3960 bp, synthetic construct
  misc_feature 1..3960: note = Description of Artificial Sequence: Synthetic coding sequence
  source 1..3960: mol_type = other DNA
atggacgcacttaatcgaaaccaaatcggccctggctgccaaacacaaacaatggttcagaaaggcccactggacctgattgagacgggcaaaggcctgaaggtgcagaccgataaaccacatctcgtgagcttagggtccgggaggttgtctaccgccatcaccttacttcctctcgaggagggcagaactgtcattggcagtgccgctcgcgatatcagtcttcagggtcccggtttagctcctgagcactgctatattgagaatttgcgcggtacactcaccctctacccatgcggaaatgcctgtacaatcgacggactaccagtccgtcaacctactaggctaactcaagggtgtatgctatgtctgggacagagtactttcctccgtttcaaccatccagcagaagcgaaatggatgaagtccatgatacctgccggaggacgcgcacctggacctccttattcacctgtgcctgcagaatccgaatccttagtcaatggcaaccacaccccacaaacggctacccgcggacctagtgcctgtgcgagtcactcaagcctggttagcagtatcgagaaggatttgcaggaaattatggatagcctggtacttgaagagccaggcgcagctgggaagaagccggcagcgacttctcccctgtcaccgatggctaacggtgggaggtatctgctcagtccccctacgagcccaggggctatgagcgtcgggagctcctatgaaaacaccagtcctgctttcagtcccttgtcctcacctgcaagcagcgggagctgtgctagccactcaccctcaggccaagaacctggtccttctgttccacctctcgttccggcacgctcgtcctcataccatcttgctctccagcctccgcagtcacggccttcgggggcacggtcggagtctccgagattgagccgcaagggcggacacgaacgtccaccctctccaggactgagagggcttctgacggactccccagccgctacagttttggcagaggctagaagggctacagagtcgccacggctgggcggacagttgcccgtggtggccatctccctaagcgagtacccggcaagtggagccttatcacagcccacctctattcccggttctcccaaattccagcccccagtgccagcgcctcgaaacaaaattggcacacttcaggaccggcctccatctccctttcgcgagcctcccggaagtgaacgcgttctgaccaccagccccagtcgacagctcgttggcagaactttctcagacgggttagctactcgcacgcttcagcccccagagtcaccaaggcttggacgcagaggcttggactccatgcgcgagttgccccctcttagcccttccctcagtagaagagccctcagtccacttccgacacgtacaactccagatcctaagttgaatcgggaagtggctgagtcacctcgccctcgcagatgggccgcacacggggcttctcccgaagatttttcattgacactgggcgcacgtggaaggagaacgcggagcccgtcccctacactgggcgagagcctcgctcctcacaaagggtcattctccggaagactgtcacctgcctactccctaggttctctgacaggcgcaagcccatgccaatctccatgtgtccagcgcaaactgtcctcaggggatttacgtgtgcctgtcacaagggagaggaaaaatagtatcaccgagatttccgacaacgaagatgatcttctggagtaccatcgtcggcagcgacaggaaaggttgagagagcaggagatggagcggttagaaagacagcgccttgaaacgattttgaacctctgcgctgagtatagccgggcagatgggggaccagaggcaggcgaattgccttccattggtgaggctaccgcagctttagcactggcagggagacggccttcacggggactagccggagctagtggtagatcttctgaagagcctggagtggccacacagcggctctgggaatctatggaacgatctgacgaagagaacctcaaggaggagtgttcctcgaccgagagtacccaacaggagcacgaggacgcgccaagcacgaagctgcagggggaggtcctggcgttggaagaagaacgggcacaagtattaggccacgtggaacagctgaaagttcgagtgaaagagctggaacagcagttgcaagagtccgcccgagaagcagagatggagcgagcgctgctgcagggggaacgagaggcggagagggctctgctgcagaaagaacagaaagccgttgatcagctgcaggaaaagcttgtggcgttggagactgggatccagaaagagcgcgacaaggaggccgaagccttggagaccgagactaagctgttcgaggatcttgaattccaacagcttgagagagagagcagagttgaagaggagagggagctggccggtcagggcctgctccggtctaaagccgagcttctgcggtccattgctaagcgcaaggagagactggccattctggactctcaggccggtcagatccgagcccaggcggtgcaggaatcggaacggcttgcaagggacaagaacgcttcgctgcagctgctgcagaaagagaaggagaaactgacggttctggagagaagataccatagcctgactggtgggcgacctttcccaaagactacctctacgcttaaggaggtctacaggagtaagatggacggtgaggccacttcccctctgcctcggacacgctccggccctttgccctcctccagcggtagcagctcctcttcgtctcaactaagtgtagccaccctcggaagaagtccctcccctaagagtgcactgctgactcagaacggcacaggaagtctgcccagaaacttggccgctaccctgcaagatatcgaaacaaaacggcaactggctctgcagcagaagggtcaacaggtcattgaggagcagcgaagacgattagctgagctgaagcaaaaggccgctgccgaggcccaatgccagtgggatgcactgcatggagcagcaccgtttcctgcaggaccttctggcttcccacctctgatgcaccacagcatcctccatcatctgcctgcaggaagagaacggggagaagagggggaacatgcctacgacactctgtctctggagagcagcgactctatggagaccagcatttccactggcggtaattccgcgtgttccccagacaatatgtcttccgcttccggtcttgacatgggcaaaatcgaagaaatggagaaaatgctgaaagaagctcacgccgagaaaaatagactcatggagtcaagagaaagggaaatggaactccgaaggcaggccctagaagaagaacgaagaagaagagaacaagtggaacgtagattacagtccgaaagtgccagaagacaacaactggttgaaaaagaggtgaagatgcgggaaaaacagtttagccaggcaaggcccctgacgcgttacctccccattcgaaaggaggattttgacctgaaaacacacattgagagctcaggacatggggtggatacctgtcttcacgttgtgctttcatctaaagtgtgtagggggtacctcgtaaaaatggggggaaaaatcaagtcttggaagaaacgttggtttgtattcgatagactgaaaagaactttatcttactatgtggataagcacgagactaagcttaagggcgtgatttacttccaagccattgaggaagtgtattacgatcatctaagaagcgcagccaaatcccctaaccccgctcttactttttgcgtgaaaacccacgaccggttatactatatggtggcgcctagtgccgaggccatgcgtatatggatggatgtaatcgttactggagctgaggggtacacccaatttatgaattag

SEQ ID NO: 235200 - DNA, 2193 bp, synthetic construct
  misc_feature 1..2193: note = Description of Artificial Sequence: Synthetic coding sequence
  source 1..2193: mol_type = other DNA
atggagcgatctgacgaagaaaatctgaaggaagaatgttccagcacagagtcaacccaacaggaacacgaagatgcacctagcaccaagcttcagggggaggtcctggccctcgaagaggaacgcgctcaggtcctggggcacgtcgagcaacttaaggtccgcgttaaagaactggagcaacagctgcaggagtccgcaagagaagccgagatggaaagagccctgctacagggtgaaagggaggcagaacgagcattgttacagaaagaacaaaaggccgtcgaccagctgcaagaaaaattagttgccctggagacgggaattcaaaaggaacgcgacaaagagcgggcagagctggccgcaggcagaagacatctagctcgacaggccctgtatgcggagctgcagacccagctagataattgccccgaatccgtgagggagcagctgcaagagcaactgcgtcgtgaggcagaggcccttgagacagaaaccaagttatttgaggatttggaattccagcagctggaacgagaatcacgggtcgaagaggaacgtgaactcgctgggcagggcttgctacgctcaaaggcagagctcctgcggagcatagctaaacgcaaggaaagactggccatcctcgactctcaagctgggcaaattcgcgcacaggccgtccaggaaagtgagagactcgccagagacaagaacgcttcccttcagctcctccagaaggagaaggagaaattgaccgtgctggaacggagataccattccttaactggtggcagaccctttcctaagaccacatctactcttaaagagatggagaaattactcctgcctgccgtggacctggagcaatggtaccaggagctgatggccggtctggggactggaccggcagccgcatcacctcactctagtccaccccctctacccgcaaaagcgtcccggcagctgcaagtgtatcgtagcaagatggatggggaggccacatccccactgcctagaactaggtccggcccacttccttcttcatctggctccagcagcagctccagtcaactcagcgtggcaacactggggaggagcccgtctcctaagtccgcactactgacacagaatggtactgggagcctcccacgaaacctggcagcaactctccaggatattgagacaaagcggcagctcgctctgcagcagaaaggtcagcaggttattgaggagcagcgtagacggctcgctgagctcaagcagaaggccgctgccgaggcacagtgtcaatgggacgcacttcacggcgcagctccattccctgcaggacctagcggctttcccccacttatgcatcactctattctgcatcacttgccagcagggagagaaaggggagaggagggggaacacgcttacgacacgctgtctctggaatcttccgatagcatggagacttccataagcaccggcggaaatagtgcctgctctcctgataacatgtcttctgctagcgggctggacatgggtaaaatcgaggaaatggagaaaatgctgaaggaagctcacgctgaaaagaatcgactcatggagagtagggaacgcgagatggaactgcggaggcaggctctcgaggaagagaggagaaggagagaacaagtcgaacgtagactgcaaagcgaatctgccagaagacagcagttggtggaaaaagaggtgaaaatgcgggaaaaacagttctcacaagccaggccgttgactagatatcttccaatacgcaaagaggacttcgatctgaaaacacatatagaaagctccggtcacggcgtcgatacctgccttcatgtggttctttcgagcaaagtgtgccggggatatttagtgaagatggggggaaaaatcaaatcatggaagaagagatggtttgtgttcgaccgactgaagcggacactgtcttactatgttgataaacacgagacaaaactcaagggggtcatttactttcaggcaatcgaggaagtttactatgaccatctgcgttctgccgctaaatcccctaaccctgccctcacattttgcgtcaagacacacgatagactctattacatggtcgcccctagcgccgaggcaatgcggatttggatggacgtgatcgtcaccggcgctgagggttatacacagtttatgaattag

SEQ ID NO: 235201 - DNA, 4134 bp, synthetic construct
  misc_feature 1..4134: note = Description of Artificial Sequence: Synthetic coding sequence
  source 1..4134: mol_type = other DNA
atggacgctctgaacagaaatcaaatcgggccagggtgtcagacacagaccatggtgcagaaagggcctctcgacttaatagagacgggcaaggggttaaaggtgcagaccgacaaaccccaccttgtgagcctcgggagcggcagattatccacggcaataactcttctgccgttggaggagggtaggaccgttattggttccgctgcccgtgatatctccctgcagggacctggactggcgccagagcactgctatatcgaaaacttaagaggaacactgacgctctacccctgtggcaatgcatgcacaatagatggcttgcctgtgcggcagcccacgagattgactcaggggtgtatgttgtgtctcggccaatcaaccttcctgcgatttaaccaccctgccgaggcaaagtggatgaaaagtatgattcccgcaggaggtagggctcccggtcccccttatagccctgttcccgctgaaagtgaatcccttgttaacggtaaccatacaccgcagacagctacccgtgggccatctgcctgtgcaagccacagctctcttgttagttctatagaaaaagacctccaggagatcatggactctcttgtgctcgaggagcctggtgccgcagggaagaagcccgctgccacaagtcccctatccccaatggccaatgggggacgttacctgctgtcacctcctacgtccccgggagccatgagtgttgggtccagttatgagaacacaagtcctgccttttctccgctctccagccccgcttcttccgggagctgtgcgtctcatagcccttcagggcaggagcctggtccatctgtgcctcccctcgtcccagctcggtcatctagctatcacttggcgctgcagccccctcaaagccgcccatcaggcgcaaggagcgagagtcccagactgtccaggaaaggaggacatgaacgaccaccatcgccgggtctgcgcggtctgctgactgacagcccagcagctaccgttctggccgaagctcgacgagccactgaatcacccaggctggggggtcaactcccagtcgtcgccatctcccttagcgagtatcctgcatcaggagcactgtcacagcctacttccatcccagggtcccctaaattccagccaccggtgcctgcccctcgaaacaagatcgggacccttcaggacaggcctccttcaccttttagggagccgccaggctctgagcgggtccttacaaccagtccctctcgacaattggtaggcaggacattctcagatggacttgctactcgtactctgcaacctcccgagtctcccaggttgggaaggcgtgggctggactctatgcgcgagctgcctccactgtctccatccttatctcgccgagcactgagtcccctgcctactaggaccacccctgacccaaagctcaatcgggaagtagccgaatcacctagaccacgcaggtgggccgctcatggggcttcccccgaggattttagtttgacattaggcgcaagagggcgaaggacccgttccccatcccctaccctgggtgaatccctagcacctcacaaaggcagtttctctggccgactctcgcccgcatatagcctgggatccttgaccggagcttcaccttgccagtcaccgtgcgtgcagagaaaattgtccagcggggacctgcgagttcctgtcacacgcgagagaaagaacagtatcactgagatttccgataacgaagacgatctgctggagtatcacagaagacaaaggcaggaacgattacgcgaacaggagatggagaggcttgaacggcagagattagagaccatactcaacctctgtgcagaatactctcgggcagacggaggacctgaagctggcgaactaccaagtattggagaagctaccgctgccttagctctggccggacgcagaccaagcagaggactcgccggagcctcaggacgcagctccgaggaaccaggcgtagccacacaaaggctgtgggaaagtatggagaggagcgatgaggaaaatctcaaagaggagtgcagctcaaccgagtccacccagcaggagcatgaagatgccccaagcacgaagttgcaaggggaagtcctggctcttgaggaggagagagctcaggttttgggacatgtggagcagttaaaagttagagtaaaggaactggagcagcagcttcaggagagcgcccgagaggccgaaatggagcgcgcactattgcagggggagcgcgaagcagaaagagccctcctgcaaaaagagcagaaggctgttgatcaactgcaggagaagcttgtggccttagagaccggaatccagaaagagagagacaaggaagctgaggccctcgagaccgaaactaaactctttgaggatctggaattccagcagttagagcgtgaaagtcgggtggaggaggaaagagagctggccggacaggggctgctccggtctaaagccgagctgctgcgcagtatcgcaaagcgcaaggagagactggcgattctggattcccaggccggacagatccgcgcacaagctgtccaggaatccgagagactggctcgtgataagaatgcttctcttcagttgctacagaaggagaaagaaaagctgaccgtgctcgagcggagataccactcactgactgggggacgtccttttcccaagacaacgtctaccctaaaggagatggagaagttattgttgcccgctgtggatctggagcagtggtatcaagagttgatggcagggctcggcaccggacctgccgcagcatcaccccactcctctccccctcccctgcccgctaaggcatctcgccagctccaagtgtaccgctcaaagatggatggcgaagccacctctcccctgcccaggaccagatccggcccactcccctcaagcagtggtagttcttccagtagctctcagctatcagtggctacgcttggacgatccccctccccaaaatctgcgctgctgactcagaatggcactgggagtctgcctcgtaacctcgctgcaactctgcaggacatcgagacaaagcgccagttagcccttcagcaaaagggccagcaggtcattgaggaacagaggcgccgtcttgctgaacttaaacagaaggccgcagcagaggcccagtgccaatgggatgccctacacggtgccgctccatttccggcagggcctagtggcttcccacccttaatgcaccattccatactgcatcatttgcccgctggaagagagcgcggtgaggagggagaacacgcctatgacaccctgagtctcgaaagcagcgactcaatggagactagtatcagtaccgggggaaatagtgcgtgctcgcccgataacatgagtagcgcgagcggtctggacatgggcaaaatagaggagatggaaaagatgctcaaagaggctcacgccgagaagaatcgattaatggaatctcgcgaaagagagatggagttgagaaggcaggccttggaggaggaacggagacggcgagagcaggtggaacggcgactccagtccgaatctgcacggaggcaacaactggtcgagaaagaagtcaagatgagggagaagcagttctcacaagccagaccgctgacccgatatctgcccattaggaaggaagattttgacctcaagacccacatcgaatcaagcggacacggagtcgatacctgtttgcacgtggtactgagcagcaaggtgtgcagggggtatttggttaagatgggtggcaagatcaaatcatggaagaaacgttggtttgtgttcgatcggttgaagcgcacgctgtcctactacgtggacaaacatgagacgaaacttaagggagtcatttacttccaggcaatcgaggaagtgtactacgatcatcttcgaagcgcggcaaagaagcggtttttccggttcacaatggttaccgagtctcccaatcccgcactgacgttttgcgtgaaaacgcatgaccggctgtactacatggttgctccaagcgccgaagccatgcgtatctggatggacgtaatagttactggagccgagggctacactcaattcatgaactag

SEQ ID NO: 235202 - DNA, 3423 bp, synthetic construct
  misc_feature 1..3423: note = Description of Artificial Sequence: Synthetic coding sequence
  source 1..3423: mol_type = other DNA
atgagcgtcggctccagctatgagaataccagtcctgcgttttcccctctaagcagcccagctagcagcggctcctgcgcctcccactccccatccggccaggaaccaggccctagcgtgccaccactcgtccctgccaggagctctagctatcacctcgctctccagcctccccaatccaggccatccggagccagatctgaatctcccaggctcagccggaagggtggccatgagcgtcccccatctccaggcctccggggtcttctcacagattctcctgctgcaaccgtgctcgcagaagctaggagggcaaccgaatccccaaggctcgggggacagttacccgttgttgccatctccctatctgaataccctgcatccggagcactgtctcagcctacaagtattcctgggagccctaagttccagcccccagtgcccgctcctcgaaataagattgggaccctccaggatagacctcctagcccctttagggaacctcccggatctgagagggtcttgactaccagtcccagccggcagctggtgggccgaaccttctccgacggccttgccactagaacgctccagccacctgaatcacccaggctcggaagaaggggcctggactcaatgagggaactgccacctttgagtccctctttatcacgccgagcactcagtcccctcccgactagaaccacaccggaccccaagctcaatcgtgaagtggccgagtcaccaaggcccagaagatgggcggctcatggcgcatctcctgaggacttctcgctcactctcggcgctcggggacgtagaacccgatcacctagccctactcttggagagtcccttgcaccccataagggctccttttcagggcgactgagccccgcttattctcttggttccctgaccggcgctagcccatgccaaagcccatgtgtccagcggaaactctctagcggcgacttgagagtacctgtaactcgtgagcggaagaactcgattactgaaatttccgacaacgaggatgatctgttggagtatcaccgacgccagcgacaagaacggcttcgagagcaggaaatggagagacttgagagacagcggcttgagactatccttaacttatgtgctgaatactcacgcgctgacgggggacccgaagcgggtgagttaccttctatcggcgaggcaaccgctgctctcgcattagcagggagacggccaagcaggggattggccggagcttctggcaggtcaagcgaagagcccggtgttgccacacagcggctgtgggaatccatggagcgctctgacgaagaaaatctgaaggaggagtgttcctcgaccgagtctacccagcaggagcatgaagatgccccttctacaaaactacaaggggaagtgctggcgctggaggaggagagagcccaggttctgggacatgtggaacagcttaaggtccgtgtcaaggagctggagcaacaattacaggagagcgctcgtgaggcagagatggaacgagcattactacagggggagcgggaagcagagcgggcactgcttcagaaagagcagaaagctgtggaccagctgcaggagaagctcgtggcactggagaccgggatccagaaagagcgcgacaaggaagcggaagcgctggagacagaaactaaattgttcgaggacctcgagttccagcaactggaaagggagtctcgcgtcgaagaagagcgggagcttgccggtcaagggttattaaggagtaaggccgaactactccgctctattgccaagagaaaggaacgactggcaatcctggactcacaggccggacagataagggctcaggccgtgcaggagtctgagcgactggccagagacaagaacgcgagtttacagcttctgcagaaagagaaagagaagcttactgtgctggagagacggtaccactcactaacaggaggccgacccttccctaaaacaacaagtacactcaaagagatggaaaaacttctgctccctgccgttgaccttgagcagtggtatcaggagttgatggccggtttgggaactggaccggctgctgcctctccacactcttctccccctccgttgccggcaaaagcatccaggcaactgcaggtttaccggtccaagatggacggcgaggccacgtcccctctgcctaggacaagatctggccctctgccctcaagctcaggctcttcctccagtagctcgcagctgagtgtggctactttaggtcggtctccaagccctaagtctgccttgctgacccagaacggaactggttcacttcctagaaacctcgctgcaactctccaagatatcgaaacaaagagacagttagccctccagcagaaggtagagagcctgccggctgaaccactgccgaccgatgatcccgctgggcaacaggtgatagaagagcagagaagacgactggccgaactgaagcagaaagccgctgctgaagcgcagtgtcaatgggacgccctgcatggcgctgcccctttccccgcaggccctagcggatttccacccctgatgcatcattctatcctccaccacctgccagcgggacgcgagagaggtgaagagggggagcacgcctacgatacattgagccttgagagctcagatagtatggaaactagcatcagtaccggaggaaattctgcttgctctcctgacaatatgagctctgcttccggccttgatatgggtaaaatcgaggagatggagaaaatgctcaaggaagcccacgccgaaaaaaatcgcttaatggagtcccgggaaagggaaatggaactgagaaggcaggcccttgaagaagaaagaaggaggcgcgaacaagtggagaggcgactgcaatctgaatctgctaggaggcagcagctggtggagaaggaagtgaaaatgcgtgagaagcaattcagtcaggccagacccctgaccagataccttcccattcgcaaagaggactttgacctgaagacccatatcgagagctccgggcacggggtggatacttgtcttcatgtggtactctccagtaaagtttgccgcggatacctggtcaagatgggcggaaagattaagtcatggaaaaaacggtggtttgtttttgatcggcttaaaaggacacttagctattatgtcgacaagcacgagacaaaactcaagggagtgatctacttccaggcaattgaggaggtgtattatgaccacttgcgcagcgccgctaagtccccaaatcccgctttaacattttgtgtgaagacccacgatcggttgtactacatggttgcaccgagtgccgaggcaatgcgtatttggatggatgttattgtgaccggtgctgaagggtacactcagttcatgaactag

SEQ ID NO: 235203 - DNA, 306 bp, synthetic construct
  misc_feature 1..306: note = Description of Artificial Sequence: Synthetic coding sequence
  source 1..306: mol_type = other DNA
atgggtgggaagattaagagttggaagaagaggtggttcgtttttgacagactgaaacggacgctcagctattacgtggataaacacgagacgaaattaaagggtgtgatttacttccaggcaattgaggaggtgtattacgatcatctgagaagcgctgcaaaaagccccaacccggctctaacattttgcgtaaagactcatgaccgcctttattacatggtggctccttcagccgaggccatgcgcatctggatggatgtgatcgttacaggtgcagaagggtacactcagtttatgaactag

SEQ ID NO: 235204 - DNA, 1119 bp, synthetic construct
  misc_feature 1..1119: note = Description of Artificial Sequence: Synthetic coding sequence
  source 1..1119: mol_type = other DNA
atggatgcacttaacagaaaccaaatcggcccaggctgccagacgcagactatggtgcagaagggtcctctggatttgattgagactggaaaaggactcaaggtccagactgacaaaccacatttggtgagcctgggttccgggcgtctctcaactgcaatcaccctattacctctggaggaaggtcgtaccgttataggctcagccgctagggacattagcctgcaagggcctgggctagcgcctgagcactgctacatagaaaatctaaggggcacccttactctttatccatgtggcaacgcatgcaccatcgatggattgccggtgaggcaaccaacgcgcttgacacaaggctgcatgctgtgtctcggacagtcgaccttcctgcggttcaaccacccagctgaggcgaagtggatgaaaagtatgatccccgcaggcggacgcgcacctgggcctccttacagccctgtgcctgagagcgaatctctcgtgaacggaaaccatacgccgcaaaccgcaaccaggggtcccagcgcttgcgcatcccactcaagcttagtctcttccattgaaaaagatctgcaggaaattatggatagcctggtgctggaggagccaggagccgctggaaagaaacccgcagctacttctcctctgtcaccaatggcaaatggagggagatatctcctgagccccccaacgtcccctggtgcaatgtctgtggggagctcctatgagaatactagccctgccttttctcctctgagctcacctgcatcctcaggaagctgcgcctcccatagcccctcgggccaagaaccaggaccctccgtcccccctctcgtgcccgcaagatcatcctcgtatcacctcgctctgcaaccgcctcagtcccgtccatccggtgcacgcagcgaaagtccgaggttgtcgcggaaaggcggtcacgaacgacccccatctcccggactgcgaggactcctcacagattccccagctgcaacagtcctggctgaggctagacgcgcaactgaaagtcccaggctggggggacaattgcccgtggtcgccatttctctgtctgagtacccagcggctagacgctgcacgtag

SEQ ID NO: 235205 - DNA, 744 bp, synthetic construct
  misc_feature 1..744: note = Description of Artificial Sequence: Synthetic coding sequence
  source 1..744: mol_type = other DNA
atggatgccctgaacagaaatcaaatcggtccgggttgtcagacacagacaatggtgcaaaaaggccctctcgatctgatcgagacaggcaagggtctgaaagtgcagacggacaagccgcatttggtatcgctgggctcaggtcgactgagtaccgccattactctgctgcctctcgaggagggcaggacagtgatcggatccgctgctcgagatatttctctacagggccctggtctggccccagagcactgctacatcgaaaacttaagaggtacactcaccctctatccttgcggaaatgcttgtactatcgacggcctccccgttcgtcaacctactagactgacacaaggttgcatgctgtgcctgggacagtccacgtttctccgtttcaaccaccccgctgaggccaaatggatgaagtccatgattcctgcgggtggccgagctccaggtccgccatactccccagtccctgccgagagcgaatccttggtgaatgggaaccatactccacagactgctaccagagggccatcagcatgtgcttcacactccagcttggtgtcatctattgaaaaggacctacaggaaattatggacagccttgtgctggaggagcctggcgcagctggcaagaagcctgcggctacctcccctttgagccccatggcaaacggcggaagataccttctctctcccccaaccagccccggtcacgtatgtgggttacaactgtag

SEQ ID NO: 235206 - DNA, 14055 bp, synthetic construct
  misc_feature 1..14055: note = Description of Artificial Sequence: Synthetic coding sequence
  source 1..14055: mol_type = other DNA
atggttgctggaatgttgatgcccagagaccagctgagagcaatttacgaggttttattccgggagggcgtgatggtggctaagaaagacaggcggccaagaagccttcatccgcacgtgcctggcgtaacaaacctgcaggtgatgagggcaatggcttcactgagggcacggggactggtgagggagacattcgcctggtgtcacttttattggtacctgacaaacgaagggatcgctcacctccgacaatacttacacttgcccccagaaatcgtgcccgcatcactccagcgggtgcgtaggcctgtggcgatggttatgcccgcaagacggacaccacacgtccaagccgtgcagggacctctggggagcccacccaagcgcggacccctgcccacagaggagcagagggtctacaggagaaaagagcttgaggaggtttcccccgaaacaccagtggtgccagcaaccacacaaagaacactcgcccgtcctgggccagaacccgcacctgcaaccgacgagcgagacagagtgcaaaaaaaaaccttcactaagtgggtgaacaagcacctgatcaaagcccagcgccacataagcgatctgtatgaggacctcagagatgggcacaatcttatcagtcttcttgaagtgctatccggggattccctaccgagagagaagggtcggatgagatttcataaactgcagaacgtgcaaatcgccttggactacctccgtcaccggcaggtcaagctagttaatattcggaacgatgacatcgccgatggaaaccctaagctcacccttggcctcatatggaccattattcttcacttccagattagtgatatacaggtctccggacagagcgaggatatgactgccaaggagaagcttcttctgtggtcacaacgcatggtcgagggttaccagggattacggtgtgacaattttacatcgtcatggagagatgggcgactgttcaatgctataattcatcgacacaaacctttgcttatcgacatgaataaggtgtatagacagaccaacttggagaacctggatcaggcatttagtgtggctgagagggatctcggtgttacacggcttctggatccagaggatgttgacgtcccacaacctgacgaaaaatcaattattacatacgtttcttctctgtacgatgccatgcctagagtcccagacgtccaggacggagtgagggccaatgaactacagctgagatggcaggagtatcgggaattggtgctgctgctgctccagtggatgaggcaccacaccgcagcgttcgaagagaggcgatttccctcctccttcgaagagatcgaaatcttgtggagccagttccttaaattcaaagagatggagctgccagctaaagaggccgacaaaaatagaagcaagggaatttatcagtctctcgagggtgctgttcaagccggtcagctcaaagtgcccccaggataccatcccctggatgtggagaaagagtggggcaagctccacgtggcaatactcgagagagagaaacagctgagaagcgagttcgagcgcttagagtgcctgcagcgtatcgtcacaaagctgcagatggaagccggactctgtgaagaacagctcaaccaggcagatgcgctgttacagagtgatgtcagactgctggccgcaggcaaggtaccccagcgcgctggtgaagtggagagagatctggacaaggccgacagtatgattcgtctcctttttaacgatgtgcaaacgctcaaagacgggcgtcatcctcagggagagcagatgtaccgccgagtgtacaggcttcacgagagacttgtcgccatcaggacagagtacaacctcagacttaaagcaggggtggcggctccagcaacccaggtcgctcaggtgacactgcaatctgttcagcgccgaccagaattagaggactctaccctaagatacctgcaggacctcctggcctgggtcgaggagaatcaacatagagtggacggagccgagtggggcgtggatctcccttctgtggaggcccagcttggctctcaccgcggtctgcaccagtctatcgaagagttcagggccaagattgaaagagcgagaagcgacgaggggcagctgagccctgccacccgcggagcttaccgggactgcttgggtcgtttagacctgcagtacgctaaactgctgaacagcagcaaagctcgtctcaggagtctggagagtctgcattcatttgtggctgctgcgactaaagagctcatgtggctgaatgagaaagaagaagaggaagttggcttcgactggtccgacagaaacaccaacatgaccgctaagaaggagagctactcagctttaatgcgggaacttgaactgaaggaaaaaaaaataaaagagcttcagaatgcgggagacaggctgctgagggaggaccatcctgcgagacctacagtcgaatcttttcaggcggctctccagacacagtggtcttggatgctccagctctgttgttgcatcgaagcccaccttaaggaaaacgctgcttactttcaattctttagcgatgtccgggaagccgagggacagttgcagaaattgcaggaggccttaagacgtaaatattcttgcgaccggtcagcgacagtgaccaggctggaggacctactccaggacgcacaggacgagaaggagcagttaaatgagtacaaaggccatctttctggcctggctaagagggccaaggccgtggttcagctgaagcccagacatcctgcccaccccatgcgaggcaggttacctttactggctgtatgcgattacaagcaggtcgaggtgactgtccataaaggcgacgagtgtcagctggtgggacccgctcagcccagtcactggaaagtcctgtcttcatccggctccgaggcggctgtcccttctgtgtgcttcctggtacctccacccaatcaggaggctcaggaggccgtgactcggctggaagctcaacatcaggcattggtgactttatggcaccagctccatgttgacatgaaaagcctgcttgcctggcagtcgctgcggagagatgtacagctgatcagaagctggtccctggcgaccttccgcactttgaaaccagaagaacagagacaggctcttcactctctcgaactgcattatcaggcatttcttagagactcacaagatgcgggagggttcggcccagaggacaggctgatggctgaacgtgaatacggctcatgctcacaccattaccagcagctcttgcagtcactggaacagggggctcaggaggaaagccgctgtcaacggtgcattagtgaactcaaggacattcgccttcaacttgaagcgtgtgaaacaaggacagtccataggctgaggctcccacttgacaaagagcccgctagagaatgcgcccagcgcattgccgaacagcaaaaggcccaggcagaagtggaagggcttggaaagggggtcgccagattgtctgccgaagcggaaaaggtacttgccttgcctgaaccatcccctgcagcacctactctgagaagcgaacttgaactgacccttggtaagctggagcaagtacgctccctctctgctatctatctcgagaaattaaagaccatttctcttgtcatccgtggaacgcagggtgcagaagaagtgcttcgagcccatgaggagcagctgaaagaagcccaggccgtgcctgcaaccctgccagaactggaggctaccaaagcaagcctgaagaagctgcgagcccaggctgaggctcagcagccaacatttgacgccctaagagacgagctgaggggcgctcaagaggtgggggaacgcttgcagcagcggcacggcgagcgagatgtggaagtggagcgttggcgagaaagagtggcccagctgctggaaaggtggcaggcagtgctcgcccaaacagatgtccggcagagagagctagagcagctaggcaggcagttgcgctattaccgggaatctgccgatccactgggagcgtggctccaggatgccagacgcagacaggagcaaatccaggccatgcctctggcagattctcaggctgtacgtgagcagttgcgtcaagagcaagctctgttggaggagatcgaaagacatggcgaaaaggtcgaggagtgccagcgatttgccaagcagtacattaatgcaataaaagattacgagctgcagttagtgacttataaagcgcagcttgaaccagtggccagcccagccaagaagcctaaagtccagagcggtagcgaaagtgtgatccaggagtatgtggacctgagaacccactactcagaactgactaccctgacctcccagtacatcaagtttatcagcgagacgctgcgaagaatggaagaggaagagaggttggctgagcagcagagggctgaggagcgggagaggctggctgaggtcgaagctgcactggagaaacagcgccagctagcagaggcgcacgcgcaagccaaagcgcaagctgaaagagaggccaaagagctgcagcagcggatgcaagaagaagtggtgcggcgagaggaagccgctgtagatgcgcaacagcaaaaacgctctattcaggaagagctgcagcagctccgccagtcctccgaggccgagatccaggccaaagccagacaggccgaggccgcagaacggagccgtttgcgcattgaggaagaaatcagagtggtccgcttgcagctcgaggctaccgaacgacagaggggcggtgctgaaggagaactccaggccttgcgggcacgcgctgaggaagcggaggcgcagaaacgacaagcccaggaagaagctgagcgcctccggagacaagttcaggatgaaagccaaaggaaacgtcaggctgaggtggaactagccagccgcgttaaggcagaggccgaagcagctagggagaaacagagagctctgcaggccctggaagaactccgcctgcaggcagaagaagctgagcggaggttgaggcaggcagaagtcgagcgggcaaggcaggtccaggtcgctctggaaactgctcaacgtagtgcagaggccgaactacagtctaagcgcgcaagcttcgcagaaaaaacagcgcagctggagagaagtcttcaagaagagcacgtggctgtggcccagctgagggaagaagctgaacggcgagcacagcaacaggccgaagcagagagggccagggaggaagctgagcgtgagttggaaaggtggcagcttaaggccaatgaggctctgagactcaggttgcaggctgaagaagtggctcaacagaaatctctcgcccaggcggaagctgagaaacagaaggaagaagccgagcgtgaggctagaaggagagggaaggctgaggaacaggccgtacggcagcgcgagctggctgaacaggaactggagaagcagaggcaacttgcagagggtacagcccagcagcgcctcgccgcagagcaggaactgattagactccgagctgagacggaacagggggaacagcagcgacaactgctggaagaagaattggctagactccaacgagaagccgctgccgcaacacagaagagacaggagctggaggctgaacttgcgaaggttagggccgagatggaggtgctattagcctcgaaagcacgagccgaggaagagtcccgatcgacctccgaaaagagtaagcagcgtttagaagctgaggccggaagatttagagagcttgctgaggaggccgctcggcttcgcgctctagctgaggaggctaagcggcagagacagctggccgaggaagacgccgcaagacaaagagccgaggcggaacgggttttggccgaaaaattggctgctattggggaggctacgagactcaagacagaagcggaaattgctctgaaggaaaaggaagccgaaaacgagaggctacgacggttggctgaagacgaggcgtttcaaagacgacggctggaggagcaagcggctcaacacaaagccgacattgaagagcggcttgcacagttgcgcaaagcgtcggacagtgaactggagcgacagaagggcctggttgaagacaccttgcgccaaaggaggcaagtggaggaggagattctggctctgaaggcgtcatttgaaaaggctgccgcaggcaaggccgaattggaactagaactgggcaggattaggagcaacgctgaggacaccctgagaagcaaggagcaggcagaactcgaagcggcaagacagagacaactcgccgcagaggaggagaggcgtcgcagagaagcagaggaaagagtacaaaagagcttggctgcggaagaggaggccgctcgccagcgcaaggcggcacttgaggaagtagagaggcttaaggcaaaagttgaagaagccaggcgactgcgtgaacgggctgagcaggagtctgcacgccaacttcaactggcccaggaggcggcacagaagcgcctgcaggccgaggagaaggcacatgcctttgctgtgcaacaaaaagagcaggaactgcagcaaactctgcaacaggaacaaagcgtcctggatcagctgcgaggagaagccgaagcggctcgccgagcggctgaggaggcagaagaggcacgcgtccaggccgaaagggaggctgcccagagccgccgacaggtggaggaagccgaaaggttaaagcaatcagccgaggagcaggcgcaggctagagcccaggctcaggcggctgccgaaaagttacggaaagaggctgaacaagaggctgcaaggagagcacaggccgaacaagccgcactcagacaaaaacaagcagcggacgccgaaatggagaaacataaaaagtttgcagagcagacactcagacaaaaagctcaggtggaacaagaactgacgacgctgcggctgcagctggaggagacagatcatcaaaagaatctcctggacgaagaacttcagagactcaaggctgaggctacagaagcggctaggcagcgaagtcaggttgaagaagaattgttcagcgtacgcgtacagatggaagagctctccaaactgaaggcacgcatagaggcagagaacagagccctcatcctgagagacaaagacaacacacagcgctttctgcaagaggaggccgagaaaatgaaacaagtagctgaagaggcggcaagattatcagtggccgctcaggaagcagcaagactgaggcagcttgcggaggaggatttggcccagcagagggccctcgctgaaaaaatgttgaaggagaaaatgcaggctgtacaggaggcaaccaggctgaaagctgaagccgaactactgcaacagcagaaggagctcgctcaggagcaggccaggcgcttgcaagaagataaggaacagatggctcagcaactcgctgaagaaacccaaggctttcagcgcaccctggaagctgaaaggcagcgacagctggagatgagcgcagaggccgaacggctgaagcttcgtgtcgccgaaatgtctcgtgcccaggcacgcgctgaagaggatgcgcaaaggttcagaaaacaggcggaggagatcggagaaaaattgcacaggactgagcttgcaacccaggaaaaggtcactcttgtgcagactctggaaatccaacggcagcagtccgatcatgatgctgagcggctaagggaggctatagctgagcttgagcgcgaaaaggagaagctgcagcaggaggctaagctactgcagctaaaaagcgaagagatgcagaccgttcagcaggaacagctcttgcaggaaacccaagcactgcagcagtccttcctatccgagaaagacagcttgttgcagcgagagaggtttatcgaacaggagaaggccaagcttgagcagctctttcaagatgaggtggctaaggcgcagcaactgcgtgaagagcagcagcgccaacagcagcaaatggaacaggagcgccagaggctggtggcctcaatggaggaagccaggcgtcgccagcacgaggccgaagaaggcgtgcgacgcaagcaggaggaactgcaacagctagagcaacagcgccgtcagcaggaagagctcctggcagaggagaaccaacgtctgcgggaacagctgcagctgttagaagagcagcaccgcgcagccctggctcacagcgaggaggtgacggcttcccaagttgctgccacaaagacactgcccaatggtcgtgacgcccttgatgggcctgcagcagaagcagagccggaacattcttttgatgggcttcgcagaaaagtctctgcccagaggctacaggaggccggtatcctgagcgctgaagagctgcagcggctcgctcaaggtcacaccaccgtggacgagcttgctagaagggaggacgtgcgccattacctccagggcaggtccagcatcgccggtctgcttcttaaggctactaacgagaaactgtctgtgtatgctgccctacagcggcagctgctcagccctggaacagcattaatcctgctcgaggctcaggccgcatccggtttcctattagatcccgtgagaaaccgtcgcttaacagtcaacgaagcagttaaagaaggcgtcgttggtccagagttacaccataaattgctgtcagctgagcgagctgttactggctataaagacccttatacaggacaacagatctccctgtttcaggcgatgcagaaaggcctgattgttcgcgaacatggaatccgactcctggaggctcagatcgccacagggggtgtaatcgacccagtccacagccacagggtccccgtggatgtggcttataggaggggctactttgacgaggagatgaaccgggtcttagccgacccctccgatgatacaaaggggttctttgaccctaacacgcacgaaaacctcacctatctgcagctactggagcgatgtgtcgaggaccccgaaacgggcttatgtctgcttcctctcacggacaaggctgccaagggcggagaactggtgtataccgactccgaggccagagacgtattcgagaaggccacagttagcgctcctttcggtaagtttcagggcaagacagtcaccatctgggaaatcatcaactccgaatacttcacggctgaacaaagacgggatttgctgcggcaattccggactggtcggatcactgtggagaagatcatcaaaatcatcatcacagtggtggaggaacaagagcaaaaaggccgtctgtgttttgagggactgcgctctttggtgcccgctgcagaactgctggaatcacgcgtgatcgacagggagttgtatcagcagttgcagcgaggggaacggtcagtacgggacgtggccgaggttgatactgtcaggagagccctgaggggtgcgaatgttatcgctggggtgtggctcgaggaggcaggccagaaattgagcatctacaacgcattgaagaaggatttactcccatcggatatggccgttgctctactggaggctcaggctggtaccggccacatcatcgatccggctacctccgcgagactgacagtcgacgaagctgtccgggcaggcctggttggaccagagttccatgaaaagctgctttccgcggagaaagcggtaaccggatatcgcgatccgtacactggacagtctgtaagccttttccaggctctgaagaaagggctgatcccacgggaacaggggctgcggttgctggatgctcagctgagcaccgggggaatagtagatccttctaagtcccacagggtgccactggacgtagcttgtgcgaggggctgccttgacgaggaaaccagtcgggcattgagtgcgcctcgtgctgacgccaaagcttactccgacccaagcacaggcgagccagctacatacggggaattgcagcagcgatgtaggccagatcagctgaccggtttgtcacttctgcctctctctgaaaaggcagccagagctcgacaggaagaactctactcggagctgcaggcacgggagacgttcgaaaaaacgcccgtggaggtgcctgtggggggatttaagggcagaaccgttaccgtttgggaacttataagctccgagtacttcactgccgagcagcgccaagagcttctcagacaattccggacagggaaagtgaccgttgagaaggttataaagattctgattacgatcgtggaagaagttgagactttgcgccaggagcgactgagcttctcaggccttcgcgctccagtccctgcttcagaactgctggcttcaggggtcctttccagagcgcaatttgagcagctaaaagatgggaaaaccactgtaaaggacttaagtgagctcggcagcgttcgtaccctgttacagggttctggctgtctggccggaatttacctggaggatactaaagagaaggtgagcatttacgaggcaatgcggcgaggcctgctgagggccactactgccgcactgctcttggaggcccaagcagctactggatttttggtggatccagtgcggaaccaaagactttacgtgcacgaggccgtgaaagcaggcgtcgtgggaccagaactgcatgaacaacttctgagcgcagaaaaagcggtcacaggttaccgggacccatacagcggcagcacaattagccttttccaagccatgcaaaagggtctggtcttgagacagcatggcatccgattgttagaagcacaaattgccactggtggaattatagatcctgtccactcccatcgggtgcccgtggatgtcgcctaccagcgtgggtactttagcgaagaaatgaatcgagtcttggcggatccatcagacgacaccaaggggttttttgatccaaacacccatgagaacttgacctatagacagttgctggaacggtgtgtggaggatcctgagaccggactgcgattgctgccgttgaaaggcgctgaaaaggccgaggtggtcgagacaacccaggtgtatactgaggaagaaacgcgtcgggcattcgaggaaacgcagatagacattccaggcggaggtagccatggtggatcaactatgtccctgtgggaagtcatgcagagcgacttaatccccgaggagcaacgtgctcagctgatggccgatttccaggcaggtagagttaccaaagaaagaatgatcattataatcattgagatcatcgagaaaacagaaatcatccgccagcagggcctcgcaagctacgactacgttcggaggcgcctcactgccgaggacctgttcgaagcacgcattatttcgctcgagacctacaacctgttaagagagggaacacgatccctccgggaggcacttgaggcagaatccgcgtggtgctatctgtatgggaccggttccgtggctggtgtatacctccccggtagccgtcagaccctgagcatctaccaggccttaaagaagggcttactctctgcggaggtggcccgtctcctccttgaagctcaggccgctactggttttctacttgatccagtgaaaggggagagactgactgtggacgaggccgtccgtaaaggtctggtcggaccggaacttcatgatcggctgctgtcggctgaacgggctgtaaccggctaccgggatccatatactgagcagaccatttccctgtttcaggctatgaaaaaggaactgattccaactgaggaagccttaaggctcctggatgcccagttggctacaggtggaattgtggatcctagattgggcttccacctccccctagaggttgcctatcagcgcggatacctgaataaggacacacacgatcagctttctgaaccctccgaagtgcgttcatatgtagacccaagcaccgacgaacggttatcatatacccaactactcaggaggtgtcggagggacgacggcacagggcagctattacttccgctgtccgatgccagaaaactgacattcaggggccttcgtaaacagatcaccatggaagaactcgtgagaagccaagttatggatgaagctactgccctgcagctgcgggagggactgacctctatcgaggaagtgactaaaaacctacagaaatttctggagggcacatcttgcattgcaggagttttcgttgatgccactaaggagcgcttaagcgtttatcaagcaatgaagaagggcataatcagaccgggaaccgcattcgagctgcttgaagcccaagccgctacgggctatgtgatcgacccaatcaagggactgaaactgacagtcgaggaggcagtgagaatgggaatcgtgggtcccgaatttaaggataagctgctgtccgctgaaagggcagtgactggttataaggatccttattccggtaagctaatatcactgtttcaggccatgaaaaaggggctgatcctgaaagatcatggaatccgcttgcttgaggcacagatcgccaccggtggaattattgacccagaagagagtcatcggctccccgtggaagtggcctataaacgaggcctcttcgatgaggaaatgaacgagattctcaccgacccatccgacgataccaaagggttctttgaccctaacaccgaggagaaccttacctacctgcagcttatggagaggtgcatcactgacccccagaccgggttgtgcctgctgccgctgaaggaaaagaaacgcgaacggaaaaccagctcgaaatctagcgtgcgcaaacgcagggtcgtgatagtggatcccgagaccggcaaggagatgtccgtgtacgaggcctatcgaaagggcttaatcgaccatcaaacatatctcgagctgtctgagcaggaatgtgagtgggaagaaattaccatatcaagcagtgacggcgttgttaaaagtatgatcatcgataggagatctggtcgccagtacgacatcgacgacgctatcgcaaaaaatctaatagaccgatccgccctcgatcagtacagggctggaaccctctctatcacggagttcgctgacatgctctccggaaacgccggtggctttagatcacggagctcgtcagtaggttcgagttcaagctacccgatttccccagcagtgtctcgtacccagctggcttcatggagcgatcccacggaagagacaggcccagtggcagggatactcgataccgagacgttagagaaggtttccattaccgaagccatgcataggaacctggtcgacaacattactggtcagaggctcctcgaggcgcaagcatgtaccggtggtattatcgatcctagcaccggagaaaggtttccagttaccgacgccgtgaacaagggcctcgttgataagataatggtagatcgtataaatcttgcacagaaggcattctgtggattcgaagatcctcgcactaaaaccaagatgtctgcagcccaggccctaaagaaggggtggctgtactatgaggccggtcagcggtttttggaggtgcagtaccttacgggagggctcatcgaacccgatacacccggaagagtgccgctcgacgaagcactgcaaagaggcaccgtggacgcaaggacggcacagaagctgagggacgtcggcgcatactctaagtacctcacctgccccaagaccaaactcaagatctcctacaaggatgccctagatagatcaatggtggaagagggcactggactacggctgctggaggcagcagctcaatccactaagggctattacagcccttattctgtgtctgggagcggtagcacagctgggtctaggacaggctcacgtactgggtctcgggcaggttctaggcggggttcttttgatgcaacaggatcaggattttcaatgactttctcttcctctagctatagcagttcagggtatggtcggagatatgcaagcgggtcctcggctagccttgggggtcctgagagcgcggtcgcctag

SEQ ID NO: 235207 - DNA, 13644 bp, synthetic construct
  misc_feature 1..13644: note = Description of Artificial Sequence: Synthetic coding sequence
  source 1..13644: mol_type = other DNA
atgtctcaacatcaactgcgtgtgccacaacccgaaggtctgggcaggaagcgcacctccagtgaggacaacctgtacctggcagtcctgcgcgctagcgaaggtaagaaggacgagagagaccgtgtgcaaaaaaagacattcacgaagtgggttaataaacatctaattaaggcgcagaggcatattagcgatttgtacgaggatctgcgggatggccacaacctcatctcccttctggaggtgttaagcggagactcactgcctcgcgagaaaggtcgaatgcgattccacaagctgcagaacgtccagatcgcattggactatctacggcatcgacaagtgaagttggtcaacatcagaaacgacgacatcgcagatggtaaccccaaactgaccttgggtctcatttggactatcatccttcattttcagatatctgacatccaggtgagtggccaatctgaggatatgaccgccaaagaaaagcttctcctctggagtcagaggatggtcgaagggtaccagggcctccgctgcgacaatttcactagcagttggcgcgatggacgactgtttaacgctattatccaccgtcataaacctttgcttattgacatgaataaggtttataggcagaccaacctggaaaatctggatcaagccttcagcgttgctgagagagatctgggtgtgacaagacttctcgaccctgaggatgtggatgtgccccagcctgacgagaaatcaataatcacttatgtgagtagtttatacgatgccatgcctagggtgcctgatgtgcaggacggggtgcgggcaaatgaactgcagctccgctggcaggaatatagggaacttgtgctcctgctgcttcagtggatgcgtcaccacaccgcggcatttgaggagcgcaggttcccctcgtctttcgaggaaattgagatcttgtggagccaatttctgaagttcaaagagatggaactcccagcgaaggaagccgacaagaacaggagcaagggcatatatcaatccttggagggagccgtgcaggcaggccagctcaaggtccctccagggtaccatccgcttgatgttgagaaggaatgggggaagctgcacgttgcaattctggaaagagaaaaacaattgcggtccgagtttgaacgcttggagtgcttgcagaggattgtaaccaagctgcaaatggaggcaggattgtgtgaggagcagctcaatcaagccgatgctctgttgcagtccgatgtgcgcctgctcgcggctggcaaagtgccccagagggccggtgaagtggagagagacttggataaagcagacagcatgattcggctcttgtttaatgacgtgcagactctgaaggatggccgtcacccccagggggagcagatgtaccggcgagtgtaccgtctccacgagaggttagtcgccataaggacagaatacaacctgcggctcaaagcgggtgtcgcagctccagcaactcaggtggcccaggtcaccctccaaagtgtgcaacggcgacccgaactagaggatagtaccttgcggtatctccaggatctcctcgcttgggttgaggagaatcagcacagggtcgacggggcagaatggggtgtggacctcccaagcgtggaagcccaattaggcagccaccgtggcctgcaccagtccatcgaggaattccgcgctaagatcgaacgcgcaagatccgacgagggtcaattgtctccggcaactaggggggcttaccgtgattgtctggggagacttgaccttcagtacgcaaagctactcaatagtagcaaggcaagactccgctccctcgaatcgctgcacagttttgttgccgctgctacaaaggaactgatgtggttgaacgaaaaggaagaagaggaggtgggctttgactggtctgatcggaatacaaacatgactgctaaaaaggaatcatattccgccttaatgcgggaactcgagcttaaggagaagaagattaaggagctccagaacgccggtgacagactgctcagagaagaccacccagcacgaccaacagtagagagctttcaagcagccttgcaaacacagtggagttggatgttgcagctgtgttgctgtatcgaggctcacctcaaggagaacgctgcatattttcagtttttcagcgatgtgagggaggccgagggacaactgcaaaaactgcaggaagcgttgagacgcaagtactcttgcgacagaagcgccaccgttacccgcctcgaagatttactgcaggacgctcaggacgagaaggaacaactgaacgaatataagggacacttgtcaggcctggcaaaacgtgccaaggccgtggtgcagctgaagcctcgacacccagcccatcctatgcgcggacggctacccctgcttgccgtgtgcgactataaacaagtggaagttaccgtacacaagggcgacgaatgtcagctagtgggaccagcccaaccatcacattggaaagttttgtcttcctctgggtctgaagctgcggtaccttcggtatgcttcttggtgccccctccaaatcaagaggcccaggaagcagtcactagactcgaggcccagcatcaggccctggtgactctttggcatcagctgcacgtagatatgaagagcttgctcgcttggcagtcgctccggagagatgtgcagctcatccggtcttggtcattggccacatttcgcactctaaagccagaagagcagcgacaggccctgcactcccttgaactacactaccaagcctttttgagggatagtcaggacgcgggagggttcggccctgaggatagacttatggcggagcgtgaatacgggagttgttcccaccactaccagcaactgctgcagtctctcgaacagggagcacaggaagagagccgatgtcagaggtgcattagcgagcttaaagatattcgcctgcagcttgaggcttgtgaaacgaggacagtccatcgattgagactacctttggacaaggaaccagctcgcgaatgcgcacagcgaatcgccgagcagcagaaggcgcaggcagaagtggagggtctcggcaagggagtggcacggctgtcagctgaggcagagaaggtactcgctttgcctgagccatcccctgcagcccctaccctgcgcagtgagcttgagctcacccttggcaagctggagcaagtacggtccctatcggccatctatctagaaaagttgaaaactatctcattagtgatccggggtacacagggtgccgaggaagtcctccgggctcacgaggaacagctgaaagaggctcaggcagtaccagctacgttgccagagctggaggcaaccaaagcttcccttaaaaagctgcgggcacaggctgaagctcaacagccaactttcgatgcgctgcgcgacgagctgcggggagcccaggaggtgggtgaacgcctgcaacaacgacacggcgagcgcgacgttgaagtggagcggtggcgagagagagtggcccaactgctcgaaaggtggcaggcagttctggctcagacagacgtgcggcaacgcgagctagagcaactgggcagacagctacgctactaccgcgagagtgcggaccccctcggcgcatggttgcaggacgcacgcagacggcaggaacagatccaagctatgcccctcgccgattctcaagctgtaagggaacagttgagacaagaacaggccttgctggaagaaattgaacggcacggggaaaaggtcgaggagtgccagagatttgctaaacagtatattaatgcaattaaggattacgagttgcagttagtcacatacaaggctcagctggaaccagtggcctcaccagccaagaaaccaaaggtgcaatccgggtcagagtctgtgatacaagagtatgttgatctgagaacccattactctgaacttactaccctgacttctcagtacatcaagttcatctccgaaacgttgaggcgcatggaagaagaggagcgccttgccgagcagcagcgagccgaggagagagagcgcctggcagaggtcgaagccgctttagaaaagcagcgacagcttgcagaggcccacgcgcaggctaaggctcaggctgagcgcgaagcaaaagaacttcagcagagaatgcaggaggaggtggttaggcgcgaggaggctgccgtggacgcacagcagcagaagaggtccattcaggaagagctccagcagctgcgccagtcgagcgaggccgagattcaggctaaagctcgccaggccgaagctgcggagcggtctcgactgcggattgaggaagagatcagggtggtgaggcttcagttggaagccaccgaaaggcagaggggtggtgctgaaggcgaactacaggcactccgagctcgggctgaggaagcagaggcacagaaaagacaggcccaagaagaagcagaaaggctgcgacgacaggtgcaggatgagtctcagcgtaaacggcaggccgaggtcgaactagccagccgtgtgaaggcagaggccgaagccgcacgtgaaaagcagcgggcattgcaagcactggaggaactgcgcctccaggctgaggaggctgaacgaaggttgaggcaggctgaagtggaaagggccaggcaggttcaggtagccctcgaaactgctcaaagaagtgccgaggctgaactgcagtctaagcgcgcaagtttcgccgagaagaccgctcaattagagcgctcgctgcaagaagagcatgtggccgtcgcccagctacgggaggaggccgagagacgggctcaacagcaggcagaggccgagagggcacgggaggaagccgaaagagaattggagcgatggcagttaaaagctaatgaggcgctcagattacggctgcaggcagaagaagtcgcacaacagaaatctcttgcccaggccgaggccgaaaagcagaaagaagaggccgaacgtgaagcccgacgtcggggaaaggctgaggagcaggccgttcgccagagggagctggctgaacaggaattagaaaagcagcgtcagctggcagagggcacggctcagcagcggctggccgctgagcaagaactgattaggctgagggccgagacagaacagggcgagcaacagaggcagctcctggaagaagagctggcacgcctccagcgagaagctgcggctgccactcagaagcgacaggaactcgaggcagaacttgccaaagtccgcgctgaaatggaagtgctgctcgcctctaaagccagagccgaagaggagagccgttcaacttcagaaaaatctaagcagcgattagaggcagaggcgggacgctttagagaactggctgaagaagctgcacgcctgcgggctcttgccgaggaggcgaagagacagaggcagttggctgaggaggacgcagcccgacaaagggctgaggcagagcgcgttcttgccgaaaagcttgccgcaatcggagaggcaactcgcctcaagacagaggccgagatcgccctcaaagagaaagaggctgagaatgaaagattacggagactagctgaagacgaggcttttcagagacggaggctggaagagcaagcagcccagcacaaggctgacatagaggagcgcctggcccaattaagaaaagcttctgatagcgaactagaaagacagaagggcctggttgaggacactctgcgccagcggaggcaagtcgaggaggagattttagctctcaaggcctcatttgagaaggccgctgcagggaaggctgagttagagttggagctgggacgcattcgatcaaatgccgaggacacactgcgctccaaagagcaggccgagcttgaagcggcacgacaaagacaacttgcagctgaagaagaacggagacgcagagaagccgaggagagagtgcagaagagcctggccgctgaggaggaggcagcaaggcagagaaaggcagctctggaggaggtggagcggctcaaagcgaaggtggaagaagcacgaagacttcgagagagggcggagcaagaatctgccagacagctacaactagcccaggaggccgctcagaaacgcctgcaagctgaggagaaggctcacgccttcgccgtgcagcagaaggaacaggagctccagcagacccttcagcaggaacaatctgtgcttgatcaactgcggggagaggccgaagcggcaagaagagccgcagaggaggccgaagaggctcgtgtccaggccgaacgcgaagcagctcagtcccgtcgtcaggtcgaggaggctgagaggctgaagcagtcagctgaggaacaggctcaggcccgagctcaagcacaggccgcagccgaaaagctgagaaaggaggccgaacaagaggctgctagaagagcccaagccgagcaagccgcactccggcagaagcaggccgctgacgccgaaatggaaaaacacaagaagtttgctgagcaaacgcttcggcaaaaagcacaagtcgagcaggaactcaccaccttaagattgcaattagaagagacagatcaccaaaaaaatctgctggatgaggagctccaaaggctcaaagcagaagccacggaagccgcaagacagagatcacaagtggaggaagagttgttcagcgtgcgcgtgcaaatggaagagctatccaagttgaaagcacggatcgaagccgagaaccgggctttgatcttacgcgacaaagacaacactcagagatttctgcaggaggaagctgaaaaaatgaaacaggtggcagaggaggccgcacggctgtccgtggctgctcaagaggctgcgagattgcggcagctggcagaggaggatctggcccaacagcgggctctggccgagaaaatgcttaaggaaaaaatgcaggctgtccaagaggctacacggctgaaggcagaagccgaactactacagcagcaaaaggagttagcgcaagaacaggcccgacgactgcaggaagacaaggagcagatggcccagcagttagcggaagaaacacagggatttcagcgcaccctcgaggccgaaaggcagcgtcagttggagatgagcgccgaagctgagcggttaaaactccgggtcgccgaaatgtcaagagcacaggccagagctgaggaggatgctcagaggtttcgcaagcaggctgaggaaattggagaaaagctgcatcgtacagagctcgcgacccaggagaaggttaccctggttcagacactggaaatccagagacagcagagcgatcatgatgccgaaaggctcagggaggcaattgccgaattggagcgcgagaaggagaaactccagcaggaagctaaactgctccagctgaagtcagaagaaatgcaaaccgtccagcaggagcaacttcttcaggagacccaggctctccagcagagttttctgtctgaaaaggactcactgctgcagagggaaagattcattgagcaggaaaaggctaaactcgagcagctgtttcaggacgaggtggccaaggcccagcaacttagagaggagcagcaacggcagcagcagcaaatggagcaggagagacagcgtcttgtcgcctccatggaagaggcaaggcgcaggcagcacgaggctgaggaaggcgtgaggcggaagcaggaggaactgcagcagctcgaacagcagcggagacagcaggaagagcttctcgctgaggagaaccaaagacttagagagcagctccagctcctggaagaacaacaccgggctgctctggcccactccgaggaagtgactgctagtcaggtcgccgctacaaagacactgcctaatgggagagacgcacttgacgggcctgccgctgaggctgaacctgagcattcattcgacgggctgcgcagaaaggtttcagcacagcggctgcaggaggcgggaatcctgtctgctgaggagctacaaaggttagctcaggggcatactaccgtggatgaactggctaggagggaggatgtccggcactacctacaggggagatcttcaattgcaggtctgttactcaaggccaccaacgaaaagcttagtgtgtacgcagcacttcagcggcagctgctttccccaggaaccgccctgatactcttagaggctcaagccgcaagcggattcttactggatcctgtgcggaaccggagactgaccgttaacgaagccgtgaaagaaggagtggtcgggcctgagcttcatcataaactgctctcagccgaacgggcagtaaccgggtacaaggatccttacaccggccaacagataagcctgtttcaggcgatgcagaaaggtctgatcgtgcgcgaacatggcatacggctcctggaggcacaaatagctaccggcggagtaatcgaccctgtacactctcaccgggttccagtggatgtcgcttatcgccgaggttattttgacgaggaaatgaaccgtgtactggcagacccttcagacgacactaagggtttttttgaccctaacacacatgagaatctgacctacctccagctgctcgaacgttgcgtggaagaccctgaaacaggcctgtgcctattacctcttacagacaaggccgctaaagggggtgaactagtgtataccgattccgaagccagagacgtgttcgaaaaagcaaccgtttctgccccatttgggaagttccagggtaagaccgtcacaatctgggaaatcatcaattccgaatatttcaccgccgaacagaggagagacctcctgcgtcagttcaggaccggaaggattacagtggagaaaatcattaaaattatcattaccgtggtagaagaacaggagcagaagggcaggctgtgcttcgagggcctccgctcactggtccctgcagccgaactcctagagagtagagtcattgacagggaactgtaccagcagctgcagcgcggtgaacggtcagttagagacgtagccgaagtggatactgtgcgcagggcgctgagaggggctaacgttatcgctggagtgtggctggaggaggctggccagaaactgtccatttataacgcgttgaagaaggacttactcccgtcagacatggccgtggccctgctggaagcgcaggcgggaacaggtcatatcatcgacccagcgacctctgcgaggctcacagtcgacgaggccgttagggctggcctggtgggaccagaatttcacgagaagctgctttccgccgagaaagctgtcacaggatatcgggacccgtacacaggacaatcagtctcactcttccaggctctgaaaaaaggcctgatacccagggagcagggcctgcggcttctggacgcccagttaagcacgggaggaatcgtggatccttcaaagtcccacagggtccccctggacgtcgcctgtgctagagggtgtctggatgaggagacaagtagggcactttccgcgccacgggcagatgcaaaggcgtatagtgatccttccaccggggaacccgcaacctacggcgaactgcaacagcgttgccggcctgatcaattgaccgggctgtctttactccctctgagcgagaaagcagctcgagccagacaagaagagctctacagcgaactgcaggcaagggagacatttgaaaaaacgcctgttgaggtccctgtaggcggattcaaaggacggactgtaacagtgtgggagctgatcagcagcgagtacttcactgcggaacagcgtcaggagctgctacggcagttccgaactgggaaggtgacagtggaaaaagttattaagatcctgattactatagtcgaagaggtggaaacgctgcgacaggagcgcctgtcattcagtggcttaagagcccctgtgccagcaagcgagctgctcgctagtggagtgctgagtcgagcccagtttgaacagttaaaagatggaaagaccacagtgaaggatttgagcgagctaggctccgtgaggactctactccaagggtctggctgccttgcaggcatttacctcgaagacactaaagaaaaggtgtcaatctacgaggcaatgaggagaggcctgcttagggcaactacagcagctttacttctagaggcccaggccgctactggtttcctggtggacccagtccggaatcagcggttgtacgtccatgaggccgttaaagcaggtgtcgtcggaccggagttgcatgagcagttgttaagcgctgagaaagccgtgaccggctacagggatccatactcaggttcgaccatttcactgtttcaggctatgcagaagggtttggtgctgcggcagcacggaattcgcttacttgaagcccaaatcgctacaggtggaatcattgacccagtacatagtcacagggtgcccgtagatgtggcctatcagcggggatatttctctgaggagatgaatagagttctagcagatccctctgatgacaccaaggggttctttgacccaaatactcacgagaatctgacgtatagacagctcctggagagatgcgtcgaagatcctgagactggcttgaggcttttgccgctaaagggcgcagagaaagcagaggtggtagaaaccacacaggtatacacagaggaggagacacgacgcgcatttgaggaaacccagattgatatcccagggggtgggtcccacggcggatccactatgtcgctttgggaggtaatgcagtccgatctgatcccagaagaacagagggcccagctaatggccgatttccaggcaggccgagtgacaaaggaacggatgatcatcatcattatagagatcatcgaaaaaaccgaaataataaggcaacagggcctcgcaagctacgactacgtaaggcgacgcttaaccgccgaagacttgtttgaggccagaatcatttctctggaaacctataacctcctgcgcgagggaacgaggagtctgcgtgaagctctggaggctgaatccgcctggtgctatctgtatggcaccggatctgtagccggtgtgtacctccctggaagccgacagacactgtcgatttaccaagccctgaagaaggggcttctttccgctgaggtcgctaggttacttcttgaagcacaggcagcaactggatttctgctggatccagtcaaaggcgagcggcttacagtggatgaggccgtgcgcaaaggcctcgtcggccctgagttacacgataggctactctcagccgaacgcgcagtgaccgggtacagagatccctacactgagcagactatcagtctattccaggccatgaagaaggaactgatccccacagaggaggcattaagactcctagacgcacagcttgccacaggaggaatcgtggacccacggctcgggttccatctgcccttagaagtggcttatcagcgaggctatcttaacaaagacacacacgatcagttgagcgagccttctgaggtcaggtcctacgtggatccatcaactgacgagcgtttgtcttatactcagctgctgagaagatgtagacgcgacgatggcacaggacaactgctcctgcctctgtcagatgcacggaagctcacattccgaggccttaggaaacagattacgatggaagagcttgttcgaagccaggtaatggacgaagccacagcccttcagctcagagagggcttgactagcatcgaggaggtcactaagaatctgcagaagtttttagaagggacgagttgtattgctggagtcttcgttgacgcgacaaaggagcgactgtccgtgtatcaggccatgaagaaggggattataagacccggtaccgcgttcgagctactggaggcacaggcagcaacaggctacgtcatcgaccccatcaaaggtcttaaacttactgtggaggaggctgtacgaatggggatcgttggtccagagttcaaggataaactgctgagcgccgaaagagcagtcacaggatataaagatccttatagcggtaaactcatttctctgttccaagctatgaagaaggggctgatcttgaaggaccacggaataagactattggaggcacagatcgccactgggggaatcatagacccagaggaatcccaccgtttgcctgtggaggtggcttataagagggggctatttgacgaagagatgaatgagatcctgacagacccctcagacgataccaaagggtttttcgacccgaacactgaggaaaaccttacatacttacaactaatggagcgctgcataactgacccccagaccggactgtgcttgctaccactgaaggagaagaagcgagaacgtaagacctcctcaaaatctagcgttagaaaacgtcgcgtggtcatcgtggacccagagaccgggaaggagatgagcgtctacgaggcctacagaaagggacttatagaccatcaaacgtacctggaactgagtgaacaggaatgcgaatgggaggaaataaccattagttcctccgacggcgtcgtgaagagcatgattattgataggcggtctggacggcaatacgacatcgacgatgccatagccaaaaacctaattgaccgctccgccctggaccagtaccgggcaggtaccttatccatcaccgaattcgccgatatgctgtccggcaatgctggtggtttccggtcacgctcaagttctgtcgggagctctagctcctatcccatcagccctgccgtgagccgcactcagttggccagctggtccgaccccaccgaggagacgggtccggtggccggaatcctggatactgaaactctcgagaaggtgagcattactgaggccatgcaccgcaatctcgtggataacatcacggggcagcgtctgttggaggcgcaagcgtgtaccggtgggattatcgacccctccaccggggagaggttccccgtaacagatgcagtgaataagggactggtggacaaaatcatggtggacagaattaatttggcccaaaaggccttctgtgggtttgaagaccccagaaccaaaacgaaaatgtctgccgctcaggccttgaaaaaaggctggttgtattacgaagccggacagcgtttcctcgaagttcagtatctgaccggcggactgatcgaaccagatacccccggacgggtacccctggacgaggcactgcagcgtggtactgtcgacgctcgcaccgctcaaaaattgagagacgtcggcgcttactccaagtatctgacatgtcccaaaaccaagctgaaaatcagctacaaagatgctttagacagatccatggtggaggaagggaccggactaagactgttggaagcagccgctcagtcaacgaagggctactactctccgtacagcgtctcaggctcaggatcaacagctgggtcacggacagggagccggactggcagcagggccggatcccgcaggggatcctttgatgccacagggagcggcttctccatgacatttagctctagttcctactcaagctccggctatggtcggagatacgcttccgggtccagcgcctcgctgggtggccctgaaagtgccgtggcataa

SEQ ID NO: 235208 - DNA, 13644 bp, synthetic construct
  misc_feature 1..13644: note = Description of Artificial Sequence: Synthetic coding sequence
  source 1..13644: mol_type = other DNA
atggaacccagcggatccttgtttccctcattagtggtagttggccacgtcgtcactctggcagcagtctggcattggcgtagaggtcggaggtgggctcaggacgaacaagatgagcgtgatagggttcagaagaaaacctttacaaagtgggtgaataagcatcttattaaggcacagcgtcacatctccgatctctacgaagacctccgggacggacacaacctaatatctctgcttgaagttctgtcaggcgattctcttcctagagaaaaaggcagaatgcgatttcataagctgcagaacgtgcaaattgccctcgattaccttcggcatcgacaggtcaagttggtgaacattcgcaacgacgatattgcagatgggaaccctaagctcactctaggcctaatttggactatcatcttgcatttccagatttccgatatccaagtgagcggacagtccgaagacatgacagccaaggagaagttgctcctgtggtctcagaggatggttgaaggctatcaggggcttcgctgtgataattttacctcatcgtggcgcgatggcagattgttcaacgccattatccaccggcacaagccactgctgattgatatgaacaaggtgtatagacagactaatttagaaaaccttgatcaagcctttagtgttgccgaaagggacctgggcgtgacccggctgctagaccccgaagatgtggacgttccacagccggacgagaagtccatcattacttacgtgtcctcactttacgacgccatgccaagagtgcctgacgttcaggatggggtgcgcgctaacgaattacaattgcgatggcaggagtaccgcgaactggtgctcctgctgcttcagtggatgcgccatcacacagccgctttcgaagagcggaggttcccctcaagtttcgaggagatcgagatcctgtggtcccaatttcttaaattcaaagaaatggaactgcctgccaaagaagcggacaagaatcggtctaagggtatctaccaatctctagagggggctgtgcaagcagggcagctaaaagtgccacccggataccaccccctagatgttgagaaggagtggggcaagctacatgtggccatcctcgaaagagaaaagcaactgagaagcgagttcgagaggctggagtgcctccagcgcatagtgacaaagttacagatggaggcgggactctgtgaagaacagctgaaccaggctgacgccttattgcaaagcgacgttagacttctggccgcaggaaaagtgccacagagggccggagaggttgaacgtgatctggataaagctgattcaatgatccgcctgctgtttaacgacgtacagacactgaaggacggcagacatcctcagggcgagcagatgtatcgtagagtctacaggttgcacgagcgactcgttgcgattcgcaccgagtataatcttagattgaaggccggtgtggccgcacctgccacccaggtcgcccaggtgactctacaatccgttcagcgtcgcccagagctggaagactccacactgagatacctgcaggatctcctcgcatgggttgaggaaaatcaacacagggtggatggcgcagagtggggtgtggaccttccctctgtggaagctcagttaggctcgcatagaggattacatcagtctattgaggaatttcgtgccaaaatcgagagggctaggtctgacgagggccagctgagccccgctacaaggggagcttaccgggattgccttggtagacttgatctccagtacgccaagctgctcaactcctcaaaggcacgattacgctcgctggaatccttgcactcttttgtcgccgctgcaactaaggagcttatgtggctcaacgagaaagaggaggaagaggtgggcttcgattggagcgatcggaataccaatatgacagctaaaaaggagagttacagcgccctcatgcgcgagttggaacttaaggagaagaaaattaaagagctgcagaatgccggagataggctgctccgtgaagaccatcctgcacggcctacagtggaatcattccaggcagcgctgcagacacagtggtcttggatgctgcagctgtgctgttgtattgaggctcacctaaaagagaacgcagcatattttcagttcttcagcgacgtcagggaggctgagggtcagctgcagaagctacaggaggccctaaggagaaaatattcatgcgaccgatccgcgacagtgacccgcctcgaagacctgctgcaggatgctcaagatgagaaagagcagctcaacgagtataaaggacatctatcaggacttgcaaagcgcgcaaaggctgttgtccagctcaagcctagacatcccgctcacccaatgaggggccgtttacctctgttggccgtttgcgactacaagcaggtggaggtaacagtccacaagggcgatgaatgccagctggtcggccctgcccagcctagtcactggaaagtgctctcatctagcggaagtgaggccgctgttcctagcgtgtgcttcctggtccccccacccaatcaggaagcacaagaggcggtgacccgcctcgaggcacaacaccaggccctggtcacgctgtggcatcagttgcacgtggatatgaaaagtttgctggcctggcagtcccttcggagagatgttcagcttattcgatcctggagcctggccacattcaggacactgaagccagaggagcaaaggcaagccttacatagtctggaactgcattaccaggctttcctccgcgattcccaggacgccggtggcttcggaccagaggaccgcttgatggctgaacgcgagtacggaagttgtagccaccattaccagcagctcctgcagagcttggagcaaggcgctcaggaagagagcaggtgccagaggtgcatttccgagctcaaagacatcagactgcagttggaggcatgtgaaacacggactgtgcatcggctcagactgcctcttgacaaggaaccagcaagggaatgtgctcagagaatcgctgaacagcaaaaagcccaggccgaagtagaagggcttggcaaaggagtcgcgagactgtcagctgaagccgagaaggtcctcgcgctgcctgagcccagtcccgctgcccctactctgcgtagcgaactcgagttaactctggggaaacttgagcaggtcagaagtctgtcagcaatttacttagagaaattgaagactatctccctcgtgattagaggcacgcaaggagctgaggaagtgcttagggcccacgaggagcaattaaaagaggcccaggccgtcccagccactctgcccgaattagaggctacgaaggcgagcctcaaaaagttaagagcccaggctgaggcgcagcagccaacttttgacgccctccgggatgagctcaggggcgcacaggaggtaggtgagaggttgcagcagcgacacggagaaagagacgttgaggtggaacggtggcgcgagagagttgcacaactgctcgaaaggtggcaggccgtgctggcgcagacggatgtcagacagcgagaactggaacaactaggcaggcagttaaggtactacagagaatccgccgatcccctcggagcctggctgcaggatgccagacgtaggcaggaacagatccaggcgatgcccttagccgactcccaggccgtgcgggagcagttaagacaggaacaggcattgctggaggagatagagagacatggagaaaaggtggaggaatgccaacggttcgcaaagcaatacattaacgccatcaaggattacgagctgcagctggtcacctataaggcccagttggagcccgtggcaagccctgctaaaaagcccaaggtccagagcggctccgagtctgtgatccaggagtacgtggacctacgcacccattattcagaactgaccacgctaactagtcaatatatcaaattcatcagcgagaccttaagacgaatggaagaggaagaaagattggccgaacaacagcgtgcagaagagagggagaggttagctgaggtcgaagccgctctggaaaagcaaaggcagctggcggaagcgcacgcccaggcgaaagctcaggccgagagagaggcaaaggagctccagcagcgtatgcaggaggaggttgtgcgacgcgaagaggcagctgtggacgcccagcagcagaagcgatcgattcaggaggaacttcagcagctccggcagtcttcagaagccgagatacaggcaaaagccagacaggccgaggcggcagagaggtcacgcttaagaattgaagaagaaatacgggtggtccgtctacagctcgaagcgaccgagagacagagaggcggtgcggaaggagagcttcaagccctacgtgcccgtgccgaagaagctgaagcccagaagcgacaggcccaggaggaagcagagcgactacgcaggcaggtccaggacgagagccagcgtaagcgccaggccgaagtggaattggcctcccgtgtgaaagcagaagccgaagccgctagagagaagcagcgggcactgcaggctctggaagaactgcgccttcaggcagaggaggctgaacgaagattgcgtcaggcggaggttgaacgagcacggcaagtgcaagtagccttggagactgctcagcgatccgccgaggcggaattgcagtcaaagagagccagctttgctgaaaagaccgctcagctggaaagatctctgcaggaagaacatgttgcggtagcacagttgcgagaggaggcagagcggagagcacagcagcaagcagaagcggagcgggctagagaggaggcagagagagagctcgagcgctggcagctcaaggcaaatgaagcgctcaggttaaggctgcaggccgaggaggtggctcagcagaagtcccttgcgcaggcagaggccgaaaagcagaaagaggaagcggagcgagaagcacggcgacgtgggaaggcggaggaacaggcggtgcggcagcgggaactggcagagcaggagttagagaaacaacggcaactagcagaggggaccgcccagcagcgcctggccgctgagcaagaattgataagactgcgggcagagacggagcagggagaacaacagagacaactgctcgaggaggaactggctagacttcagagagaggcagctgctgctacacagaagcgtcaggagttagaggctgaactcgcgaaagtgcgagccgaaatggaggtcttacttgctagtaaggcaagagccgaggaggagtcgcggtcaacttctgaaaagagcaaacagcgcctcgaggcagaggccggtcgttttcgggagctggctgaagaagccgcaagactgcgggctctcgcagaagaagctaaacggcagcgccagctcgctgaggaggacgccgctcgacagcgtgccgaggctgaaagagtactcgccgagaagctggcagctatcggagaggccacgaggttaaagaccgaagcagagatcgctcttaaggagaaggaggcagagaatgaaaggctccggaggctggcagaggatgaggccttccagaggaggcgtctggaggaacaggccgctcagcacaaagctgacatcgaggagagactcgctcagctacggaaagcctctgattcagaattggagcggcaaaagggcctggtcgaggatacattacggcagcgcagacaggtggaggaggagatcttagcccttaaggctagcttcgaaaaagcggctgccggaaaagcagagctcgagctcgaattgggcagaatccgatcaaatgcggaagatacgcttagaagtaaagagcaggcggaactagaagcagcaagacagcggcagctggctgcagaggaggaaagaagacggagagaggccgaggaaagagtccaaaaatcactggccgcagaggaagaggccgcacgccagcgcaaggccgcattggaggaagtcgaaagattgaaagcaaaggttgaggaggccaggcgcctcagagagcgtgcggagcaggaaagtgccaggcagctccagctggcacaggaggctgcccagaagaggctacaagctgaagagaaggctcacgccttcgccgtgcaacagaaggaacaagaacttcagcagactttacagcaggagcagtcggtgttggatcaactgcgtggcgaggcggaggccgcacgccgtgctgctgaggaggcggaggaggctagagtccaggctgagagagaggccgcacagtcgcgaagacaggtcgaagaggccgagcgcctcaagcagtccgcagaggaacaggctcaggccagggcgcaggcacaggctgccgcagagaagctgcgcaaggaagcggagcaggaagccgctcggagggcccaggcggagcaggcagctctgcgtcagaagcaggcagccgatgctgaaatggaaaaacataagaaatttgccgagcagactctcagacaaaaggctcaggtcgagcaggaactcacaacattgagactgcaactggaggagacagatcatcagaagaatcttttggatgaggagctgcagcgattgaaagctgaagccacagaggcggctcgccagcgttctcaggttgaggaggagcttttttcagtgcgcgtccagatggaggagttgtcaaaactcaaggccaggattgaagcagaaaaccgggctctcattctgcgcgataaggacaatacacagaggtttcttcaggaagaggccgagaaaatgaagcaggtggcagaggaggcagcgagactcagcgttgccgctcaggaagcggctcggctgcgccagcttgccgaagaagatctggctcaacagagagctctggccgaaaagatgctgaaggagaagatgcaggctgtgcaagaagccactaggttaaaagcagaagccgaactcttgcagcagcaaaaagaactcgctcaggagcaggcgaggcgcctccaggaggataaggagcagatggcccaacagctcgccgaggagacgcagggattccaaaggaccctcgaagccgagagacagcgacagctcgaaatgtccgctgaagccgagcggctgaagctgagggttgccgagatgtcacgcgcacaagctagggccgaggaagacgctcaaaggtttaggaaacaagctgaagaaattggggaaaagttacaccggaccgaattggcaacacaggaaaaagtaacactggttcagactttggagatccaacgacagcagtctgaccacgacgccgagcggcttcgtgaagccattgccgagctggaacgggaaaaagagaaactgcagcaggaggccaagttgctccagttaaagtctgaagagatgcaaacagtacagcaagagcagctgctacaggagacacaggcccttcagcagagcttcctctcagagaaagatagcctgctgcaaagagagaggttcatcgaacaggaaaaagcaaaactggaacagttgttccaggatgaagtggcaaaggcccaacaactgcgagaagaacaacagcgacaacagcagcaaatggaacaggaacggcagcgcttggttgcctcgatggaagaagccagaaggcgacagcacgaggccgaagagggcgtgaggagaaaacaggaagagctccaacagttggaacagcagcggaggcagcaggaagagttgctggccgaggagaaccaacgcctgcgggagcaactgcagttgctggaagaacagcaccgggcagcgctggcccattctgaggaggtcactgcaagtcaggtggcagccaccaaaacactgccgaatggcagggacgccctggacggccctgccgcagaagctgagccggaacattcatttgacggcttacgccgaaaggtctctgctcagcgcctgcaggaggccggaattctcagtgccgaagagctgcagcgattagcgcagggtcacactaccgtcgatgagctggctagacgagaagacgtgagacactacttgcagggacgatcaagcattgctggcctgttgttgaaggctactaatgagaaattgagtgtttatgcagcactgcagagacaattactgagccctggcaccgctttgatcctgctcgaggcacaggccgcttcgggctttttgcttgacccagttcgcaaccggaggttgacagtcaacgaggctgtgaaggaaggcgttgtaggccctgagctacaccacaaactattgtcggctgagagggcagtgacaggctataaagacccttatacaggccagcagatcagtctgttccaggccatgcagaagggcttgatagtgagggaacacggtattcgattgttggaagctcagattgcaacggggggtgtgatagatccagttcacagccacagggttcctgtggatgttgcatacagaagagggtacttcgacgaggagatgaatcgagttctggcagatccttcggatgatactaaagggtttttcgatcccaatacgcacgaaaacctgacatacctgcagctgctggaacgctgcgtcgaagacccggaaaccgggttgtgtctgctgccgctgaccgataaggcggctaaaggcggtgaactggtgtacactgacagtgaagccagagacgtgtttgaaaaagccactgttagcgccccattcggcaaatttcaaggtaagacagtgaccatctgggagattataaattcggagtactttacagccgagcaacggagagatctcctaaggcagtttcggaccggcaggatcacagtggaaaagatcatcaagataattattaccgtagtggaggagcaggagcagaagggacggctctgctttgaaggactgcgcagcctagtgcctgctgccgagttgctcgaatcacgcgtaatcgatcgcgaactctaccagcagttacagagaggtgagcgaagcgtgcgggacgttgcagaggtcgacaccgtgagaagggctttgagaggtgctaacgtgatcgccggagtctggctagaagaggccggacagaaactgtccatttataatgccctgaagaaagaccttcttccatctgacatggctgtggccttgttggaagcccaggcaggcaccggacacatcattgatcccgcaacttccgctagactaacggttgacgaagccgtccgggcaggcttggtaggaccggaattccatgagaagttgctgtccgcagaaaaggccgtcactggctaccgggatccctacaccgggcagagtgtttcacttttccaagctctgaaaaagggactcatccctcgagagcagggcttgaggcttcttgacgcccaactctcaacagggggaattgtagaccctagtaagtcccacagggtgccactggatgtcgcttgcgcacgcggatgcttggatgaggaaacatctagggcactcagtgctcctagggctgacgccaaagcttattctgaccctagcaccggggagcccgctacatacggagagctgcagcagcgctgcagacccgaccagttaacgggcctttcactcttacccctcagcgaaaaggctgccagggcgcgacaggaagagctgtacagtgaactccaggctcgggagactttcgagaaaacccccgttgaagtcccagtgggaggctttaaaggaagaactgtgaccgtgtgggaactgatcagctctgagtattttactgccgagcagcgccaggaactgctgcgccaattccgtactgggaaagtcaccgttgagaaggtcatcaaaattcttattacaatagtagaggaagtcgagaccctgcgacaggaacgactgtcgttcagcggtcttagggcccctgttcccgctagtgaactcctggcttccggcgtgctttcccgtgcccagttcgagcagctaaaggacggcaagaccactgtgaaggacctttctgagctgggcagtgtcaggacattacttcaaggatccgggtgtctggcgggaatctatctggaggacacaaaggagaaagtaagcatctatgaggccatgagaagaggtctgctgcgggctaccactgccgctttattattagaagcccaggcagctaccggcttcctcgtcgaccccgtgaggaaccagaggttatatgtgcacgaagcagtgaaagcaggggtggtgggtccagagctccacgagcagctcctcagcgccgaaaaggcagtgactggctaccgagatccctatagcgggtctactatcagcctgtttcaggccatgcagaaaggactcgtattgcgacagcatgggatccggttgctcgaggcccagatcgctacaggcggaattatcgacccagtccactcccacagagtaccagtggatgttgcttatcagcgtggctacttctcagaggagatgaaccgggtcctggccgacccctccgatgacacgaaaggcttctttgatccgaacacccatgaaaacctgacgtaccgacagttattagagagatgtgtggaggatcctgaaaccggactccggctgctgcctctcaaaggcgcagagaaagccgaggtcgtagaaacaactcaggtttataccgaggaggagactagacgggcttttgaagagacacagattgatatcccaggaggtggtagccatggaggttccaccatgagcttgtgggaggtgatgcaatccgacttgatcccggaagaacaacgcgcacagttgatggccgactttcaggccggtcgcgtcactaaagagcgaatgatcataattatcatcgaaattatcgagaaaacggagattatccgacagcagggcctcgcaagctacgattatgtcaggagacgactgaccgcggaagacctctttgaggcgcgtatcatcagcctagagacatacaacctgttgcgggaaggcacgagaagcctgcgcgaggcactcgaggccgaaagtgcttggtgctatctctacggcactggaagcgtggccggtgtttatctgcctggatccagacagaccctttcgatttatcaggccttgaagaaggggttgctgtccgccgaggtggcccgactgctcttagaggcccaggccgctacgggattcctcctggacccggtgaagggcgaacggttgactgtggatgaagccgtgagaaagggactcgtggggcctgagcttcatgaccgcctactgagcgcagagcgcgcagtcacagggtatagggatccctacacagagcaaactatctccttgtttcaggccatgaagaaggagctcatcccaaccgaggaagcgctgagactactcgatgctcagctcgctaccgggggtattgtggacccacgcttaggattccacctcccactggaagttgcttatcagcgaggttatcttaacaaagacacacatgatcagctatcagaacccagtgaggtgcgctcctacgtggacccttccacagacgagcgcctctcctacacacagctgctcaggcggtgccgaagggacgatgggaccggacaattactgcttcccctcagtgatgcacggaagctcactttccggggactccggaagcagataaccatggaagaactggtgaggtctcaggtgatggacgaagctaccgccctgcaactgcgggagggtctgacctcgatcgaagaggtgacgaagaacctgcagaagtttctcgagggaacaagctgtattgccggtgtgtttgtcgacgcgacgaaagagaggctgtcggtgtatcaggccatgaaaaaaggtattatcagaccaggtacggctttcgagctgctggaggctcaggctgcaactggctatgtgattgaccctatcaagggtttaaagctaaccgtggaagaggctgtgaggatgggcatcgtgggccctgagttcaaagacaaactgctgagcgcagaacgagccgtcactggctataaggatccgtatagtggaaaactcatttcactgtttcaggccatgaagaaggggttgattctgaaagatcacgggatccgactgcttgaggcccaaatcgccacgggaggaatcatcgaccccgaggagtcccaccgcctgccagtggaagtagcttataagcggggtctgtttgatgaagagatgaacgagatcttaaccgatcctagcgacgataccaaaggctttttcgatccgaacaccgaggaaaatcttacttatttgcagcttatggaaagatgtataaccgacccgcaaaccggtctgtgtttactgcccctcaaggagaaaaagagggagcggaagacctcatcaaaatcctcagtgaggaaacgaagggtggtgatcgtagatccagagaccggaaaagaaatgtctgtgtatgaggcctacagaaagggtctcatcgaccatcaaacctatctggaactcagcgaacaggaatgcgaatgggaagagatcacaatttccagcagcgacggcgtcgttaaatcaatgattattgaccgacgatctggacgccaatacgatatcgatgacgccattgctaagaacttgatcgatcggagtgctctcgaccagtatcgcgctggaaccctgagcattaccgagttcgctgatatgttgagcggtaatgctgggggattcagaagccggagttcgagtgtgggcagttcttcgtcctaccccatttcaccggctgtgtccagaacccagctggcctcctggagcgaccccaccgaagaaaccggacccgttgctggcattctggacacagagactttagaaaaggtgtcaattacagaggccatgcacagaaatctggtggataatataaccggccagcgattgttggaagcgcaggcctgcacaggtgggattattgatccttctaccggcgaaagattcccggtcacagatgcggttaacaaaggcttagtcgacaaaataatggtcgatcggatcaatctagcacagaaggctttttgtgggttcgaagacccaaggacaaaaaccaagatgagtgcagcacaggctttaaagaaagggtggctgtattacgaagccggacaaaggtttctagaggtgcagtacctgacgggcggtcttattgagccagacacaccaggcagggtccccctcgatgaggctctgcagcggggaaccgtcgacgctaggaccgcgcaaaagttgcgggacgtgggtgcgtactccaagtatctgacatgccctaaaactaaactcaaaataagctataaagacgcccttgacaggtccatggttgaggaggggaccgggcttagactgttagaagcagcggcacagagcactaaggggtattattccccttattctgtttcaggttccgggtccaccgctgggagcaggacagggtccaggaccggttctcgcgcagggtctcgacgtggaagctttgacgcaactggctccggattttcaatgaccttttcatcttccagctactcatcttccggatacggacggcgttacgcgagcggctcttccgcaagtctcggcggacctgagagcgcggtggcatag

SEQ ID NO: 235209 - DNA, 13578 bp, synthetic construct
  misc_feature 1..13578: note = Description of Artificial Sequence: Synthetic coding sequence
  source 1..13578: mol_type = other DNA
atggacccatctagggctattcagaatgaaatctccagcctgaaagatgagagggatcgtgtccaaaagaaaaccttcacgaagtgggtaaataaacatctcattaaagctcaacgccacatttctgacttatatgaagatcttagagatggacataatctgataagtcttctcgaagtgctgtcaggcgactcgctccctcgggaaaaaggacggatgagatttcacaagctgcagaacgtgcagattgccctggattatctgaggcaccgtcaagtgaaactggtaaatattagaaacgacgatatcgccgatggcaatccaaaactcactttgggcctgatttggaccatcattctccattttcagattagtgacatacaggtgtccgggcagtctgaggacatgactgccaaagagaaacttcttctctggtctcagcgtatggtggaggggtaccaaggcctccgatgtgataacttcaccagctcatggagagacggacgactttttaacgccatcatccacagacataaaccacttctgattgacatgaacaaggtttaccgtcagaccaatctcgagaatttggaccaggccttttcggtcgccgagcgtgacctcggagttacacgactgctggatccagaggacgtggacgtgcctcagcccgatgagaagagtatcatcacatatgtgagctccctttacgatgcaatgcccagggtgcctgatgttcaggacggagtgagagcaaacgaactccaattgcgctggcaggagtatcgcgagctagtgctacttttactgcagtggatgagacatcacacggccgcttttgaagagaggcgctttccctctagttttgaggagatcgagatcctatggagccagttcttgaagtttaaagagatggagttaccagccaaagaagcagataagaaccgctctaaggggatttaccagtccctcgagggagccgtgcaggctgggcagctcaaggtgccccctggctaccatcccttggacgttgagaaagaatggggaaagttacatgtggctatacttgaaagagagaaacagctgcgctctgaatttgagcggctcgagtgtcttcagcgtattgtcaccaagcttcagatggaggccggtctatgtgaggagcagttaaaccaggctgatgcattactgcaatccgacgtgcgcctgcttgctgcaggtaaagtgcctcaacgcgctggtgaggtggagcgcgatctggacaaagcggacagtatgataagattgctctttaacgatgtgcagaccctaaaagacggacgccacccacagggagagcagatgtacagacgagtatacagactgcacgagaggctggtagcaatacgcaccgaatataacttgagattgaaagctggggtggcagccccagcaacacaggtggcacaggtgactctgcaaagcgtacagagacgccctgagctggaagactctacacttaggtacctccaggacctcctggcctgggtggaggagaaccagcacagagtggacggggcagagtggggagtggatctgccgtcagtggaggcacagctgggctcccatcgtggactccaccagagtattgaagaatttcgggcaaagatcgaacgcgctcggtcagacgagggccaactgtcccctgccactaggggcgcataccgtgactgtttaggtagactggatctccagtacgctaaactcctgaattccagtaaagccagactgcgatcccttgagagccttcacagcttcgtggcagctgcaaccaaggaattgatgtggctgaatgaaaaagaggaagaggaggtgggtttcgattggagcgacaggaacactaacatgaccgctaagaaggaatcttactctgccctaatgcgcgagttagagctcaaggaaaagaaaattaaagaactacaaaacgccggtgaccggctcttacgagaggatcaccctgcaagacctactgtagagtcattccaggctgcactgcagacacagtggagttggatgctgcaactttgctgctgtatcgaggctcaccttaaggagaatgccgcttactttcagttcttctcagatgtgcgagaggccgaagggcagcttcagaagctacaggaggcactgcggcgaaagtattcgtgtgacaggagtgccactgtaacacggttggaggacctcttgcaggacgcccaggatgagaaggaacagttaaatgagtacaagggtcatttgagcggccttgccaagcgagcaaaggccgttgttcagttgaagccaagacacccagcgcatcccatgcgaggacgccttccgctgctggccgtgtgtgattacaagcaggtagaggtaactgtgcacaaaggggatgagtgccagctcgtgggacccgcacagccaagccattggaaggtactgtcatcgagcgggagtgaggctgccgtcccgagcgtgtgcttcctggttccaccccctaaccaggaagcacaggaggcagtgaccagactcgaggcacagcaccaagccctggtaacactatggcaccagcttcacgtggacatgaaatccctgctagcttggcagtcccttcgcagagacgtacagctcatcagaagttggagtctggctaccttccgcaccttgaaaccagaagagcaaaggcaagccctgcacagtctggaactgcactaccaagccttcctccgggatagtcaagacgccggtggctttgggcctgaagatcgcctgatggcagaaagggagtatggatcttgcagtcaccattaccaacagcttctgcaaagcctcgagcagggagcccaggaagaatcaaggtgccagagatgcattagtgagctgaaagacatcaggctgcagctcgaggcttgcgagacgcgaactgtacatagacttcggctgcccctggacaaagagcccgcacgtgaatgcgcccaaagaatcgcagagcagcaaaaagcgcaggccgaagtggaagggctgggaaagggagtggcacggctgagtgcagaggcagaaaaggtgctggctttaccagagcccagtccagctgctcccaccctacgatccgagctggagctgactttaggtaagctagagcaggtgcgaagcctgagcgccatctatctggagaagctgaagactatctccctggttatccggggaactcagggcgcagaggaagtactaagggcccacgaggagcagctcaaggaggcacaggcagttcccgcaactctacccgagctcgaggccacaaaggcctccctcaagaagctcagagcacaggctgaggcccagcagcccaccttcgatgcactccgagacgagctgagaggcgctcaggaagtgggcgaacggctgcagcagcgccacggagaaagagacgtggaagtggagaggtggagggagcgagttgcgcaactgctcgaacggtggcaggccgtgctggctcagaccgacgtccggcagcgggagctcgaacagctcggacgacaactgagatactatcgcgaaagcgcggaccccctaggggcatggctgcaagacgccaggcgccgtcaggagcaaattcaggcaatgcctctggccgatagccaggctgtgcgtgagcagcttcgccaggagcaggctttgcttgaagaaatcgagagacatggagagaaggttgaggagtgccagcgctttgcaaaacagtacattaatgctatcaaagattatgagctccaactagtgacctataaggcccagcttgagcctgtggcatcaccagctaaaaaaccaaaggtccagtctggctctgaaagcgttatacaggagtatgtcgacttgcgaactcattactcggaactgaccactttgacatcccagtatatcaaattcattagtgagaccctgaggcggatggaggaggaagagagattggcagaacagcagcgggctgaggaacgggaacggttggcggaggttgaggccgctctggagaaacaaaggcagcttgcagaggcccatgcccaggctaaagctcaggccgagcgcgaggctaaggaactgcagcaacggatgcaggaagaggtcgtccggagggaagaggctgccgtggacgcacagcagcagaagcgctccatccaggaagagctgcagcagttgaggcagtccagtgaggctgaaatccaggccaaggcccgtcaggccgaagccgctgagaggagccgacttcgaatcgaggaggaaattcgggttgtacggctgcagttggaagccacagaacggcagaggggcggagccgagggagaacttcaggctctcagagcccgtgccgaggaggccgaggctcagaagcgccaggcccaagaggaagcagaacgcctcagacgtcaggtgcaggacgagagccagcgcaagcgccaggccgaggtggagcttgcgagcagggtcaaagccgaagccgaggcagccagagaaaaacaaagagccctccaggcgctggaagagctccgtcttcaggcagaggaggcagagcgacgcttgcggcaggctgaggtcgaaagggcacggcaggtgcaagtggcactcgagaccgcccagcgttctgccgaagccgagcttcagagcaagcgggcttccttcgctgagaagacagcacagctcgaaaggtcgctgcaagaggaacacgtggcggtagctcaactgcgagaggaagcagaacgccgagctcagcagcaggctgaggccgaaagggctagggaggaggctgagcgtgagctggagagatggcagctgaaggcaaacgaagccctccggctgcgccttcaggccgaggaagttgctcaacagaagtctcttgcccaggcggaggctgaaaagcaaaaagaggaagcagagcgagaggccagacgcagaggcaaagcagaggagcaggccgtacgacagagggagctggctgaacaagaactcgaaaaacagcgtcagctggcggaaggcacagcccagcagcgcctggctgctgagcaggagctcattaggctgagggcagaaacggaacagggcgaacagcagagacaactcctggaagaagaactggcaagactacagcgagaggcggctgccgctacgcagaagagacaagaactggaggctgagctggctaaggtgcgagccgagatggaggtgctgctcgcttccaaggctcgcgctgaggaagagagtaggagcacttctgagaagtctaagcagcggctagaggctgaagcgggtaggtttcgtgaactggccgaggaagcagccagattgcgagccctcgcggaggaggccaagcgacaaagacaattagctgaagaggatgcggcacgtcagcgcgctgaagcggaaagagttctcgctgagaagttggccgctataggggaggccaccaggttgaaaaccgaagccgagatcgctcttaaggagaaagaggctgaaaacgaaaggttacgcaggcttgccgaggacgaagcctttcagagaagaagactggaggaacaggcggcacagcacaaagccgatattgaggagcggctcgctcagctccggaaagcctcagattcagaattggaaagacaaaaaggattagtcgaagacacgctgagacagagaagacaggttgaagaggaaatccttgcgcttaaagcatctttcgagaaagctgcagccggtaaagccgagttagagctcgaactaggtcggatacgaagcaacgcagaagatacccttcgttcaaaagaacaagctgaactggaagccgctcgacagcgccaactggcggcagaagaggagcgacgcagacgtgaagccgaggagagggtgcaaaaaagtctcgccgctgaggaggaggccgcaaggcagcgcaaagctgccctggaagaggtggaacgcctgaaagccaaagtcgaggaagcccgacgcttgcgggaacgagccgaacaggaatctgccaggcagctccagttggcccaggaagcagcccagaaaaggctgcaggctgaagaaaaggctcatgcattcgcggttcagcagaaggagcaggagcttcaacagactctgcagcaggagcagtctgttctcgaccagctaaggggggaggcagaagcggcacgacgcgctgcagaagaggctgaagaagccagggtccaggccgaacgggaggcagcccagtcaaggaggcaggttgaggaggcagaacgactgaagcagagcgcagaagaacaggcacaggcacgcgctcaggcgcaggctgcagctgagaagctacgcaaggaggcagagcaggaagccgcacgtcgcgcacaggcagagcaggcggcactgagacagaaacaagccgctgatgcagaaatggagaaacacaagaagttcgccgagcagacgctgcgtcagaaggcgcaggtcgaacaggagctgaccaccctcaggcttcagctagaggagaccgaccaccagaagaacctcctagacgaggagttgcagcgattgaaggcagaggccacggaagcggcaaggcagcgctcacaagtggaggaggaactgttctctgtccgtgtgcagatggaggaactcagcaagctgaaagccaggatcgaagctgagaatagagctctaattttgcgggataaagacaacactcagcgtttcctacaggaagaggcggaaaagatgaagcaggtcgccgaggaggctgccaggttaagcgttgcagcacaggaggcggctaggctccgacagttggccgaagaagacctcgcgcagcaacgcgctcttgccgagaagatgcttaaggaaaagatgcaggccgtgcaggaagcgacaagactcaaggccgaggccgaactgctgcagcagcagaaagaactggcccaggagcaggcacgccgactacaggaagacaaagaacagatggcccagcagctagctgaagagacccagggatttcaaagaactctcgaagcggaacggcaacgccagttagaaatgtcagccgaggctgaacgcctgaagctgcgggtcgccgagatgagcagagcccaggcccgagcagaggaagatgcgcaacgtttcagaaagcaagccgaggaaataggcgaaaaactgcatcgcaccgagctagccactcaggaaaaggtcacgctggtacaaactctggaaatccagagacagcaaagcgatcacgatgcagagcgcctgcgcgaagcaattgctgagctcgagcgagagaaagagaaactgcagcaggaggccaaactgctgcaactaaaaagcgaagagatgcagaccgtccaacaggaacagctgctgcaggagacccaggcattgcagcagtctttccttagcgagaaagatagtctgcttcagcgagagcgttttatagagcaggagaaggccaaactggagcaattgtttcaggacgaggtggctaaagcccagcagctgagagaggaacagcagcgccaacaacagcagatggagcaagaacgacagcgcttggtggcttccatggaggaagcgaggcgcaggcagcacgaggccgaggagggagtacgcagaaaacaggaagagcttcaacagctagagcagcagcgacggcagcaggaggagctcttggccgaggaaaatcagaggcttcgcgagcagctgcagctgctcgaggaacaacaccgcgcagctctagcccacagcgaagaagtgacagcaagccaggtggccgcaactaagactctgccaaacggcagagacgcacttgacggccctgctgcagaggccgagccagagcactctttcgacggactccgaaggaaggtgtccgcccaaaggctgcaggaagcgggaatcctgtccgcagaggagctgcagcgactggcacagggccatacaacagtggacgaactcgcacgacgggaagatgtccgtcattacctgcagggtagaagctccattgcaggccttctgctgaaggccacaaacgaaaagttgagtgtgtacgcagctctgcagcggcaactcctctcccccggaaccgccctgatcctgctcgaagcccaagcggctagcggctttctccttgaccctgttcgaaatcggcgattgacggtcaatgaagccgtgaaagagggcgttgttgggccagaattgcatcataaactgttaagcgcagagcgcgcagttaccggatataaggacccctacactggacagcaaatctcactcttccaggcaatgcaaaaaggcttgattgtccgcgagcacggtatccgtcttctggaggcccagatcgcgacaggaggagtcatcgaccccgtgcacagtcaccgggtacctgtcgatgtggcctaccgcagaggatatttcgatgaggagatgaatagagtattggcggatccttcagatgacactaagggcttcttcgacccaaacactcatgaaaacctaacttatcttcaactcctggaaagatgtgtcgaggatccagaaactgggttgtgcctgctgcccctcaccgacaaagcagccaagggcggtgaactggtgtacactgactccgaggcacgcgacgtgttcgaaaaagcaaccgtgtctgccccttttggaaagtttcagggaaagactgtgacaatttgggaaataatcaactccgagtattttactgcggagcagcgcagagacctgttacgccagttccggaccggaagaataactgttgagaaaatcataaagatcattatcacagttgtggaggagcaggagcagaagggaaggttgtgtttcgagggtttgcgcagcctggtgcccgcagcagagctgcttgagagccgcgtgattgacagagagctgtaccagcagctccaaagaggcgaacgctctgtgcgtgatgtagccgaggttgacaccgtaaggagagctctgcgtggtgcaaacgttattgcaggtgtttggctcgaggaggccggacagaaacttagtatatacaacgccttgaagaaagatctccttccatccgacatggccgtggcgctcctggaggcgcaggccggtacagggcacatcatcgatccggcaacatcagcccgactgactgtagatgaagcagttcgagctggcttagtcggaccggaatttcatgagaagttgttgtctgccgaaaaggctgttacggggtacagagacccctacactggtcagtcagtgagcctgtttcaggctcttaagaaaggccttatccctcgcgaacaaggcctgcgtctccttgatgctcaactgagcaccggcggtatcgtggacccgtcgaaaagtcaccgagttcctcttgatgtagcatgtgcgcgtggttgcctggatgaggaaacaagtagggcactttcagctcctagggctgacgcaaaggcctattcggacccgtcaaccggcgagcctgctacctatggggagctgcagcagcgctgccgccctgatcagctgaccggtctgagtctgctgcccttatctgagaaggccgctcgggcacgacaggaagaattgtactctgaactgcaggcaagagagactttcgaaaagactcccgtggaagtacctgtggggggtttcaagggacgcactgtgacagtctgggagctgatatcttcagagtacttcacagccgagcaacgccaggaactcttgagacagtttaggactggaaaggtgactgttgaaaaagtgatcaagatcctgataaccatcgtggaagaagtcgaaactctgcgccaggagcgcttgagcttttctggcttaagagcgcctgtccccgcaagcgaacttctggctagcggcgtgctgagtcgggctcagttcgagcagctgaaggacggaaaaacgaccgtaaaggacctctcagaactgggcagtgtgcggaccctgctacaggggagcggatgtctcgccggtatctaccttgaggatactaaagagaaagtgtcaatttacgaggccatgcggcgtggcctgctgagagccacgactgctgccctcctcctagaggcccaggctgccactggcttccttgtggatcccgtcaggaaccagagactctatgtacatgaggctgtcaaagcgggtgtcgtggggcctgagttgcacgagcagctgctcagtgctgagaaagcagtgaccggctaccgagacccctactctgggtcaacgatcagcctgttccaggccatgcaaaaaggtttggtgctgcgtcagcatggcattcgcctgctggaagcacagattgctacgggaggcatcattgaccccgtacatagccatagggtgcccgtggacgttgcctatcaacgtggatatttcagtgaggagatgaaccgggtgctggcggacccttctgacgatacaaagggcttttttgatccaaatacccacgaaaacctgacttacagacaattgctcgaaaggtgcgtcgaagatccagagaccggattaaggctccttcctttgaaaggtgccgagaaagccgaggtagttgaaaccactcaggtgtacaccgaagaggagacgcgaagggcgttcgaggagacacagattgatatccctgggggtggctcccacgggggttccaccatgagcttatgggaggtaatgcagtccgacctgataccggaggagcagagggcacagctgatggccgactttcaagctggccgtgtaacaaaagagcgaatgatcataattatcattgaaattatcgagaagactgagataattcgccagcaaggccttgcctcctacgattacgtgcgccgaagactgacagccgaggacctatttgaggccaggatcatttccctcgaaacatacaatttgttaagagaaggtacaagatctctgcgagaggcactggaagccgaatcagcctggtgttacctgtatggcaccggctccgtggctggggtgtacctcccgggatctcgacagaccctgtccatctaccaggctctgaaaaagggattattgtcggccgaagtggctagattactgctcgaagctcaggccgctaccggcttcctcctggacccagtgaaaggcgaacgcttgacggtcgatgaggccgtgcggaaggggctggtgggaccagagctgcatgaccgattactctctgcagagagagcggtaactggatatcgggatccctatactgagcagacaattagtctgtttcaggccatgaagaaggagctaatccctactgaggaggctctgcgcttactagatgctcagctggctacgggcggaattgtcgaccctagacttgggttccacctcccattggaagtggcctaccaacgcggatacctgaataaggatacgcatgaccaactttccgagcctagcgaggtgagatcctacgtggacccatcaacagatgaaagactctcatatacccaactactcaggcgctgccgccgagacgacggtaccggacaactgctgctccctctgtccgacgcccgtaagctgaccttccgtggcctgcggaagcagatcacaatggaggaacttgtccggtctcaggtgatggatgaggctacagcacttcagttgcgcgagggcctaacctcaatcgaagaggtgacaaagaatctgcaaaagtttctggagggaaccagctgcatcgctggtgtgttcgtggatgctaccaaggaaagactgtctgtttatcaggcgatgaagaagggaatcatccgtccaggtaccgccttcgaactgttggaagcacaagctgcaactgggtatgtgattgatcctataaagggcctgaaactaactgtagaggaggcagtgcgaatgggaatagtgggccctgagttcaaagataagctgttgtccgcagaacgagctgtgacaggatataaggatccctatagtgggaaactgatctcccttttccaggccatgaagaagggtcttatcctgaaagaccatggcattagactgctggaggcacagattgcaacaggcggtattatcgacccagaggaatcacaccggcttcctgtcgaggtggcctacaaacggggactgttcgatgaagaaatgaatgagattctgactgacccaagtgatgacacaaaaggtttctttgatccgaacacagaagagaatctgacatacctgcagttaatggagcgttgtataactgatcctcagaccggactctgtctgttgccacttaaagaaaagaaacgcgagaggaaaactagttcaaagagttccgttcgcaaacgtagggtggttattgtcgatcctgagacaggaaaagaaatgtctgtttatgaggcctacagaaagggacttattgaccaccagacctatctggaacttagcgaacaggaatgtgaatgggaggaaataaccatctcctcctctgatggtgtagtcaagtctatgattattgatcggaggtccgggcgacagtatgacatcgacgacgccattgcaaagaatttgattgacaggtctgcactggatcagtaccgcgcagggactctgtcgatcaccgaatttgcggacatgctgtccggcaacgcagggggattccgctcccgaagctcctccgtcgggagctccagttcctatccgatctctcccgcagtctcccggacacagttggccagttggagtgaccctaccgaagaaacaggccctgtggcagggattctggataccgagacgctagagaaggtcagtatcactgaggctatgcacaggaatctggtagataatatcactggccaacgcctgctcgaagctcaggcctgcactggtggtataatagacccttccacgggggaacggtttcccgtcacagatgcagttaataagggcctggttgataagatcatggtcgatcgcatcaaccttgcccagaaggccttttgtggctttgaggaccccaggactaaaaccaagatgagcgccgcacaggcattgaaaaaaggctggctgtactatgaagcaggacagcggtttctcgaagttcagtacctgactgggggactgatcgagcctgacacacctgggcgagttccacttgacgaagcacttcagcggggtaccgttgatgccagaaccgctcagaagttgagagacgtcggtgcctatagtaagtatctgacctgtccaaagaccaaactaaaaatcagttacaaggatgcgctagatagatctatggtggaggaaggtacgggattgagattgttggaagctgctgcccagagcaccaaaggatattactcaccctattctgtttctggcagcggttctactgcagggagtaggacagggagtcggacaggcagccgcgctgggtcaagacgcggatccttcgacgcaacaggttctggttttagtatgacatttagttcaagtagttacagcagctccgggtatggcaggcgttacgcaagtggatcaagtgcctccctcggcggtcccgaatccgcggttgcttac

SEQ ID NO: 235210 - DNA, 13602 bp, synthetic construct
  misc_feature 1..13602: note = Description of Artificial Sequence: Synthetic coding sequence
  source 1..13602: mol_type = other DNA
atggctgggccattacccgacgaacaagacttcatacaggcctatgaggaagtccgggagaaatacaaagatgagagggatcgggtccagaaaaagacattcacaaagtgggtgaataaacacctgattaaagctcaacggcatatcagcgatctgtacgaagacctgcgcgacggtcataacctcataagtctgcttgaggttctgagcggggattctcttccgagagagaagggccgaatgcgattccacaagcttcaaaatgttcagattgctttggactacctgagacataggcaggtgaagctagtcaacattcgcaatgacgatatcgccgatggaaaccctaaactcacactcggcctgatttggacaattatcctgcatttccaaattagcgatatccaggtgagtggtcagagtgaggatatgactgccaaagagaagcttctcctgtggtctcagcgaatggttgagggataccagggtctaaggtgcgataatttcacctcctcctggagagacgggaggctgtttaacgcgataatccacagacataaacccctgctcattgacatgaacaaggtctataggcaaacgaatctcgaaaatcttgatcaggctttttcagtggctgagagagaccttggggtgactcgcttgctcgacccagaagatgtggatgtgccacaacctgacgagaagagcattattacttatgtgtcctccttatatgacgcgatgccaagggtccctgatgtgcaagatggagttagggccaacgaactgcagctgaggtggcaagagtacagggaactcgttttgcttctcttgcagtggatgcggcatcataccgctgcatttgaggaaaggcgcttcccttcctcttttgaggagattgaaattttgtggtcccaatttctaaagtttaaagaaatggaactaccggctaaagaggcagacaagaatcggagcaaagggatctaccagtccctggaaggtgcagtacaggccggacagcttaaggttcctccaggctatcaccccctcgatgtggagaaggagtggggcaaattacatgtagcaatcctggagagagagaagcagctccgctccgagtttgaacggctggagtgtcttcagaggatcgtgaccaagcttcagatggaggcaggcctttgcgaagagcaactgaatcaagctgatgctttacttcagagcgacgtgagactcttggcagcaggaaaggtaccccagagagcaggcgaggtagagcgggacctggataaagcagactccatgattcggctgctgtttaacgacgtgcagactctgaaagacggccgtcacccacagggggagcagatgtatcggagagtgtaccgccttcatgagaggcttgttgctatccgtacagaatataatctgcgactaaaagccggagtcgccgcacccgcaacgcaggttgcccaggtaacgctccaaagcgtacaacgaaggccggagctcgaagattccaccctgcggtatctgcaggatctactggcctgggtcgaggagaaccaacacagagtcgatggcgctgaatggggcgtggacctgccgtctgtcgaggctcagctgggctcccacaggggtctacaccagagcatcgaggaatttcgggctaagatagagagagctaggagtgacgagggacagctctcccctgcaacacggggtgcatatagggattgtttggggagattggatctgcagtacgctaagttattgaactcgagtaaggctagactcaggagcttggaaagcctgcattccttcgtggctgctgccaccaaggagctcatgtggctgaatgagaaggaagaggaagaagtgggatttgactggtctgaccgcaacacaaacatgacagctaaaaaagaaagttattctgccctgatgagggaactcgagctcaaggagaagaagatcaaggaactccaaaacgcgggtgatcgattgttaagggaggatcatcctgccaggcctactgttgaaagctttcaggctgccttacaaacccagtggtcatggatgctacagttatgctgttgtatcgaagcccatctcaaagagaacgcagcatacttccagttttttagtgacgtgagagaagcagaggggcagctgcaaaagctccaagaagcgttacgtaggaagtattcatgcgaccggtcagctacagtgacccgtctggaggacctgctgcaggatgcccaggatgaaaaggagcagcttaacgagtataaaggacaccttagtggactggctaagagggctaaggccgtcgtgcagctcaagcctaggcaccccgctcacccgatgaggggaaggctgcctctcctggctgtctgcgattacaagcaggtcgaggtgacagtgcataagggcgatgagtgccagctggtagggcctgctcagcctagccactggaaggtcctatcatctagtggttccgaagctgctgttcccagtgtctgctttctcgtcccacccccaaaccaggaggcccaggaggcagtaactcgtttagaagcacagcaccaggccctggtcactctgtggcatcagctgcatgtcgacatgaagagtctcctggcctggcagagtctgcgaagagacgtccagctgatcaggagctggtccctggcaacctttagaacactgaaacctgaagagcaacgccaggccctgcattccctggaattgcattaccaggcttttctgcgggatagccaggatgcaggcggtttcgggcctgaggacaggctgatggccgaacgcgagtatgggagctgcagtcaccactaccaacagctgctgcagtcacttgagcagggtgcccaggaggagtcaaggtgccagaggtgcatcagcgagcttaaggacatccgtctgcagcttgaagcctgtgaaacacggaccgttcacagactccgccttcctctggataaggagcctgcccgagagtgtgctcaaagaatcgcggagcagcagaaggctcaagctgaagttgaaggactcggcaaaggagtggcacggctgtcggccgaggccgaaaaggttctggccctgcctgagcccagccctgcggcaccaaccctgaggtcagaactcgagcttaccctgggcaagctggaacaggtaagatctctcagtgctatttatttagaaaagcttaaaacaatatccctagtaatccgcggtactcagggagccgaggaggtgttaagggcgcacgaggaacagctaaaagaagcacaggccgttcccgctacactcccagaattagaggcaactaaggcctctctaaaaaaactgcgggctcaggccgaggctcagcagcccacctttgacgccctgagggatgagctgcggggagcccaggaggtgggcgagcggttgcaacaaagacacggggagcgcgatgtagaagtcgagagatggcgagagcgcgtggcccagctgttagagaggtggcaggcggtcctggcccagacagatgttcggcagagggaactggaacagcttggtcggcaactaagatattatcgggagtcagcggatccactgggagcctggctccaggatgcaaggcggcgacaggagcagatacaggcaatgccccttgctgattcccaggcagtaagggaacagctgcggcaggaacaggctctgctcgaggaaattgagcgccacggggaaaaagtcgaagagtgccagcgattcgccaagcagtatattaacgccatcaaggactacgaactacagcttgtcacatacaaggcgcaactggagccagttgcctcgcccgcaaaaaagcctaaagtccaatccggaagcgagtccgtcattcaggagtatgtggatctgcggacccactacagtgaactcacaacactgacatcacaatacataaagttcatatccgaaacactcaggaggatggaagaagaagagcggttagcagagcagcagagagccgaagaacgggaacggctggccgaggtagaagccgctttggaaaaacaaagacaattagccgaagcccatgcccaggccaaggctcaagctgagagggaggcaaaggagctgcagcagcggatgcaggaggaggtcgtgaggcgagaagaggccgcagtggatgcccaacaacaaaaacggtcgattcaggaggagttacagcaactaaggcaatcttccgaggcagagattcaagccaaagcacgacaagccgaagcagccgaaaggagccggctcaggatcgaggaagagattcgggtggtcaggctgcagttggaggccacagagcgccagagggggggagcggaaggggaattacaggccctacgggcacgcgctgaggaagccgaggcacagaagagacaggcccaggaagaagctgagcggcttcgcagacaggttcaggacgaatctcagcgcaaacgacaagcggaggtcgagctcgcatcgcgggtcaaggcagaggcggaagcagcacgtgagaagcaacgcgctctgcaggcactggaagagctgcgcctccaagctgaagaggcagaaaggagactgcggcaagccgaggtcgaacgggcaagacaggttcaagtagctttagagacggcgcaacggagcgctgaggcagagctgcagagcaagcgagcctctttcgctgaaaagaccgcccagctagagcggtcgctccaggaggaacacgtggccgtggcccagcttagagaagaagcagagagacgggctcagcagcaggccgaggccgagagagccagggaggaggctgaacgggagctcgagcggtggcagctgaaagccaacgaggcactgcgtttgaggctgcaggctgaagaagtggcccaacagaagtcattggcccaggccgaagccgaaaagcaaaaagaggaagcagagcgagaggcacgcagaagaggcaaggccgaagaacaggcggtcaggcagcgtgagcttgctgagcaggagctcgaaaagcagagacagctggcggaggggactgcacaacaaagactcgctgcggaacaggagctgatcaggctgagagcggaaaccgaacagggcgagcagcagagacagctgcttgaggaagagctcgcccgattacagagggaagctgccgctgcaacacagaagaggcaggagttagaagccgagcttgcgaaggtccgtgccgagatggaggtgctcttggccagtaaggcacgggctgaagaggagagccgttccaccagcgagaaatcaaaacagcgcctggaagccgaggccggaagatttagggaactcgctgaggaggctgcacggctcagggccctggccgaagaagccaagaggcaacggcagctggccgaagaggacgccgctcgtcagcgggctgaggccgagcgagtgctcgctgagaaactggccgctatcggagaggcaacacgactcaaaacagaggcagaaattgccttgaaagaaaaagaggctgaaaacgagcgcctgcgcaggctggcagaagatgaggccttccagagaagacggctggaagagcaggcagcccagcacaaggcggacatcgaagagagattggcccaattgcggaaggcctccgactcggaattggagcgtcaaaaaggcttagtggaggatacacttcgtcagcgcagacaggtggaggaggagatactggccctgaaggcatcgtttgagaaggccgcagctggaaaagcagaactggaactagagttgggcagaatccggagcaatgccgaggataccctccgcagtaaagaacaggccgaactcgaggccgctcggcaacgacagttagccgcagaggaagaaagacgaagacgggaggcggaggagcgcgtacagaaatccctggccgctgaggaggaagcagctcgccagaggaaagctgccctcgaggaggtcgagaggctgaaggccaaagttgaggaggccaggaggctgcgggagcgagctgagcaggagagcgccagacagctgcagctggcccaggaagcagctcaaaagcggcttcaagccgaggaaaaggcccacgctttcgccgtgcagcagaaggagcaggaactgcaacaaacactgcaacaagaacagagtgtcctggatcagctgcggggtgaggctgaggccgcacgaagggccgctgaggaagccgaggaggcacgcgttcaggcagagcgcgaggctgcccaaagcaggcgtcaggtggaggaagccgagcgcctcaaacagagtgctgaagaacaagcccaggcgcgagcacaggcccaggcagccgcagaaaaactccggaaagaagccgagcaagaagctgcccgtagagcccaggcagaacaggcagcactgaggcagaagcaagctgccgacgccgagatggagaagcataagaagtttgctgaacaaaccttgaggcagaaagcccaagtagaacaggaacttactactttgaggttgcaactcgaggaaacggatcaccagaaaaacctgctagacgaggagttacagagactgaaagctgaggccaccgaggcagctcggcaaaggagccaagtggaggaggagttattttccgtacgcgtacaaatggaggagctctccaagttgaaagctcgcatcgaagccgagaatcgggctcttattctcagagacaaagataatacccagcgtttcctgcaggaagaggccgagaaaatgaagcaagtggctgaggaggctgctcgtctttcagtcgctgcccaagaagcagcacgtctgcggcagcttgccgaagaagatctcgcccaacaacgggcactcgccgagaagatgctcaaggagaaaatgcaggcagtgcaggaggctacccgactgaaggcagaagctgagctcctccaacaacaaaaagagcttgcccaggagcaggccagaagactgcaggaagataaagagcagatggcacaacagctcgccgaggagacacaaggtttccagcggacgctcgaggctgagagacaaaggcagctcgaaatgtcagccgaggcggagagactcaagctcagagtggcagaaatgtcaagggcgcaggcgcgagccgaagaagacgcgcagcgatttaggaagcaggctgaggaaataggcgagaaacttcaccgcactgaacttgccacacaggagaaggtcaccttggtgcagaccctcgagattcagaggcagcagagcgatcatgatgccgagcggttgagagaggctattgccgagcttgagagggaaaaagagaagctccagcaagaagctaagcttctccagctgaaatctgaagaaatgcagactgtgcagcaggagcagttgctgcaggagacacaggccctccaacagagctttctttcagagaaagattcccttctgcagcgtgaaagatttattgagcaagaaaaggccaagctcgaacagctcttccaagacgaagtggccaaggcgcagcaattgcgggaagagcagcaacgccagcagcagcagatggaacaggaaaggcaacgactcgtggccagcatggaggaagctagaagaagacagcacgaggcagaagagggcgttcggagaaaacaggaggaactccagcaactcgaacagcagaggcgccagcaggaagagctcctcgcagaagaaaaccaacggttacgggagcagttacagctcctcgaggagcagcatcgtgctgcactggctcacagcgaggaagtgacagccagccaggtagcggcaaccaagacccttcctaacggccgtgacgccctggacgggcctgctgccgaggccgagccagaacacagtttcgacggactgaggagaaaggtgagcgcccagcgcctccaggaggcagggatactcagtgccgaagaattacaacggctggctcagggccacacgactgtggacgaactcgccagacgagaagatgttcgtcattatctgcaggggagatcctccattgctggactgctgctcaaagcaacaaatgaaaagctcagtgtgtacgcagccttgcaacggcagctcttaagtccgggaacagccctgatcctactcgaggcgcaagctgcttctggctttctgctggacccagtgaggaatcgtagactgaccgtgaacgaggccgtgaaagaaggtgtggtggggccagaattgcatcataaactactgagcgccgagcgtgccgttacagggtacaaggatccatacacaggacaacagatctcgctgtttcaggccatgcaaaaagggcttatagtacgggagcacggtatcaggttactggaagcacaaattgccaccggcggagtgatcgatcctgtgcactctcacagagttcctgtcgatgtggcataccgcagaggctatttcgacgaagaaatgaaccgggtgctggcagatccaagcgacgacacgaaaggcttctttgaccccaatacacatgaaaaccttacgtatctgcagctactggagagatgcgtagaggacccagagactggcctgtgcctcctgccgctcaccgacaaagctgctaagggaggggaacttgtttacacggatagcgaagcacgagacgtgttcgagaaagccaccgtatccgcacctttcggaaaattccagggcaaaaccgtcactatttgggaaattattaacagtgagtatttcacagccgagcagcgacgggacctactccggcagtttagaactgggaggattactgttgaaaagattattaagattattataaccgtggtggaggaacaagaacagaaggggcgtctctgcttcgaaggactcagatcactggttcccgcagctgagttgctcgagtccagagtaatagacagagaattatatcagcagctacagcggggagagcgttcagtgcgcgatgtcgcagaagttgacaccgtgcgccgagcactgaggggggcaaatgttattgccggagtttggctcgaggaagcaggtcagaaactttccatctacaatgcactgaaaaaggaccttctaccttctgacatggccgtggccctgttggaggcccaggccggaactggccacatcattgaccctgccaccagcgcccgtttgactgtggacgaagctgtacgggctgggctggttggtccagaatttcacgagaagcttctgtctgctgagaaggctgtcactggctatagggatccatacacgggccagagcgtgtcgctgttccaagccttgaaaaaggggttgatcccgcgtgagcaagggctgaggctgctcgacgcccaactaagcacaggagggattgtggatccatccaaatcacacagagtacccctggacgttgcctgtgctcggggttgtctggacgaggagacatctcgggctctctctgcacctagagccgatgccaaggcgtactccgatccttctacaggagaacccgcaacatacggagagttacagcaacgttgcagaccagaccagctgacaggcctatcgctgctgcccctgtctgaaaaggccgcaagggcccgtcaggaagaattgtattccgagcttcaggcacgcgagacttttgagaaaactcctgtggaagtgcccgtgggtggttttaaaggacgaactgtgaccgtgtgggaacttattagctctgagtattttaccgctgagcagcgccaggaactgctgcgacagtttcgcactggaaaggtgaccgtggaaaaggtgatcaagattctgatcacaatcgttgaggaggtcgaaaccctacggcaggagcggttgagtttttccggactccgcgctcctgtgccagcgtcagaactgttggcctcaggcgtactttcccgggcacagttcgagcagctgaaggatggcaaaacgacagtgaaggatcttagcgagctggggtcggtgagaacacttctacaaggatccggatgtcttgccggtatttacctggaagatacaaaggaaaaagtgagcatctatgaagccatgagaagaggcctactgcgggcaactacagctgcgctgctccttgaggcccaggccgctacaggcttcctggtcgatcccgtcagaaaccagagactttatgtccatgaggctgtgaaagctggagtggtcggtcctgaacttcacgagcagctgcttagtgccgaaaaagctgtcaccggataccgggacccttatagtggatccaccatatcactgttccaggccatgcagaaagggctggtgctccggcaacatggcattaggttacttgaggctcagatagcaactggcggtatcattgaccctgttcatagtcatcgggtacccgtggatgtggcttaccagcgcggatacttctctgaagaaatgaacagggttctggccgatccatccgacgacactaaggggttcttcgaccccaacacacacgaaaacctgacttatcggcagctcctagagcgatgtgttgaggatcccgaaactggcctccggctccttcctttaaaaggagccgagaaggcagaggtagtcgaaaccacacaggtttatacagaggaggaaactcgcagggcatttgaagagacccagatagatatccctggtggcggaagtcacggcggaagcaccatgtcgctgtgggaagttatgcagtcagacttgatccctgaagaacagcgcgcacaactcatggcggattttcaagcaggtcgcgtcacaaaggaacggatgatcatcattatcattgaaattatcgagaagactgagatcatccggcaacagggtctggcatcttacgattacgtgcgccgacgtctgacggccgaggacctgttcgaggctagaataatatctctggagacctacaacctgctaagagaaggaacacggtcgctcagagaagccctggaagccgaaagcgcttggtgttatctctatggcacgggatcagtggctggcgtctatctgccaggaagcagacagacactctcgatttatcaggcgctcaagaagggccttctttccgcagaagtagccagactgttgttggaggcccaggcggcaactggcttcttattggatccagtaaagggggaaagactgacagtggatgaggcggtgcggaagggtctggtgggaccagagctccatgaccggctcttgagcgcggagcgggctgtcacaggatatcgtgacccctatacagagcaaactatctctttgttccaagcaatgaaaaaggagctgatacccactgaggaagccctgcgtctgttggatgcccagcttgcaacagggggtattgttgatcctagacttgggttccatctacccctcgaagtggcctatcagcggggttacctgaacaaggatacccacgaccagcttagcgagccgtcggaggtgcgctcctatgtggaccctagtacagacgagaggctgtcatacacccaactgctgagacggtgcagacgcgacgacggcaccggtcagttgctcttgccgctcagcgacgccagaaagctcaccttccggggattgaggaaacagatcaccatggaagaattagttaggtcccaggtcatggacgaggctacagcgctgcagttaagagaaggtcttacgtcgattgaagaggtcacaaaaaaccttcagaagtttttagagggtactagctgtattgctggagtattcgtggacgccaccaaggaacgactcagcgtttaccaggctatgaaaaagggcatcatccgccctggcaccgccttcgagttgctggaggctcaggcagccacaggctatgttattgatcctatcaaaggactgaagcttactgtagaggaagctgtacgcatgggtattgttgggccagagttcaaggacaagctgctgagcgccgaaagagctgtgacggggtacaaagacccgtatagcgggaagttaattagcctctttcaagcaatgaaaaaaggcttgatacttaaggatcacgggatccgtttgctcgaggcacaaatcgccacaggcggtattatcgaccctgaggaatctcatcggctgccagtggaggtggcctacaagcggggactgttcgatgaggagatgaacgaaattcttacagatcccagcgacgataccaagggctttttcgatcctaacaccgaagaaaacttgacatacttgcagctcatggagcggtgcatcacagatccccaaaccggattgtgtcttctccctctgaaagaaaaaaagcgagaaagaaagacctcctctaagtcgtcggtacgcaagaggcgcgttgtgattgttgatccagaaactggcaaagagatgtccgtttatgaagcttataggaaaggtctgattgatcatcaaacctatctggagctttcagaacaggagtgcgagtgggaagagataaccatcagcagctctgatggggttgtgaaatccatgataatagatcgccgatcagggaggcaatatgatatcgacgacgccattgctaagaacctgattgacaggtctgctctggaccagtatcgggctggtaccctgagcattaccgaatttgcagatatgctctcaggcaacgctgggggattcaggtctcgttcttcctctgtgggatcttcttcatcttaccccatctcgcccgctgtctcaagaacccagcttgcttcctggtccgatccaaccgaggagactgggcctgtcgcaggaatcctggataccgagacccttgagaaagtgtctatcacagaggcaatgcatcgcaacctagttgataacatcacgggccagcgcctgctggaagcgcaggcttgtactggcggtataattgacccctcaaccggcgagcggttcccggtgactgacgccgttaacaagggtctggttgataagataatggttgaccggataaacctggcccagaaggctttttgtggttttgaagatcctaggactaagaccaagatgagtgccgctcaggccttgaaaaagggttggctatactacgaagccggacagagattcctggaggttcaatacctcacaggcggattaatcgaacctgatacgcccggtagagtgccgctggatgaagcgctccagcgtggcaccgtcgatgccagaactgcccagaagcttcgcgacgtgggggcttacagtaaatatttgacctgccccaaaacaaaactgaaaatctcatataaagacgcattggaccgaagtatggtggaggaggggaccggtctgaggttactggaggcagccgctcagtctactaaggggtattattcaccttactctgtgagtggttctggctctaccgctggctctaggacagggagcagaacaggctctcgagctggatcccgtcggggtagttttgatgcaaccggctcaggattcagcatgacatttagctcatcaagttacagttcttctggctacggcaggcgatacgcaagcggcagcagcgctagcctcgggggacccgagtccgctgtggcgtag

SEQ ID NO: 235211 - DNA, 13656 bp, synthetic construct
  misc_feature 1..13656: note = Description of Artificial Sequence: Synthetic coding sequence
  source 1..13656: mol_type = other DNA
atgtctggggcaggcggagcctttgcctcacctagagaggtgctgctggaacgcccttgttggctcgatgggggatgtgagccagccaggcggggatatttgtaccagcagttatgctgcgtcgacgaaagagacagagtgcagaagaagaccttcaccaaatgggtaaacaaacacctaattaaagcccaacgccacataagcgacctctacgaggatcttcgggatggccacaatttaatcagcttgcttgaagtgctgagtggggactcgttaccccgagagaagggcaggatgcgattccacaaactgcagaacgtccagattgccctggactacctgcggcatcggcaggttaaattagtgaatattcgcaacgacgacattgccgacggcaaccccaagctcactctaggcctgatctggaccattatcctgcattttcagatctccgatattcaggtttcggggcagtccgaagacatgacagccaaggagaagctgttactgtggagtcaacgcatggtggaggggtaccagggcctgcgatgcgacaactttacctcttcatggagggacggcaggctgtttaacgccattatccatcgccataagcctctgcttatcgacatgaataaggtctacaggcagacaaacctggaaaacttggaccaggccttttccgtcgctgaaagagatctgggcgtgacacgactgctggaccccgaggatgtggacgtccctcaacctgacgaaaagagcattataacctacgtttcctctttgtatgacgcaatgcccagggtgcccgatgtgcaagatggagttagagctaatgaactgcagctccggtggcaggagtaccgcgaactcgtgttgctgctcctgcagtggatgaggcaccacactgctgcatttgaggaaagaagattccctagcagttttgaagagatcgagatcctctggtctcagttcctgaaattcaaagagatggagctcccagcaaaagaagccgacaaaaaccggagtaaggggatctaccagtccctggaaggagctgtccaagctggacagttgaaggtgcccccagggtatcatccccttgacgtcgagaaagaatggggaaagctgcacgtagctatccttgagagggagaagcaactgcgaagcgaattcgagaggctggaatgcctgcagcgtatagtgaccaagctgcaaatggaagccggactctgcgaagagcagctcaaccaggccgacgctttgctgcagtccgatgtgcgactattggccgcagggaaggttccacaaagagctggagaggttgaaagggatttggataaagcggactctatgattaggcttctttttaacgatgtccagaccttaaaggatggcaggcacccacaaggagagcagatgtataggagagtgtacaggttgcacgagagacttgtggcgattagaaccgaatataacttacggctgaaggctggggtcgcagccccagccacacaggtggctcaggtcacgctccagtcggtgcagcgacgtccagagttggaggattcaacacttcgatatctgcaagacctcttggcgtgggttgaggagaatcagcaccgcgtggatggcgcagaatggggggtcgacctgccatctgttgaggcacaactcggcagccaccggggactacaccagagtatcgaagagtttagggccaagatcgagcgtgcccgatctgatgagggacaattatcaccagcaacgcggggagcatatagggactgcttgggaaggctggatcttcagtatgctaaactgttgaacagttccaaggccaggctgcgcagcctcgagagtctgcactccttcgtggccgcagccactaaagaactgatgtggctgaacgagaaggaggaagaggaggttggatttgattggtctgaccgcaataccaacatgaccgctaagaaggagagctattccgctctgatgagagagctcgaacttaaagagaaaaaaattaaagagctgcagaacgccggagaccgcctgctccgtgaggaccaccctgcacggcctacggtcgaatcttttcaggcagcattgcagactcagtggagctggatgcttcagctttgctgctgtattgaagctcacctgaaggaaaacgccgcatatttccagttcttttcagacgtgagggaagccgaaggccagctccagaaattgcaggaggccttacggcgtaaatattcctgcgatcgcagtgcaacagttaccaggctggaggacttattgcaggacgcccaggatgagaaggaacagctgaatgagtataagggtcacttgtccggcctggccaaacgggctaaagctgtggtccaactcaaaccccgtcaccctgcgcatccaatgcgcggaaggctaccccttctggccgtatgcgattacaagcaagtggaggtcaccgtgcataaaggcgatgagtgccaactggtgggtcctgcccagccaagccactggaaagtgctatcttctagcggaagcgaggcagcggttccatccgtgtgcttcctggtccctcctccaaatcaagaggcccaggaggctgtcaccagattggaagcccaacaccaagccctggtcaccctctggcaccagctgcatgtggacatgaaatccttgttagcgtggcagtccttaaggagggacgttcagctcattcggtcgtggtcactggccacttttcggaccctcaagccagaggagcagcgacaggctctccactctctggagctccactaccaggctttccttagagattcacaagacgcgggaggcttcggaccagaagatcgacttatggccgagcgtgagtatggctcctgtagccaccattaccagcaactgcttcagagtttggagcagggggcacaggaagaatctcgctgccaaaggtgcattagtgagctgaaggacatacgcctgcagcttgaagcctgtgaaactcgcaccgtccaccgcctcagactgcctctagataaggagccagcccgagagtgtgctcaacgaatcgccgagcaacaaaaggcccaagccgaagtagaaggcctgggcaaaggagttgctcggctctccgccgaagcagaaaaagtgctggcgctcccagagccaagccctgccgcacctaccctccgctctgagctcgaactgaccctgggtaagcttgaacaggtacgatccctgagcgcaatctacctcgagaaactgaagacaatcagtctggtcatcaggggaacacagggggcagaagaagttctacgcgctcatgaggagcagctcaaagaagcccaggcagtccctgcaacacttcccgagctggaagcgacgaaggcctccctgaagaagctgagggctcaggctgaggctcagcagcccacattcgacgcactgcgcgacgagttgcgcggagcgcaggaggtgggcgaaagactgcagcaaaggcatggtgagcgggatgtcgaagtggaacggtggcgcgagcgcgtggctcaactgctggaacggtggcaggctgtattggctcaaactgacgtccggcaaagggagctggagcagttgggccgtcagctgcgctattacagagagtccgcagatcctcttggcgcttggctccaagacgcacggcgacgccaagagcagattcaagcaatgcctcttgcagattcgcaggcagttcgcgagcagctgcgacaggagcaagccttgttggaagaaatcgaaagacacggcgagaaagttgaagaatgtcagcgatttgcgaaacaatacatcaacgctattaaagattacgagctgcaactggtgacatacaaggcccagctagaacctgtggcctcccctgccaagaagcccaaggtacagtcagggagtgagagcgtgattcaagaatatgtcgatctcaggacccactattctgagctcaccaccctcacttcccagtacatcaagtttatatccgaaacactcaggaggatggaggaagaggaaagactagccgagcagcagcgcgctgaggagagggaacgcctggcggaggtggaggccgctctggagaaacagagacaactagctgaggcacacgctcaggcaaaagcccaggctgagcgcgaagctaaggagcttcagcagcgcatgcaagaagaagtggtacgcagggaagaggccgctgttgacgcacagcagcagaagagatctattcaagaagagctccagcaattaaggcagtcaagtgaagcagagatccaagctaaagccaggcaggccgaagcagcggaaaggtcaaggctgcgcatagaggaggagatacgggtagtgaggctgcagctggaggccactgagcggcagagaggcggtgccgagggcgaactccaagcactaagagcccgagcagaggaggcggaggcacaaaagagacaggcgcaggaggaggccgaacgactcaggaggcaggttcaggatgaatcccaaagaaaacgccaagccgaggtggaattagcctccagagtgaaggcagaggctgaagccgcacgggagaagcagagagccctgcaggctctggaggagctgcgtttacaagccgaagaggctgaaaggagactaaggcaggctgaagttgagagggctagacaggttcaggtggccttggaaactgcacagagatccgccgaagctgaattgcagagcaagcgggcttcgtttgccgagaagaccgcgcagctcgaacgctccctgcaagaagaacacgtggcggtagcccagctacgcgaggaagccgagcgcagagctcaacagcaagctgaggccgagcgggcacgcgaagaggctgagcgggaactcgaacggtggcagctgaaagctaacgaagccctgaggctgcggctgcaggccgaagaggtcgcacagcagaaaagccttgcccaagcagaagccgagaagcagaaggaggaggccgaaagggaagcccgtcggagaggcaaagcggaggagcaggcggtgcggcagagggaactagccgaacaagaactcgagaagcaaaggcagctggccgaaggcacagcgcagcaaaggctggcagcagagcaggagttgattaggctccgcgcagaaactgagcagggagagcagcagcgacaactgctggaggaggaacttgccagattacagcgggaggccgcagcagctactcaaaagagacaggaactggaggcggaactggccaaagtgcgggctgagatggaggtactgttggccagcaaggctcgcgcagaagaagagtcccggtccacctccgagaagtccaaacagcgactggaagccgaagccggtcggtttcgggagttggctgaggaagcagctagactgcgtgctctggctgaagaggccaagcgccagcggcagctcgcagaggaggacgcagcacgccagcgcgctgaggccgaaagggttctcgctgaaaaactggcagctatcggggaagccacacgcttgaagaccgaagctgagattgccctaaaagagaaagaggctgaaaatgagcgcctcaggagactggcagaggatgaggcattccagcgtcggagactggaggaacaggcagcccaacacaaggccgacatcgaggagagattagctcagttgcgcaaagcaagtgactctgaactggagcgccaaaaaggcctggttgaggatacactgagacagcgcagacaggttgaggaagaaattctcgctctgaaagctagctttgagaaagcggcagccggaaaggctgagctggaactagagctgggtaggatccggagtaatgctgaggacaccctgagatccaaggagcaggctgaactcgaggcagctcgtcaaaggcagctggccgcagaagaggaaaggcgccgtcgggaagccgaggagcgcgttcagaagagtctggcagcagaagaagaagccgcacgccaacggaaagcagcccttgaggaggttgaacggttgaaagcgaaggtggaggaggcacgccgtcttcgcgagcgtgccgagcaggagagtgcgaggcagctacagctcgcacaggaggctgctcaaaaacggcttcaggctgaagaaaaggcccacgcatttgctgtgcaacagaaggagcaggagctccagcaaaccctgcagcaagaacaatctgtgctcgatcaacttcgaggtgaagcggaggctgcgagaagggccgcagaggaggctgaggaagcccgtgtgcaggctgaacgtgaggcagcacagtccagaaggcaagtggaggaggccgagcggctaaaacagagcgctgaggagcaagcacaggccagagctcaggctcaggcggcagcagagaaactgcgtaaagaagccgagcaagaagctgcacggagagcccaggccgagcaggccgctcttaggcagaaacaggccgctgacgctgagatggagaaacataaaaaattcgcagagcaaactttacgccagaaggcacaggtagagcaagagctgaccacacttagattacagctcgaagagaccgaccaccaaaagaacctgctcgatgaagaactacagcggcttaaagcggaggcaaccgaggctgcacgacagcgatcgcaggttgaggaggaattgttcagcgtccgggtgcagatggaggaattgtctaagctaaaagccaggatcgaggccgagaatcgggctctgatcctccgagataaagataacacccagagatttctgcaggaagaagctgaaaaaatgaaacaggtcgccgaggaagcagccaggctgagcgtggccgctcaggaggcagcgcgactcaggcaactcgcagaagaagatctggcacaacagcgcgcactggcagagaagatgctgaaggaaaagatgcaggcagtccaggaagctactcgcctgaaggcggaggctgagctgctgcagcagcagaaagaattagcccaggagcaagctagaaggctacaggaggataaggagcagatggcccagcagttggcagaggagacgcaggggttccagcgtaccctcgaggctgagcgacagcgacagttggaaatgtcagcagaggcagagcgccttaaactacgcgtggccgaaatgagccgggctcaagcccgagccgaagaagacgctcagcgcttccgcaaacaggctgaggagatcggtgagaagctgcatagaaccgagttagccacccaggaaaaagtcacgctggtgcaaactctggaaatccaacgccagcagagcgaccatgacgccgaacggcttcgagaggcgatcgctgaattagaacgcgagaaagaaaagcttcagcaggaagccaagctgctgcaacttaaaagcgaagaaatgcagacagtacagcaggagcagctgttgcaagagacacaggcactgcaacagtcattcctgtccgagaaggattcactgctacagagggaaaggttcatcgagcaggagaaggcaaaacttgaacagctcttccaggacgaagtagccaaggcgcagcaactgcgggaggagcaacagcgacaacagcagcagatggagcaggagagacaacgattagtcgcatcaatggaagaggctcggagaaggcagcacgaggccgaggaaggcgtccggagaaagcaggaagaattgcaacagttggaacagcaaagacggcagcaggaagaactactcgcagaagaaaatcagaggctgagggaacagttgcagctgctcgaggagcagcaccgtgccgcactggctcatagcgaggaggttaccgcctcgcaggtcgccgctaccaaaactctgcccaacgggagagatgctttggatggccctgccgcagaagcagagcccgagcactccttcgacggtctccgtcggaaagtgagtgctcagaggcttcaagaagctggaatcctctcggcagaagagctgcagagactggcacaaggccacaccacagtggacgagttggctcgccgagaagacgtacgccactacctacagggccgtagtagcatcgcaggactcttgctcaaagcaacgaatgagaaactatcggtctatgcagctctgcagcgccagctcctgtctcctggaaccgctttgattttactcgaggcccaagcagcttctggcttcctcttggatcccgtgcgcaacagaagactgaccgtgaatgaggcagtgaaggaaggcgtggtgggtcctgaattacaccacaagttgctgtccgcggaacgggcagtgaccgggtataaagatccgtatactggccagcagatttctctgttccaggccatgcagaagggcctcatcgtcagggaacatggaattcgacttctagaagcccagatagctactgggggtgtgatagaccccgtccacagccaccgggtcccagtcgatgttgcttatcgtcggggttactttgatgaggaaatgaacagggtgctcgctgatcctagcgatgacacaaagggtttctttgatcccaacacacacgagaacctgacatatctgcagttattggaacggtgcgttgaggaccctgagactggcctctgcttactgcccctgaccgacaaggcagctaaaggtggcgaactggtctacacagactctgaagctagggatgtgtttgaaaaggccacagtctccgctccctttggcaaattccaaggcaagactgttacgatctgggagattattaatagcgagtattttacagccgaacaaaggcgcgacctgcttagacagtttcgaactggccgtattactgtggaaaagatcataaagatcatcatcactgtggtggaggaacaagagcagaaaggccgactttgcttcgaaggactccgatcactggtccctgccgcagaactgctggagagccgggtcatcgatagggaactctatcagcagctgcagcgcggtgagcgctcagtgcgagacgtagccgaagtggacaccgtaagacgggctctccgcggtgcaaacgtgatcgccggagtgtggctggaggaagcagggcaaaagctttcaatctataatgccctgaagaaggatctgctcccgagcgatatggctgtcgccctcttggaggctcaggctggaacaggacatattattgaccctgctactagcgccagattaacagtcgatgaagccgtccgcgctggactcgtggggccagaattccacgagaaactgcttagcgctgaaaaagctgtgacgggatacagagatccctatactggccaaagtgtgtccctgtttcaggcactcaagaaagggctcattcccagagaacagggcctaaggctgcttgacgcacagctgagtactggcggaatcgtcgacccttctaagtctcacagggtgccactggatgtggcctgtgcacggggatgcctcgatgaggagacctctagagccctgtcggccccacgggcagacgccaaggcttactcggatccatcaacaggagaaccagctacgtatggtgagttgcaacagagatgtcggccagaccagttgactggtctgtccctgctgcccctgagcgaaaaagcagctagagcacgacaggaagagctctattccgaactacaggcccgtgaaacgttcgagaaaacccccgtggaagtgcccgttgggggatttaaaggcaggaccgtcacagtgtgggagcttatttcctcagaatattttaccgcagagcagcggcaggagctgctgcgtcagttccgcaccggtaaagttactgttgagaaggtaatcaaaattctgattaccattgtggaagaggtagagacactgcgccaggagagactgagcttcagcggactaagggcgccagtgcccgcatcagaattgctggcctctggcgtgctgagtagagctcagttcgagcagcttaaagatggaaagactacagtgaaggatctcagtgagctgggttccgttcgcactcttctccagggatcaggctgcctcgctgggatctacctcgaagacactaaggagaaggtgagcatatacgaggcgatgcgacgcggacttctcagagctacaactgcggctctgctcctcgaggcgcaggccgcaaccgggttcctggtggatccggtccgaaaccaacgcttgtacgtccacgaggccgttaaagctggggtcgtgggccctgagctacacgagcagcttttgtctgccgaaaaggctgtgaccggctatagagatccttactccggcagtactatcagtctgttccaggcgatgcaaaagggcctcgtcctgaggcagcacgggatcagactgctagaggctcaaattgccaccggaggaatcatcgatcctgtgcactcacacagggtgcccgtcgacgtggcttaccagcgagggtacttttccgaagagatgaatcgcgtcttggccgatccctcagacgacactaaagggtttttcgatcccaacacacacgaaaacttaacctatcgccaactactagagcggtgtgttgaggacccagagactggtctgagactgctgcccctaaagggcgcagagaaggcagaagtcgttgagaccactcaggtgtacaccgaagaggaaacccggcgtgcattcgaggagactcaaattgatatacccggtggtggttctcacggaggctctaccatgtccctatgggaagtgatgcagagcgacttgatacctgaggaacaacgcgctcagttgatggccgactttcaagccggtagagtcacaaaagagcggatgattataattattattgagatcattgaaaaaaccgagatcatacgccaacaggggctcgctagttatgattacgtcaggcgcagactcactgctgaggatctgttcgaggccaggattatcagtctggagacttacaacctgctgcgcgaagggaccaggtctctgcgcgaagcccttgaggcggagagtgcctggtgctacctctacggaacgggttctgtggccggtgtgtacctaccaggcagtagacagacattgtcaatctatcaggcgctcaagaagggcttgctatcagcagaggtggctcggctgctgttggaggctcaagcagccaccggattcctgctcgatcccgtgaagggagaacggctaactgtggatgaggcggtacgcaaagggttggtgggacctgagttgcatgatcggttgctgtcagccgaacgagccgtgactggatacagagatccttatacagaacaaacgattagcctttttcaggctatgaagaaagagctgatacccactgaagaagctctgcgactgttggatgcccagttagctactgggggtatcgtggatccaaggctgggcttccacctgccacttgaggttgcttatcagcgcggttaccttaataaggacacccacgaccagctttcagagcccagcgaagttcgctcatatgtagatccatccacggacgagagactgtcctatacgcagctgctgcgcagatgccgacgggatgacggaacaggccagttgctcctcccgctatccgatgcgagaaagctgacctttcgcggtctgcgcaagcaaattacaatggaagagctggttagatcgcaagttatggatgaggccacggctttgcaactgcgcgagggactaacctccatagaagaagtaacaaaaaatctgcaaaaattcttggaagggacctcctgcattgcaggcgtttttgtggatgctaccaaggaacgtctgtccgtttaccaagccatgaaaaagggcatcatccggcctggaactgctttcgagctgcttgaggctcaggccgctacggggtacgtcatagatcccattaaaggcctaaagcttacagtggaagaggccgtgaggatgggcatcgtaggcccagagtttaaggataagcttctgtccgccgagcgcgctgttacaggctacaaggacccttatagtggcaagctgattagcctcttccaggctatgaaaaagggcctgatcctcaaggatcacggaatccggcttctagaggcccaaatcgctactgggggaataatagaccctgaagagtcccatcgcctgccagttgaagtagcctataagaggggcctgttcgatgaggaaatgaatgagatcctgaccgacccatcagatgatacaaaaggattcttcgatccgaatactgaagaaaacctgacttatcttcagttaatggaaagatgcatcacagacccgcaaacgggactgtgtttactgccacttaaggagaagaaaagggagcggaaaacatcctcaaaaagctccgtgcggaagaggagagtcgtaatagtcgaccccgagaccggaaaggaaatgagtgtgtacgaagcctacagaaagggattaatcgatcaccagacctacctggagttgtctgaacaggaatgtgaatgggaggagattaccatctccagttctgacggcgttgtgaagtctatgattatcgatagacgaagtgggcgtcagtacgacatcgatgacgccatcgcaaagaacttaatcgatcgctcagcactagatcaatatcgggcagggaccttaagcataaccgaatttgctgacatgctctcaggaaatgctgggggattcagatcgagaagcagctcagtgggttcctcctcatcttaccccatctcccccgcagtcagtagaacccagctcgcctcctggtcagacccaactgaggagacgggccctgtcgccggtatcttggatactgaaacccttgagaaggtgtctattactgaagccatgcatcggaatctggttgataacattaccggccagcggcttctcgaggctcaagcttgcacagggggtattattgacccgtctaccggggagcgttttccggtgacagacgccgttaataaaggcttggtcgataagatcatggtggatagaatcaacctcgcccagaaggctttctgtggatttgaggatccccgtaccaaaaccaagatgtcggcggctcaggcgcttaagaaaggatggctctactacgaggctgggcagcgatttctcgaagtacaatacctgaccggtggcctaattgaacctgacacccccggtcgcgtaccattggatgaggccctccaacgcggaactgtcgatgcacgcacagcccagaaactgcgtgacgtgggtgcttattctaagtacctcacttgccctaagaccaagctgaaaatctcttacaaggacgctttggatagaagcatggtggaggagggcaccggactgcggttgctggaggctgctgctcaaagcacaaaagggtattattctccatacagtgtgagcgggtccggttctacagctggctccagaacggggagcagaaccggaagtcgggctggaagtaggcggggatcttttgacgccacgggatctggcttctctatgacattttcctcgtcctcctacagcagctctggatacgggcgtcgctatgcatccggaagttcagcttccttaggaggccctgaatctgcagtggcttag

SEQ ID NO: 235212 - DNA, 13548 bp, synthetic construct
  misc_feature 1..13548: note = Description of Artificial Sequence: Synthetic coding sequence
  source 1..13548: mol_type = other DNA
atgaagattgtgcccgacgagcgggatcgagtccagaagaagactttcaccaagtgggtcaacaaacatctaattaaggcacagcgtcacatcagcgacctctacgaagacctccgtgacgggcacaatctgattagcttattggaagtcctgtccggcgattcactgccaagagaaaaaggtcggatgagatttcacaaattgcaaaacgttcaaatcgccctcgactatttgaggcatcggcaggttaagctggtgaatatccgcaatgacgacatcgcagacgggaacccaaagctgacactgggtctgatctggactattatcctgcattttcagatctcagatatccaggtgtccgggcaatcagaagatatgacagccaaagagaagttattgctgtggagccagagaatggtcgaaggctaccaggggctcagatgcgataattttacaagttcctggagagatggcagacttttcaacgcgattattcatagacataaacctttacttatcgatatgaacaaagtctatcggcaaacgaacttagaaaatctggaccaggccttctcagtggccgagcgggacttgggagtgacacgtctactcgacccggaagacgttgacgtgcctcagcctgatgagaaaagtatcataacctacgtctcctcgctgtacgacgctatgccacgcgtcccagatgtgcaggacggagtgcgcgcaaacgagctccagctacggtggcaggaatacagggagctggtgctcttactgctgcagtggatgagacaccacactgctgcattcgaggagaggaggtttccatctagctttgaagagatcgaaattctctggagccaatttctcaagttcaaggaaatggagctgcctgcaaaggaagccgacaagaatcgctcaaaggggatctatcagtctctggaaggcgctgtccaggcaggccagcttaaagtgccaccgggttatcatccgctggatgtggagaaagagtggggaaagctgcatgttgctatcttggaacgcgagaaacaactgcgatccgagttcgaacgcctggaatgcctgcaacgaatcgtaaccaaattgcaaatggaggccggactgtgtgaggagcagctcaaccaggccgacgcattgttgcaatccgatgtcagattactcgctgcaggcaaagtgccacaacgcgcaggcgaagtggaacgagacctggataaggcggacagtatgatccgcctcctgtttaacgatgtgcagacattaaaggacggaaggcatccccagggtgagcagatgtacaggcgcgtgtaccgactgcatgagagattagtggcaatccggaccgagtacaacctgcggctgaaggcgggagtcgctgcaccggcaacgcaggttgcacaggtcacccttcaatccgtacagcggaggcccgagctcgaggatagtacgttgcggtatctgcaggacctgctggcttgggttgaggaaaaccagcaccgagtggacggagcggagtggggcgtggatttaccttcggtggaggcacagctggggtcccacagaggactgcatcagtctatcgaggagttcagagcaaaaattgagagggcaaggagtgacgagggtcaactctcacctgcaacccgcggagcataccgcgattgcctgggtagacttgacctgcagtacgccaagctgctgaactccagtaaagctcggttgagatccttggaaagtctacattccttcgttgcggcagcaacaaaggaactcatgtggctcaatgagaaagaggaggaagaagtcggatttgactggagcgaccgtaacaccaatatgaccgccaaaaaggaaagttactctgcgctcatgagagaactcgagctaaaggaaaaaaagattaaggagctacagaacgcaggcgaccgcctgctgcgtgaggaccacccagcaagacccacagtagaatcctttcaggccgctcttcagacccagtggtcatggatgcttcagctgtgttgctgcattgaagcacacctgaaagagaatgccgcttatttccagttcttttcagatgtgcgtgaagctgagggacagcttcagaaactccaggaggccctcagacgaaaatatagctgcgaccgaagtgctacagtgaccaggttggaggatctccttcaggatgcccaggacgagaaagaacagttgaacgaatataagggccacctgagtggcttagctaagcgagctaaggccgtagtgcagctgaaaccccgtcacccagcccaccccatgcggggacgacttcctctgctggctgtgtgtgactataaacaagtggaggtgactgtccacaaaggcgatgaatgtcagttggtcggtccggctcagccaagccattggaaagtcctctctagctccggctcagaagccgcagttcccagcgtgtgcttcttagtccccccacccaatcaggaggctcaagaagcggttaccagactcgaggcccaacatcaggctctcgtgactctatggcatcagctccacgtggacatgaaatcactgcttgcatggcagagcctacgcagagatgtgcaattgatcaggagctggtctctggctacgttcaggactctaaagcctgaagagcagcggcaagctctgcatagcttagagctccactatcaggccttcctgcgcgattcacaggatgctggagggtttggcccagaggatagactgatggcagaacgagagtacggatcctgttcacaccactaccagcagctcctgcaatctctcgagcagggcgcacaagaagagagcagatgccaacgatgtatatccgagctcaaagatatcaggctgcagctcgaggcctgtgaaacccgcacagtccatcgactccgcctgccattggataaggagccagctagagaatgtgctcaacgaatcgccgagcaacagaaggcccaggcggaagttgaaggcctgggaaagggcgtcgcacgactcagcgcagaggccgaaaaggtccttgctctcccagagccatctcccgctgcacctaccctgcgcagcgagctggaactaacactgggcaaactggaacaggtcagaagcctgtcagccatatacctggagaagctcaagaccatttccctggtgatcagagggacccagggcgctgaggaggtactccgagctcacgaggagcagctgaaagaagcccaagccgttccagctactctcccagagttggaggccacaaaggcaagtttgaagaagctgcgtgcccaggctgaagcccagcagccaacattcgacgccttgcgagacgagctccgtggcgctcaggaggtgggcgagcgtctgcagcaacgtcacggtgaacgggatgtggaagtcgaaagatggcgtgagagggtggcccagctcctagagcggtggcaggcagttcttgcccaaactgacgtccgccaacgggaattggagcagctcggacgccagctgaggtattacagagagagcgctgacccactgggagcatggttgcaagacgctagaagacgtcaggagcagatacaagcgatgccgctcgccgattcacaggccgtaagggagcagctgcgtcaggagcaggcactgcttgaagaaattgaaaggcacggcgaaaaagtagaagaatgccaacggttcgccaaacaatacatcaacgcaatcaaagattacgagctccagctggtgacctacaaggcccagctcgagcccgtcgcctcgccagccaagaaacctaaggtgcagtccggctctgagagcgtgattcaggagtacgtagatctgcgaactcattattctgagttgacaactctaacttctcagtacatcaaattcatttccgagacactcaggcgtatggaggaggaggaacggctggctgaacagcaaagagccgaggaacgcgagcggctggctgaagttgaagctgctcttgaaaaacagaggcagctggccgaggcccacgctcaggctaaggcgcaagcagaaagggaagcgaaagagctccaacagagaatgcaggaagaggtcgttcgcagagaagaagccgctgtcgatgcccaacagcagaagaggagtatccaggaagaactccagcagctgaggcagagctcagaagccgagattcaggctaaggcacgccaagctgaggccgctgaaagatctcggctccgaattgaggaagaaattagagtggtaagattgcagctggaggctacagagcggcaaagaggaggggctgagggcgagctccaagcactgcgagcaagagccgaagaagccgaggcacagaagcgacaagcgcaggaagaagctgaacgactccggcgtcaggtccaggacgagtctcagagaaagagacaggcggaggtggagctggccagcagggtgaaagcagaagctgaggctgctcgggaaaaacagagggcgctccaggctctggaggagctgagactccaagccgaggaagccgagaggcggcttcggcaggccgaggtggagcgagccaggcaggtccaagttgcgctggagaccgctcagcggagcgcagaggcagagctgcaatctaaacgggcatcttttgctgagaaaactgcgcaactggaaaggtctctgcaagaggaacacgtcgcagtcgcccaactgcgtgaggaggccgaacgaagggctcaacagcaggctgaggcggagagggccagggaggaagccgagagagaactggagcgttggcagctgaaggctaatgaagcactgcgcctcagactgcaggccgaggaagtggctcagcagaagtctctggcccaggccgaagccgagaagcaaaaggaagaggcagagagagaggccagacgcagaggaaaggcagaggaacaggcagtgaggcagagagagctggcggaacaagaactcgaaaagcaaagacaattggcagaaggcactgcacagcaacggcttgcggctgagcaggagctcatccgcctgagggctgagaccgaacaaggagagcagcagaggcaattgttggaagaagaattggctcggttgcaaagggaagcagccgctgctacccagaaaaggcaggagctggaagctgagctggctaaggtgagggctgaaatggaggtgctcctagcctccaaagcgagggccgaggaggaaagtaggtccacgtcagagaagagcaagcagcgactggaggctgaggctggccgtttcagagagcttgcagaggaggctgcaagacttcgcgctctggcagaggaagctaaaaggcaacgacagctggccgaggaagacgctgcacggcaacgagcggaggcagagcgagtcctcgctgagaagctggctgctatcggggaggctacccggctgaagaccgaggccgagatcgccctcaaagagaaagaagccgaaaacgaaagactccgccgtctcgcagaggacgaagcctttcagcgtcgtaggttggaggagcaggccgctcaacacaaagcagatatagaagagcgcttggcacagctgagaaaggccagcgacagtgagcttgagcgccaaaaggggctcgtcgaagacaccctccgacaaaggcgacaggtggaggaggagatcctggcactaaaagcctccttcgagaaggctgctgcaggcaaggctgaactggagctggagctgggcaggatcaggtctaacgctgaggataccctgcgaagcaaagaacaggcagagctggaggccgctaggcagcgccaactcgctgccgaagaagagagacgccgacgagaagctgaggaacgcgtgcagaagagcctcgccgctgaggaggaggctgctaggcagaggaaggcagcgctggaggaggtggagcgtctaaaggcaaaggtcgaagaagcaaggcgtttgagggaacgggcagagcaggaaagcgcaaggcagctgcaactggcacaggaggccgctcagaagagacttcaggcagaggaaaaggctcatgcctttgcagtacaacagaaagaacaggaactgcaacaaaccttacagcaagaacaaagtgtgctcgatcagctcaggggggaggctgaagctgctagaagggccgcagaggaggccgaggaagcacgagttcaggcagaacgcgaggctgcccagtctcgaagacaggttgaggaggccgagcgtttgaagcagagcgctgaagaacaagcccaggccagggcgcaggctcaggccgcagccgaaaagttgagaaaagaggctgagcaagaagctgctcggcgtgctcaggccgagcaggcagccctgaggcagaagcaggccgctgatgctgagatggagaagcacaagaaattcgcagagcagactctccggcagaaggcccaagttgagcaggagctcacaacactgaggctgcagctggaggaaacagatcaccagaaaaacctgctcgacgaggagttgcagcggcttaaagcagaagctaccgaggcagcgcgtcagcgctcacaggtggaggaggaactgttttcagtgcgtgtgcaaatggaggaacttagtaaactgaaggctcggatcgaagcagagaatcgagctctgatccttagggacaaagacaacacccagaggttcctacaagaggaggccgaaaaaatgaagcaggtggctgaggaagccgcacgcctgagcgtggctgcccaggaggccgcaagactcagacagttggccgaggaggacctggcgcaacagcgggcactcgctgagaagatgctgaaagagaagatgcaagccgtgcaggaggcaacacgcttaaaggcagaggctgagcttcttcagcagcagaaggaactggcccaggagcaggccagacgacttcaggaagataaagagcagatggcgcagcagctagccgaagagacacagggattccagcgcacgctggaggcagaaaggcagcgccagctggaaatgtctgccgaggcagagcgcctgaagctgcgggtcgcagaaatgtcccgagcacaggctcgagccgaagaggatgcccaacgattcagaaagcaggcggaagagatcggtgaaaaactccatagaacagagctggccactcaagaaaaagttacactcgtgcagaccttggagatccagagacaacagtccgatcatgacgccgaacgcttgagggaagccatcgccgagctcgaacgagagaaagaaaagctccagcaagaggcaaagcttctgcaactcaaaagtgaagaaatgcagactgtccagcaggagcagttactccaggaaacccaggctctgcaacaaagtttcctttctgagaaggattctcttttacaaagagaaagatttatcgaacaggaaaaggccaagctggagcaactcttccaggatgaggttgccaaagctcagcagctaagggaggagcagcagcgccagcagcagcaaatggaacaggagcgtcagcgcctagtcgcaagcatggaggaggccagacgacggcagcacgaggcggaagagggtgtgaggcggaagcaggaagagctacagcaactggagcagcagaggaggcagcaagaggaacttctggctgaggagaaccagagactcagagaacaattgcaattgcttgaggagcagcacagggctgcgctcgcgcatagcgaggaggttactgcctcccaggttgctgctaccaaaacactgcctaacggaagagacgcactggatgggccagccgctgaagccgagccggaacattcctttgacggcctgcgccgaaaagtatctgcccagcggctgcaggaagcagggatcctgagtgccgaagaactgcagaggctcgcccaaggtcacaccactgttgacgagctcgcacggcgagaagatgtgcgccattacctacaggggaggtctagcattgccggactgcttctaaaggccaccaacgagaaattgtccgtttacgccgcactgcagcgtcagctgctgtccccaggaactgcacttattctcctagaagctcaggcagcatcgggatttttgcttgaccctgtgagaaatcgtcgcctgacagtgaacgaggccgtgaaagaaggcgtggtcggaccagagctccaccacaaactgcttagtgccgaaagagctgtgaccggatataaggatccttacacgggtcagcagataagcctgtttcaagctatgcagaaggggttaatagtgcgagagcacggaatcaggttgctggaagctcagattgccaccgggggagtgatcgatccggtgcattcacacagagtccccgttgacgtggcataccgaagaggttattttgacgaggagatgaatcgcgtgctggctgacccctccgatgatacaaaaggcttttttgaccctaacacccacgaaaatctaacatacctccaactgctggagagatgtgtcgaggaccccgaaaccggactctgcttgctaccgttgaccgacaaggctgcaaaaggcggtgagcttgtctataccgatagcgaggctagagacgtctttgagaaagccactgtgagtgccccattcgggaagttccagggtaagaccgtgacaatctgggagattataaactccgagtacttcaccgccgagcaacgaagagacttgttgcgacaattccggacaggccgaataaccgtggaaaaaattattaagataattatcacagtggtcgaagaacaggaacagaaaggacgcctgtgtttcgaaggccttaggagcctggttcccgctgctgagctcttagaaagcagggtgattgaccgtgaattatatcagcagctgcagcggggtgagaggagcgtaagggacgtagctgaagtagacactgtccggagagctctgagaggagccaacgtgattgccggagtgtggctggaagaagctggacaaaaactctctatctataacgccctaaagaaagacctcctaccatccgacatggcagtcgcacttctcgaggcccaagcaggcactggccacatcattgatcctgccacttccgctagactgaccgtggacgaggcggtgagagccggtctggtgggacctgaatttcacgagaagctcctcagcgccgaaaaagccgttaccgggtacagggatccatacactggacaaagtgtctccctgtttcaggcactgaaaaaagggctgatacccagggaacagggcctgaggctgctggatgcccaactctccactggagggattgtcgatccctccaaatcccatagggtgccactcgacgtagcttgtgctcgtgggtgtctggacgaagagaccagtcgcgcattgtccgccccacgggctgacgcaaaagcctactccgacccaagtaccggggaaccggcaacctacggggagctgcagcaacgctgtcgtcccgatcagctcacaggcttaagcctccttccgttaagtgagaaggccgctcgggcacggcaggaagagttgtattcagagttgcaggctcgggaaaccttcgagaagacccctgtcgaggtccccgtcggcggtttcaaaggcaggactgttacagtgtgggaactgatcagcagtgagtattttaccgccgaacagaggcaagaactgctgcgccagtttcggacagggaaggtgacagtggagaaggtgattaagattctcattacgatcgtggaggaagtggaaaccctccggcaggagcgtttgtccttctccggccttagagcgccagtgcccgcttcggagttgttggcaagcggagtcctcagccgcgctcagttcgaacaactcaaggacggcaaaactaccgtaaaggatctttccgagctgggttccgtcaggacgctgttacaaggcagcggctgccttgcaggtatctacctggaggacaccaaggagaaagtctccatctatgaggcgatgcgtagggggctcctgcgtgccaccactgctgctctcttgctcgaggcccaagccgctacaggatttctggtcgaccccgttagaaatcaaaggctgtacgtccatgaggccgtgaaagctggggtggttgggccagaactgcacgaacagctcctgagtgcggagaaggccgtgactggctaccgcgatccttactccgggagcactatttctctctttcaggcaatgcagaagggactggtcctgaggcagcacgggatcaggctgcttgaggcccagatcgcaaccggtggtattatagatccggtccattcacatagggtgcctgttgacgtggcctaccagcggggatatttttctgaagagatgaatcgagttctggccgacccatctgacgatactaaaggcttctttgatccaaatacccatgaaaacctgacctatagacagcttcttgaacgctgcgtagaggaccctgagacgggactgaggttacttccattaaagggagcagaaaaagcagaagtcgttgagaccacccaggtctatacagaggaagagacccgacgcgcttttgaggaaacacagattgacatacccggaggaggctcccacgggggttcaacaatgtctctgtgggaagtaatgcaaagtgatctgataccggaggaacagcgggctcagttgatggctgactttcaagctggtcgcgtaactaaggagcgcatgattattatcattatcgaaatcatcgagaagaccgagattatccggcagcagggactggcatcctacgattatgtccggagaagactcacagctgaagacctgttcgaggccaggatcatatctctggaaacctataatctgctgagagagggcaccaggtctctcagggaggcacttgaggccgaatccgcctggtgctatttatacggcaccggatcagtggccggtgtatacctgcctggctctagacagacactgtccatctatcaggcgttaaagaaaggcttgctcagtgccgaggtagccagactgctactcgaggcccaggcggcaacaggatttctgcttgaccctgttaaaggggagcgattaacggttgatgaagcggtgcgcaaaggcctggtcgggccagaactgcacgacaggctgctgagcgctgagcgagccgtcactgggtaccgtgatccctacacagagcagactattagtctcttccaagccatgaagaaagagctgattccaaccgaagaggctctgcgcctgttggacgctcagctagcaaccggcggaatcgtcgaccctcgtcttggcttccatttgcccttggaagtggcctaccagcgcggatacctgaacaaagacacacatgaccaattgtctgaacctagcgaggtgaggagttacgtggatccaagtactgatgaaagactttcatatactcagctcctgagaagatgcaggagggacgacggcacagggcagctgctgcttcccctgagcgacgcccgtaagctgacatttagaggattacgcaaacaaatcacaatggaggaactcgtgaggtcacaagtgatggacgaggctactgcactccagctcagagaaggattgacctctatagaagaggtgaccaagaatcttcaaaagttcctggaaggaacaagctgcatcgccggagtgttcgtcgatgccacaaaggaacgcctctccgtgtatcaggccatgaagaaggggatcatccgaccaggcacagcctttgaactcttggaggcccaggcagcgacaggatatgttattgatcctatcaagggcttgaagttgactgtggaggaggccgtccgaatgggaattgtcggcccagagttcaaagacaaactgctgtcggcggagagagctgtaacgggttacaaggacccttacagcgggaagctgattagtctgttccaggccatgaaaaaagggcttattctcaaagaccatgggattcgtctgttagaagcacagatagctaccggtgggattattgacccagaagaatcacaccgtctcccggtggaggtggcatataagcgaggattgttcgacgaggaaatgaacgaaatcctcaccgatcctagtgatgacaccaaaggtttctttgaccccaatactgaggagaatcttacatatctgcagctcatggagcggtgtattactgacccccagactggcctgtgcctcctgccactgaaggagaagaagcgggagcgcaagacctcctccaagagcagtgttagaaagcgtagagtcgtgattgtggatcccgagacgggtaaggagatgtccgtttatgaggcatatagaaaaggtctgattgaccaccagacatacctcgagctcagcgagcaggaatgtgagtgggaggagattacgatatcctcatccgacggggtggtaaaaagcatgataattgatcgaagaagcggtaggcagtacgacattgacgacgcgattgccaagaatttgatcgatcgttccgctctcgaccagtacagggccggaaccctgagcataacagaattcgccgacatgttgtctggcaatgccggaggatttaggtcccggtccagctccgtcggatcgtctagttcatacccaatctcacccgctgtgtcccgcacacagctcgcgtcttggagtgatcccactgaggagacagggccagtggcaggcatcctggacactgagaccctggaaaaggtcagcattactgaagccatgcaccgcaacttggtggacaatatcacagggcagcgtttgttggaagcccaagcctgcacggggggaattatcgacccctcaaccggagagcggttccctgtgaccgacgcagtgaataaaggcctggtcgacaagattatggtcgatcgcatcaacctggctcagaaggccttctgcggcttcgaagatcctcgcactaagaccaaaatgtcggctgctcaggctcttaaaaaaggatggctgtattacgaagcgggacaaaggtttttggaagtgcagtacctcactggtggcttgattgagccagatacaccaggtcgtgtacccctggacgaggcactacaacgcggaacagtggatgctaggactgcccagaagctgcgagacgtgggcgcatactctaagtatctaacatgtcccaagacaaagttgaaaatcagctacaaggatgccctggatagaagcatggtggaggaggggaccggccttcggctactcgaagcggctgcccagtcaactaaaggttattacagcccatacagcgtgagcggatctggcagcactgctgggtcacggaccgggtcccggaccggctcaagggctggttcaagaaggggcagtttcgatgcaaccgggagcggtttttctatgacattcagctcctcgtcatattcttcgtctggatatggtagacggtatgcatctggtagtagtgccagtctgggcggtcctgagagcgccgtcgcctaa

SEQ ID NO: 235213 - DNA, 13725 bp, synthetic construct
  misc_feature 1..13725: note = Description of Artificial Sequence: Synthetic coding sequence
  source 1..13725: mol_type = other DNA
atgtccggtgaggacgccgaggtgagggctgtctccgaagacgtatctaatggcagctcaggctccccctcccccggagatacactcccatggaatctaggcaaaactcaaaggagccggagatcgggcggaggagccggaagcaatggctctgtgctcgacccagcggagagagccgtgattcgaattgccgatgaacgtgatagagtgcaaaaaaaaacattcacaaaatgggtaaataaacacctgatcaaggcacagcgccacatctcagatttgtatgaggatctgagagacggacacaatttaatcagcttactcgaggtgctgagtggcgattctctgccacgggagaagggcaggatgcggtttcataaattgcaaaacgtgcagattgcgctggactatctgagacaccggcaggtgaagctggtgaacattcgcaatgatgacattgctgacgggaatccaaaactgactctagggttaatatggactattattcttcatttccaaattagtgatatccaggtctctgggcagagtgaggatatgacagctaaagaaaaactgctcctctggtcacagagaatggttgaggggtatcaaggcctcaggtgcgacaatttcacttccagctggagggatggtcgcctctttaacgccatcatacaccgccacaagcctctactgattgacatgaacaaggtgtataggcaaaccaatttggaaaacctagatcaggcgttcagtgtggccgaacgggaccttggagttactcgccttttagaccccgaggacgtggacgttcctcaacccgatgaaaagagtattattacttacgtctcttcactttacgacgctatgcccagggtccccgatgtgcaggacggagtgagggctaatgagctgcagctgcggtggcaggagtaccgcgaactggtcctgttgctcttgcagtggatgagacaccacacggcagcttttgaggaacggcgtttcccgtcttccttcgaagagatagaaattctgtggagtcagtttctcaagttcaaggaaatggaactgcccgctaaagaagctgataaaaaccgtagcaagggcatttatcagtccctcgagggtgccgtccaggctggccagctgaaggtgccccctgggtaccaccccctggatgtggaaaaggagtggggtaagttacatgtcgcgattttggagcgcgaaaagcagctgagaagtgaattcgaacgtctcgagtgtctgcagagaattgtgacaaaactgcagatggaggctggattgtgtgaggagcagctaaatcaggccgatgctttacttcaatcggacgtgagactccttgcagccggaaaagtgccgcagagagctggggaggtagagcgggatttggataaggctgattcaatgataagactgctcttcaacgacgtgcagactctgaaggacgggaggcaccctcagggtgaacaaatgtatcggagagtctacagattacatgagcggctcgttgcaatcagaacagaatacaatctcagactgaaagcaggggtcgccgctcccgctactcaggtcgctcaggtgactctccagtctgttcagcggaggcctgaactcgaagactcgactctacgatacctccaggatttgctggcttgggtcgaggagaaccagcaccgggtcgatggcgctgaatggggcgtagacttgccttcagtggaagcccagctgggcagtcatcgtgggctgcaccagagtatcgaagagttccgcgctaagattgaaagggctcgaagcgacgagggacagctctctcctgcaacacgaggggcttatcgggactgcctagggagattagatctgcagtacgccaagctgctgaattcaagtaaggcccgtctccggagccttgaaagtcttcattctttcgtggctgcggctacgaaggaacttatgtggttaaacgaaaaggaggaagaggaggttggcttcgactggagcgatagaaacaccaatatgacggcaaaaaaggaatcctactcggccctgatgcgcgaattagagcttaaggagaaaaaaatcaaggaacttcagaacgcaggcgatcggctcttgagagaagatcacccagcaagaccaacggtggagtcttttcaagccgctctccagacccagtggtcatggatgctccaactctgctgttgcattgaagcacacctgaaagaaaatgctgcctattttcagttcttcagcgacgtgcgggaagcagaagggcagctgcagaagctgcaggaggcgctccgcaggaaatactcatgcgacaggagcgcgaccgttactcggttggaagacttactccaagatgctcaggatgagaaggagcagttaaatgaatataaggggcacctatccggcctcgcaaagcgcgctaaggctgtagtccaattgaagcccagacaccccgctcaccccatgcggggtcgattgcctctcttggccgtttgtgattataagcaggtcgaagtgaccgttcacaaaggcgatgagtgtcagctcgttgggcctgcacagccttcccactggaaagtacttagcagtagcgggagtgaagctgcagttccgtctgtgtgctttctcgtgccaccacctaaccaggaggcacaggaggccgtcacaaggttagaagctcagcaccaggccctcgtgaccctctggcaccagctgcacgttgacatgaaatccctgttggcctggcagtccctccgtagagatgtgcagctcatcaggtcttggtcgcttgctactttccggacattgaagccagaggaacagagacaggccctacactccctggagttgcactatcaggccttcctcagagacagtcaagatgcagggggatttggccctgaggatcggcttatggcggaacgcgaatacggcagctgctctcaccattatcagcaactattgcagtcacttgagcaaggggctcaggaggagtcgcggtgccaaagatgcattagcgagcttaaagacattaggctgcagctagaggcttgtgaaactcgcacagtgcaccgcttacgtctgccattagataaggaacccgcaagggaatgtgcacagaggatagctgagcaacaaaaggcccaggccgaggtcgaggggctgggcaaaggtgtggccaggctatctgcagaggcagaaaaggtgctggctttgcctgaaccgtcgccagccgcaccgacactgcgatccgaactcgagttgaccctcggcaaactcgagcaggtgcgaagcctttctgctatttacctggaaaagctgaaaacaatctcacttgtgatccgcggtacacaaggagcagaggaagtcttacgcgctcacgaggaacaactgaaggaagctcaggcagtcccagccaccttgccggagctggaggcgacaaaggcctccctcaagaagttgagagcccaggcggaagcccagcagcctactttcgacgctttaagggatgaattgcgcggagctcaggaggtgggcgagagactccagcaaagacatggcgagcgggatgtcgaggttgaaaggtggcgcgagcgcgtggcccaactcctggaacggtggcaggctgtgctggctcagacagatgtacgacagcgggagcttgagcaactgggccgtcagcttcggtattaccgcgagtctgctgaccctttaggagcatggctccaggacgctcggaggaggcaggaacagatccaagcaatgccactggcagattcgcaggcagtgagggagcaacttaggcaggagcaggctctactggaggaaatagaaaggcacggagaaaaggtggaggagtgccagaggttcgccaaacagtatattaacgctatcaaggactatgagttgcaactagtgacgtacaaagcccagctggaaccagtcgcatctcctgctaagaagccgaaggtgcaaagtggctctgagtccgtgatccaggaatatgttgatcttaggacccactattcagagcttacaactttgacgagccaatacataaaattcataagcgagaccctgagacgcatggaggaggaggagcgtctggccgagcaacaacgcgcagaggaacgggagaggctggctgaggttgaagctgccctcgagaagcagagacagctggcggaggcccacgcacaagccaaggcccaggcggaacgcgaagccaaagaactgcaacaaagaatgcaggaagaggtcgtgagacgggaggaggccgcagtggatgcacaacagcagaaacggtctattcaggaggaactgcaacagctgagacagtccagcgaggccgagattcaggctaaggctcggcaggccgaggcagctgaaaggtctcgcctgagaattgaagaggaaattcgggtcgttaggctgcagcttgaggcaaccgaacgacagcgcggaggcgcagagggcgaactgcaggctctgcgggctagggctgaggaggccgaagcccaaaagcggcaggctcaggaagaggcggagcggttgagaaggcaggtgcaggacgagtcacagcggaagcgacaggccgaggtggagttggcttctagggtgaaagccgaagcagaggccgcacgggagaagcagcgcgcattacaggccttagaagagctgagactgcaggctgaagaagccgagaggagattacgccaagccgaggtcgaacgcgcacgccaggtccaggttgcgctcgaaaccgcacagcgctctgccgaagctgagctacagagcaagcgagcttcttttgccgaaaaaactgcacagctcgagaggtctctccaggaggaacatgtggcagtcgcacagttgcgggaagaggccgagagacgcgcacagcagcaagcggaggctgagcgcgctcgtgaggaagctgagcgcgaactggagagatggcagttaaaagcgaacgaggcgctcagattgcgtctccaagccgaggaggttgcgcagcagaaatctcttgcacaagcagaggcagaaaaacagaaagaagaggcagagcgtgaggccagaaggcgaggaaaagcagaggagcaggccgttcgtcagcgcgaactcgctgagcaagaactcgagaaacagcggcagctcgctgaaggcaccgcccagcaacggctggctgccgaacaggagctcatccgcttgagagctgaaaccgaacagggagaacagcaaaggcagttgctggaggaagagctcgcgcgactccaacgtgaagccgcagcagcaacacagaaacggcaggaactggaagcagagctggccaaggtgagggcggaaatggaagtgctactggcttcaaaggcacgcgctgaagaagaaagccgatctacctccgaaaaatcaaaacaacgactcgaggccgaggccggacgcttcagagaactggcggaagaggcagcacgactgagagccctggccgaagaagctaaacgccagcgccaattagcagaggaggacgcggctcgccagcgagccgaggccgaacgagttcttgctgaaaaactggcagctattggagaggctaccagactcaaaacagaggctgagatcgctctcaaggaaaaagaggcagaaaatgagcgactgcggagattagcagaggacgaggcctttcagcggcgtcggcttgaggagcaagccgctcagcataaggccgatatcgaggaacgcctggcccaacttaggaaggccagcgattccgagttagagaggcaaaagggcttggtagaggatacactgaggcagagacgccaagtggaagaagagatattggccctgaaggcgagtttcgagaaagctgcggcaggtaaggcagagttggaactagagcttgggaggattcgctctaatgccgaggataccctcaggagtaaagaacaagcagagctggaggccgcaagacagcgccagctggctgcagaggaggagagacgccgacgtgaagccgaggagcgggtccagaagagcctagcagcagaagaagaagcggcacggcagcgcaaggctgccctggaggaagtcgagcggctgaaggcgaaggttgaggaggcccgtcgcttgcgcgaaagggcagagcaggaatcagccaggcagttgcagctggctcaggaagccgcacagaagcgtcttcaagcggaggagaaagcccatgcctttgcagtgcaacagaaggaacaggagctgcagcagactctgcaacaagaacagtccgtgttagatcagctgcggggagaggctgaggccgctaggcgggctgcagaagaagccgaagaggcccgtgtgcaggctgagcgtgaagctgcacaaagcagacgccaggtagaagaagctgaacgactgaaacagagtgcagaagaacaggcccaggcccgagcacaggcccaggcggctgccgaaaaattgaggaaggaagccgaacaggaggcagccaggcgcgcacaggccgagcaggctgctttgcgacagaagcaggccgcagatgcagagatggagaaacacaagaaattcgcggaacagactttgcggcagaaggcacaggtggagcaggagttgacgacactgaggctgcaactggaggagacagaccatcagaaaaacctgctggacgaggaactccaaaggttgaaggctgaggcaaccgaagctgcaagacagaggtctcaagtggaagaggagctattctccgtgagagtgcaaatggaggagctaagtaaactgaaagccaggattgaggctgaaaacagggcattaatccttagagacaaagacaacacacagcgttttctgcaggaggaggcggaaaagatgaagcaggttgctgaagaagccgcaaggttgagcgtcgcagcccaagaggcagcaaggttaagacaattggccgaggaggacctcgcacagcaacgcgcactggctgaaaagatgttgaaggagaaaatgcaggcagtgcaggaagcgactagactgaaggcagaagccgaacttctccagcagcagaaagagttggcgcaggaacaggcccgtcggctgcaggaggataaagaacaaatggctcagcagttggcggaggaaactcagggtttccagcgaactctcgaggcggagaggcaaaggcagctcgagatgtctgctgaggcagaacggcttaagttgcgagtagccgaaatgtcacgagcacaggctcgggctgaagaggacgctcagcgcttccgcaaacaggccgaagagataggtgaaaagctgcatcggaccgagctcgcgacgcaggagaaagtgacactggtccaaaccctcgagattcaacgacaacaaagtgaccacgacgccgaaagactgagggaggcgattgcagagctggagagggagaaggagaaactccagcaggaggccaagctgcttcagctgaaaagtgaagaaatgcagactgtgcagcaggagcagctactccaggaaactcaggctttacagcaatcattcctgtcagaaaaggatagcttgcttcagagggagaggttcatcgaacaggaaaaggccaagctggaacagttgttccaggatgaggtggctaaggcccagcagctcagggaagaacagcagaggcagcagcagcagatggaacaggagcggcagcggttggtagctagtatggaggaagcgcgacgaaggcaacatgaggccgaagagggggtgcgcagaaagcaggaagagctccagcagctcgaacagcagcggcgacagcaggaagaacttctagccgaggagaaccagaggctgagagaacagctccagctactggaagagcaacacagagctgccctggcccactcagaggaggtgaccgctagccaagtcgctgcaacgaagacactgcctaacggaagggacgctcttgatgggcctgctgccgaggctgagcctgaacattcatttgatggcctgcgcagaaaggtcagcgctcagcgactccaggaggccggtattctaagtgccgaagagttacagcgtctggcccaggggcatactactgttgatgagctggccaggagagaggatgtgcgacactacctgcagggaaggagttcgatcgcgggtttactgcttaaggcgaccaacgagaagttgtctgtttacgccgctctgcagagacagctgctgagcccgggaacagcgctaatcctgttggaggcgcaggccgcttcaggattcctccttgatcccgtgagaaataggaggctgaccgtgaacgaagccgtaaaggagggagtcgttgggcctgagttgcatcataagctgctatcagcagaaagagccgtgactgggtacaaggatccctacacagggcaacaaataagcctctttcaagcaatgcagaagggattaatcgtgagggaacacggaatacggctcctggaagcccagattgccaccggaggggtgatcgaccccgtccacagccaccgagtaccggtcgacgtggcttatcggagaggctactttgatgaagagatgaaccgggtcctcgccgaccccagcgatgacactaaggggttttttgaccctaacacacacgaaaatttaacctacctgcagctgcttgaaagatgcgttgaagaccccgaaactggcctgtgcctccttcccctgactgacaaagctgctaagggtggcgaactggtgtatacagattcagaagcacgcgacgtgttcgaaaaggctacagtctcggccccatttggcaaattccagggaaaaacagtcacaatctgggagattatcaacagtgaatatttcactgctgaacagcggcgagatttactgcgtcagttcaggaccggcagaatcactgtcgagaagatcataaagatcatcatcacagtggtagaggagcaagaacaaaaagggcgtttgtgtttcgagggcctgcggagcttagtgcctgcagcagaactgctggagtcaagggtcatcgatcgggagctctaccaacagctgcagagaggcgagagaagcgtgcgcgacgtggcggaggttgacactgtgagacgtgccctgaggggagccaatgtgatagctggcgtctggctggaagaagccggtcaaaaactgagcatttacaatgccctcaagaaggacctgctgccgtctgacatggccgtcgccctgctggaggcacaagcgggaactggacatattatcgaccctgcaacttccgcaagactcactgtagatgaagccgtgcgcgcaggcctggtgggaccagagtttcacgaaaagctgctcagtgctgaaaaagccgtgaccgggtatcgcgatccatacacagggcagtctgtgtcactgttccaggcactcaagaaaggactgatcccacgtgagcaggggctaagactgctggacgcccagttatcaactggtgggatcgtggaccccagcaagtcacatagagtaccactggatgtggcctgcgccagaggatgcctcgatgaggagacctctcgggcactgagtgcccctcgtgccgacgctaaggcttattctgatccctccaccggagagccggctacttacggagagctgcagcagagatgtagacccgatcagctcacagggctttcacttttgcccctgtctgaaaaagccgctcgggcacgacaagaggaactctactcggaactgcaggcccgagaaacctttgagaaaacaccagtggaggtccccgtcggtggattcaagggtcgcaccgtcactgtctgggagctgatttcatctgagtactttactgccgagcagaggcaggagttactaaggcaattccggaccggaaaggtaaccgtagagaaagtgattaagattctgattactatcgtggaagaggtcgaaacattgcgccaggaaagactttcattctcagggttacgggctccagtgccggcatccgaattactcgcttcaggcgtgctgtctagagctcagttcgaacagctgaaagatggcaagaccacagtcaaggatttgtccgagttgggctctgtgagaacattgcttcagggctccgggtgtctggctggaatctatttagaggatacaaaagaaaaggtctctatctacgaagccatgcgtagggggctgctgcgggctactaccgctgccctcctgctcgaggcacaagcagctaccggatttcttgttgatccagtgcggaatcagcgcctatacgtacacgaggccgtcaaagcaggagtggtgggtcccgagctgcatgagcagctgctctctgctgagaaggcagtcactggatatcgggacccgtactcagggtctacaatcagcttgtttcaagccatgcagaagggacttgtcctccgccagcatggcatccgacttttggaggctcaaatcgccaccggtggtatcatcgaccccgtgcactcccacagggtgccagtcgatgtggcataccagcggggttacttctctgaagagatgaaccgggtccttgccgaccccagtgacgacacaaagggattcttcgacccaaacacccatgaaaaccttacgtacaggcagctgctcgagaggtgcgtcgaagatccggagactggattgaggctcttaccactaaagggggctgagaaggctgaagtggtggagactactcaggtctatacggaagaggaaacccggcgtgcctttgaggagacacagatcgacatcccgggaggtgggagtcacggcggatctaccatgtcgctatgggaagtgatgcagagcgacctgattcctgaggagcagcgggctcagcttatggcagattttcaggctggtcgggttaccaaggagcggatgatcatcattattatagaaatcatcgaaaaaactgaaattatccgacaacaaggccttgcaagctacgattacgtcagacggcgattgactgctgaggacctgtttgaggctaggatcatttccctggagacatacaacctgctgcgggaggggacacggtcgttgagggaggcattagaagcggagtccgcctggtgttacctttatggcacaggatctgtggctggagtttacctccccggaagtcgccagactctaagtatctatcaggccctgaagaagggtctgctaagcgccgaagtggccagactgctgttggaagctcaagctgcaaccggattcctgctcgatccagtcaagggcgagagattgaccgttgacgaggccgtacggaagggacttgtgggcccagaactacacgatcgcttattaagcgccgaaagagcggtgaccgggtatagggatccatacaccgagcagaccatctccttattccaagctatgaaaaaggaactcatcccgacggaggaagcattgaggctcctggatgcccagttggctaccgggggaattgtcgacccccgactcggctttcatctacctttagaggtagcctaccaacgcggttatcttaataaggacacccatgaccaactctcagagccgtccgaggtccggagttacgtcgacccatctactgatgaaaggctgagttacactcagctgctgagacgatgcaggcgagacgacgggaccgggcagctgctgttacccctatctgacgcccgaaagttgactttccggggtctccgcaagcagatcactatggaggaattggtacgctcgcaggtcatggacgaggcaactgcactgcagttaagagaaggcctcaccagtatcgaggaggtgaccaagaaccttcaaaaattcctcgaaggaacctcctgcattgccggtgtgtttgttgatgctaccaaggaacgactcagtgtctaccaggctatgaaaaagggcatcatcagacccggaacggccttcgaactgttggaggcgcaggccgcaaccggctatgtgattgatcccatcaaaggcttaaaactaaccgtggaggaggcagtaagaatgggtatcgtggggcctgaatttaaggataagcttctgagcgctgagagagcagtaacgggttataaagacccgtacagcggaaaactcatttctctgttccaagctatgaagaagggcttaattttgaaagaccacggcatccggctgttggaggcgcaaatcgccacagggggaataattgaccctgaggagtcacatcgacttcccgtcgaggtggcctataagagaggcctttttgacgaggagatgaatgaaatcttgactgatccaagcgacgatacaaagggtttctttgatccgaacaccgaagagaacctgacctatctgcagctgatggaacgctgtatcacggatcctcagaccgggctttgcttgttacccctgaaagagaaaaaaagggaacgcaaaacttctagcaagtccagcgtccgaaaacgcagagtggtgatcgtggaccccgaaaccgggaaggagatgtctgtatatgaagcttaccgtaagggtctaatcgaccatcagacttatctggagctctccgagcaggaatgcgagtgggaggaaattactataagctcttccgacggagtggtgaagagcatgatcatcgatcgccgttctggtcgacaatatgacattgacgacgcaatagccaagaacctgattgatagaagtgctcttgatcagtacagggccggtaccctcagtattacagaattcgcggacatgcttagcggaaacgctggtggctttcgatccaggtctagttccgtgggatcatcttcctcctacccaatcagcccagccgtcagtaggactcagctagcgagctggtcggaccccacagaggagactggtccagtggccggaatcctggatactgaaactctcgagaaggtgtcaattaccgaagctatgcataggaacctggtcgacaatattaccggccagcgactgctcgaggcacaagcgtgcacaggaggtatcatcgacccctctaccggtgagaggtttcccgtcactgatgctgtgaacaaaggactggtggataagattatggttgatcgtatcaacttagctcagaaagcattctgcggttttgaagatcctaggaccaagactaagatgtcagccgcacaggccctaaagaaagggtggctgtattatgaggcaggccaacggttcttggaggtacaatacctgactgggggtctcattgagccggacactcccggaagggtgcccctggacgaagcactccagaggggtaccgtggatgctcggaccgcacagaagctgcgggacgtcggagcctatagcaagtatcttacctgtccaaaaactaaattgaagataagttacaaggatgcacttgatcgcagtatggtggaggaaggcaccggcctgagactcttggaggctgctgctcaatctaccaaggggtattactccccatactcagtatccggttctggctctactgccggtagccgaaccggaagtcgtactgggtctcgggcaggcagcaggaggggatccttcgacgccaccggatctggtttctctatgactttctcgagcagtagctacagcagttccggctacgggcgacgctacgcatccgggagctccgcaagtctagggggacccgaatctgccgtcgcctag

SEQ ID NO: 235214 - DNA, 13713 bp, synthetic construct
  misc_feature 1..13713: note = Description of Artificial Sequence: Synthetic coding sequence
  source 1..13713: mol_type = other DNA
atgtccggggaggacgcggaggtacgagcagtgtccgaggatgtgagcaacgggagctccggctcgccatctcccggtgacacgctgccctggaacctcggcaagactcagcggtcccgcagaagcggaggaggtgccggatccaatggaagtgtgctggatcctgctgagagggcggtcattcggatagccgacgagcgagaccgagtacagaaaaagactttcaccaagtgggtgaataagcacctgatcaaagcacagcgccacatcagtgacttatacgaagacctccgggatggccataatcttattagtctcttagaagtgctcagcggggacagcctccctagagagaaaggacggatgaggtttcataagctccagaatgtgcagattgctctggactatttaagacatcgccaggtaaaactcgtcaacataaggaacgacgacattgcagacggaaaccctaagctgacactgggtttgatctggaccatcatcctccacttccagatttcagatatccaggtgtccggtcagagcgaagatatgaccgcgaaagagaagctgttgctttggagccagcgtatggtggaagggtaccaagggttgcgctgcgacaacttcaccagctcatggcgtgacggcagacttttcaatgccattatccaccggcacaagccactgctgatagacatgaacaaggtatatcgacagaccaacttagagaacctggaccaggcttttagtgtggctgaaagagatttgggcgtcacacgactcttggatcccgaggacgtcgacgtaccacagcccgacgagaaaagtattatcacatacgtctcatctctttacgacgccatgcccagggtgccagacgttcaggacggcgagctgcagctgagatggcaggagtatagagaactcgtcctcttactgttacagtggatgaggcatcacaccgctgctttcgaggagaggaggttcccaagctctttcgaagagattgagattctatggtctcagtttctgaagttcaaggagatggagctgccagcaaaagaagccgacaagaaccgcagcaagggcatctatcagtctttggagggagcggtccaggccggtcagttgaaggttccacccggttaccatccacttgacgtggaaaaggagtggggaaagttgcacgtggccattctcgagcgagagaagcaactccgttctgagtttgagagattggaatgtcttcagcgaatagttacaaagctccagatggaggcaggtctgtgtgaggagcagctgaaccaggcagatgcactactacagagtgatgtcagactactggccgctgggaaagtgccgcagcgggctggggaagtagagagagatctggacaaggccgactcgatgattcggctcctgttcaacgatgtgcaaacactgaaagatggccgacatccccagggcgaacaaatgtaccgtcgggtttacagactgcacgagagactggtcgccattaggaccgagtacaatttaagactcaaagcgggtgtcgctgcccctgctacgcaggtggcgcaggtgactttgcagtccgtccagaggagaccagaactggaagatagcacattacgatacctgcaggatttactcgcatgggtcgaggaaaatcaacaccgtgtcgacggcgctgaatggggcgtggatttgccatctgtagaggctcagctgggttcccatcggggtctgcaccagtcgattgaagaatttagagcgaaaatcgagcgtgcacggtctgatgagggacagctatcaccagccacaaggggagcctatagagactgtctggggaggcttgacctccaatatgccaagctcctgaattcgtcaaaagccagactgcggtctctggagtcgctgcactcattcgtagcagcggctacaaaggaactcatgtggttaaatgaaaaagaggaagaagaagtggggtttgactggagcgatcgcaataccaacatgactgctaagaaagagagctactccgcactcatgagggagctcgagctaaaagaaaaaaaaattaaagaactccaaaacgctggtgacagattgctgcgagaggatcaccctgcaaggccaaccgtggaaagttttcaagctgcgctccagactcaatggtcttggatgctgcagctctgctgctgtatcgaggctcatctgaaggagaacgcagcctacttccagttttttagcgatgtacgggaggcagaaggccaactgcaaaagctccaggaagccctgaggagaaagtattcttgtgatcgaagtgctactgtgaccagactggaggatctgcttcaggatgcccaggacgaaaaggaacagctcaacgagtacaaaggtcatctgtccggactcgctaagcgggctaaggcagtcgtgcagttgaaacccaggcatcccgcacaccctatgcggggtaggttacccctgttggcagtgtgcgattacaagcaggttgaggtcactgtgcacaaaggagatgagtgtcaactggtcggccctgcccagccaagccactggaaagtgttgtcttcgtccggctccgaagcagccgtgccgagcgtgtgcttcctggtgccaccacccaatcaggaggcgcaagaggccgtgactcgcctagaagcacagcaccaagcactggtgacattgtggcaccagctgcatgtcgatatgaagagcttgctggcttggcagagcttaaggcgcgatgtgcagctgataagatcctggtcactggctaccttcaggaccctcaagccggaagaacaacgtcaggccctgcatagcctggaactgcactaccaggcattcttgcgggattcccaggacgcagggggatttggtcccgaagataggctgatggccgaaagagagtacggttcctgctcacatcactaccagcagctgttacagagcctggagcaaggggctcaggaggaaagccgctgtcaacgctgtattagcgagctaaaagacatccgtctccagctggaggcttgtgagactcgaaccgttcacagacttcgtctgccactggacaaggagccggcacgtgagtgcgcgcagcggattgccgagcagcagaaggctcaagcagaggtcgagggtcttgggaaaggagtggcacgcttaagcgctgaagcagagaaagtcctggccttgccagagccttcacctgctgctcctacactgagatctgagttggaactaaccctcggcaagctggaacaggttcgatctctgagcgcaatctacctggaaaaactcaaaaccatcagcctcgtaattcggggaacacagggagccgaggaggtgttaagggcccacgaagaacagctcaaggaagctcaagccgtgcccgcaacgctgcccgaactggaggccactaaagctagccttaagaagttaagagcgcaggcagaggcacaacagcctacctttgacgcactccgggatgagctgcgaggtgctcaagaggttggcgaaagactccagcaacggcacggggagagagacgttgaagtcgagagatggcgagagcgcgtggcacagttacttgaacggtggcaggccgtgctggcccagacagacgtgcgtcagcgggagcttgaacagcttgggagacagctccgctattatcgcgaatccgccgatcctctgggggcttggcttcaggacgcccgtaggaggcaagagcagatccaagccatgcctctggctgatagtcaggccgtgcgcgagcagctaaggcaggagcaggctctacttgaggagatcgaacggcacggtgaaaaggtcgaggagtgtcagcggttcgctaagcaatatataaacgccatcaaggattacgaactgcagctggttacctacaaggcacaactcgaacctgtggcgtcaccagccaagaagcctaaggtgcagtctggatccgagagcgtgatccaagagtatgtcgacctcagaacacattacagcgaactcaccacgctgaccagccagtacattaaattcatttccgaaacattaagaagaatggaggaggaggaaagactggccgagcagcagagagccgaggaaagagaacgtctggccgaggtagaggccgctcttgagaaacaacgacagctcgctgaagctcatgcgcaggcgaaagcacaggccgaaagagaggccaaggagctgcagcagaggatgcaagaggaggttgttcggagagaggaggctgctgtggacgcccagcagcagaagaggtccatccaagaggagttgcagcaactgagacaaagtagcgaggccgaaatccaggctaaagcaaggcaggccgaagctgccgagcggagcagactgcgtatcgaagaagaaatcagggtggtccgcctgcagttggaagcgacagagcggcagcgcggaggagctgagggagaactgcaagcattgagggccagggccgaggaggcagaggcccaaaaacgacaggctcaggaagaggctgaaagacttagacgccaggtgcaggatgaaagccagcggaagaggcaggccgaagtggagctggcaagccgggtgaaagccgaggcggaggcagcgcgagagaagcaaagagcactgcaagctctggaagagctccggctgcaagctgaggaagccgaaaggaggctgcgacaggcggaggtggaacgtgctcggcaagtccaggttgcattagagacagcccaacgaagcgcagaagccgaacttcagtcgaagcgggcatctttcgccgaaaagactgcccagctcgaacggagcctgcaggaagagcacgttgctgtggctcagctgcgagaggaagccgagcggagggcacagcaacaggctgaggccgagagggccagggaggaggctgagcgtgaattggaacgttggcagttaaaggctaatgaggccctgaggctcaggttacaggctgaggaggtggcccagcagaaaagtttggctcaggctgaggctgaaaaacagaaggaagaagccgagcgagaggcacggaggcgtgggaaagctgaggagcaagccgtgaggcagagggaactggctgagcaagagctagaaaaacagcgccagctcgctgagggcaccgcccagcagcggctggcggctgaacaggagctgattcgcctccgcgcagagacagagcagggcgagcaacagcggcagctcctggaggaagagctggccagattgcagcgggaggccgctgctgcaacacagaagcgccaggagctggaggcggagttggccaaagtgcgtgctgagatggaggtcttgctggcgtcaaaggccagagccgaagaagaatcacggtcaacttctgagaagtctaagcagcgcctagaagccgaggcaggtcggtttagggaactcgcggaggaggccgcacggctacgcgcactcgccgaggaggccaagagacagaggcaactcgctgaagaagacgccgcaaggcagagggctgaggctgagcgtgtcttggccgagaaactcgcagcgatcggcgaggccactcgtctgaagaccgaagccgagatagccctgaaagagaaggaagccgagaatgagaggctgagacgccttgccgaggacgaggctttccaaaggcgacgtcttgaagaacaagctgcacaacacaaggccgacatagaagaaagactcgcgcagttgcgcaaggcaagcgattccgaattagaacggcaaaagggtcttgtcgaagatacactacgacagcgccgtcaggtcgaggaagagatcctggcattgaaagcgtccttcgaaaaagctgctgccggtaaggctgaactggagctggagctcggcagaatccgctctaacgccgaagacactctgcgcagcaaggaacaggctgaactggaggccgctcgtcagaggcagctggctgccgaagaggaaaggagaagaagggaggcagaggaacgtgtacagaaatcactagccgcagaagaggaggctgcgaggcagcggaaagccgcattggaagaggtcgagcgcctgaaagcgaaagttgaggaagccagaaggctccgagagagagcagaacaggaaagcgcacgccagctgcaactggcacaggaggcagcccagaagcgattgcaagctgaggagaaggctcacgcgttcgctgtgcagcagaaagaacaagagctgcagcagaccctccaacaggaacagtcagtgttggatcagctgcgcggagaagccgaggccgcaagacgggcagcagaggaagccgaagaagcaagagtgcaggctgagcgggaagcagcgcagtccagacgccaggtggaagaggcagaacgtctgaaacagtcggcagaagagcaggctcaggctcgagcccaggctcaggctgcagccgagaaactccggaaggaggccgaacaagaggctgccaggcgcgcacaggccgaacaagccgctctcaggcagaagcaggccgctgacgccgagatggaaaaacataaaaaatttgccgagcagactctgcggcagaaagcccaggttgaacaggagctcactacacttcgccttcagttagaggagactgaccaccaaaagaacctgcttgacgaggaactgcagcggctcaaggctgaagctacggaggctgctcggcaacgctcgcaggtcgaggaagaacttttttccgttagggtgcagatggaggagctgagcaagctgaaagcccgaattgaagctgaaaaccgagctctcatcctgagggacaaagataatacccagcgctttctacaggaggaggccgagaagatgaagcaagtcgcagaggaggcagctcgcctgtcagtggccgctcaggaggccgcaagactacgtcagttggccgaagaagacttggcccagcagcgggctctcgccgagaagatgttaaaagagaagatgcaggctgtccaggaggcaacccgccttaaagccgaagcagagcttctccagcagcaaaaggagctggcgcaggaacaagccaggcgactgcaggaggacaaagagcagatggctcaacaactcgccgaggaaacacaggggttccaaagaactcttgaagccgaacgtcaacgtcaactggaaatgtccgctgaggctgagcgcctcaagctgagggtcgcagagatgtcccgcgcacaggcaagggctgaggaggacgcacagcgttttagaaagcaggccgaggaaatcggagagaagctgcacagaactgagctggcgacccaggaaaaggttaccctcgtccaaacccttgagatacagcgtcaacagtctgaccacgatgctgagcgtctgcgagaagccatagctgagcttgagcgggagaaggagaagctgcagcaagaggccaaattactccagcttaaaagtgaggagatgcagacggtccagcaggaacagctgctgcaggaaacacaggccctgcagcagagctttttgtcagagaaggactctttgttgcagagggaaaggtttattgaacaagaaaaggccaagctcgagcaacttttccaggatgaggtcgccaaggctcagcagctgagggaagagcaacagcggcagcagcaacagatggagcaggaacggcagcggctcgtggcctcaatggaagaggccaggagacgacagcatgaagccgaggaaggggtgcgaagaaagcaagaagagcttcagcagcttgagcagcagcggaggcagcaggaggaactacttgccgaggagaaccagcgtctcagggaacaactgcagttattagaggagcagcacagggcagcgctcgctcactccgaggaggtgactgcgagccaggttgccgctactaagacactccctaatggacgtgatgccttggacggtcccgcagctgaggcagaacccgaacattcatttgacggcctcagacggaaggtctctgctcagagactgcaggaggctgggatactctctgctgaggaactgcaacgcctcgcacaggggcacactactgtagacgagctggccagaagggaagatgtgcggcattaccttcaaggacggagctctatcgccggtttgctcttgaaggccactaacgagaaactgtctgtgtacgccgctttgcaacgccagctgctgtcaccgggaactgcactgatcttgctcgaggcccaggccgcaagcggatttctgttagatccggtgaggaataggcgactcacggtaaatgaggccgtgaaggagggggtggtgggcccagaactccaccacaaacttctctcggctgagagagctgtaaccggttacaaagacccgtatacagggcagcagatatctctgtttcaagctatgcaaaagggccttattgtgcgcgagcatgggattagattgctggaagcgcagattgccaccgggggagtaatagatccggtgcattcccatcgggtgcctgtggatgtagcttatcgtcggggatactttgacgaggagatgaacagagtgcttgcggacccaagtgacgacaccaaaggcttttttgaccccaatacccatgaaaacctgacttatttacagctgctggagagatgcgtagaggatccagagaccggtctgtgcctcctgccgttaacagacaaagctgctaaggggggagagctcgtatatacggatagcgaggctagggatgtgtttgaaaaagcaaccgtctccgccccttttggcaaattccagggtaagaccgtgactatatgggagatcatcaatagcgaatactttactgcagaacagaggcgcgatctgctacgacaatttcgaactgggaggattacagtcgagaagatcatcaagattatcatcacggtggtcgaggagcaggagcaaaaagggagactttgcttcgaaggcttacggagtcttgtacccgctgcagagctcctggagtcacgggttatagatagagagttgtaccagcaacttcaaagaggagagaggtcagttcgcgatgtggccgaggtcgatactgttagaagagcccttagaggggctaatgtcatcgcaggcgtgtggctggaggaggctggccagaaactcagcatctataacgcactcaagaaagacttactccccagtgacatggccgtagccttacttgaggcacaggccggtactgggcacataattgaccccgcaacaagcgccaggttgacggtcgatgaggcagtcagagccggactcgtggggcctgaatttcacgagaagctgctgtccgccgaaaaagctgttactgggtatcgcgatccttacacaggccagtctgtcagtctattccaggctctgaagaaaggcctcatcccacgcgagcagggtttgaggctcctggatgcccagctctcaaccgggggaatcgtggatccatcaaagagtcatcgcgtccccctggatgtcgcgtgtgcacgcggatgtctcgacgaggagacatcccgggctctaagcgcccctcgcgctgatgccaaagcctattctgacccgtccaccggagagcctgcaacctacggagagctgcagcagagatgccgaccagatcagttgactggattgagcctattacccctgtcggagaaagcggcaagagcccgtcaggaggaattgtacagcgagctacaggccagggagaccttcgagaaaactccggtggaggtacccgttggcggtttcaaggggagaaccgtgaccgtctgggagctgatctccagcgaatacttcacggcagagcagagacaggagcttcttcgtcaattcagaacaggcaaagtgactgtcgagaaagtgatcaaaatccttatcaccatcgtggaggaggtggaaaccctccgacaagaacgactgtcattctccggcttgagagcgccagtgcctgcttccgaattgctcgcatctggggttctctcccgtgcacagttcgagcagcttaaggatggaaagacaactgttaaggatctgagcgagctcggcagtgtaagaaccctgttacagggatctggatgccttgctggcatatatctagaggacacaaaggaaaaggtttctatttatgaggcgatgaggagagggctcctgcgtgctaccactgcggctctgcttctggaggcccaagccgcaactggctttctggttgatcctgttagaaatcagagactgtacgtacatgaggcagtgaaggcaggagtcgtgggtccagagctccacgaacaactactgagtgccgagaaagccgttaccggatatcgggacccctatagcgggagtactatctccctttttcaggccatgcagaaaggactggtcctgcgccaacacggtattaggctgcttgaggcgcagatcgccaccggaggcataattgacccggtccactcccaccgcgtccccgtcgatgtggcctaccaaaggggctatttttcagaggagatgaaccgggtcttagctgacccctctgacgacactaaagggttcttcgatcccaatactcatgaaaacctcacttaccgacagttactcgaaagatgcgttgaggacccagagacaggactgaggctactgccactgaaaggagctgaaaaggccgaggttgtagaaactactcaggtgtacactgaggaagagacccgcagagcctttgaagaaacacagatcgatattcctgggggagggagccatggaggatcaaccatgtctctctgggaggtcatgcagagcgacctgattcctgaagagcaaagagcgcagttgatggcagatttccaagccggacgcgtcactaaagaaagaatgataatcatcataatcgaaatcattgagaaaactgagatcatccgacaacagggcctagcttcttacgattatgttcgacggcgtctgaccgccgaggatttgttcgaagcgagaattatctctttggaaacctataacttgctcagagagggcacgaggtcactgcgggaggctctcgaggcagagtcagcttggtgctatctgtacggaaccggaagcgtggctggcgtgtatctcccgggatcacggcaaaccctctctatttatcaggcccttaaaaaggggttgctttccgctgaggtcgctcgactgctattggaggcccaggctgctacagggtttctgctggaccccgtcaagggtgagcggttgaccgttgatgaagctgtcagaaagggattggttggccctgaactccacgatcgtctattgtctgcagagagagccgtaacggggtatagggacccttacaccgagcagacaatcagcctctttcaagctatgaagaaggagctcataccaaccgaagaggcattgcggctgctggatgcccagcttgctacaggaggcatcgtggacccacggcttggattccatttacccttggaagtagcctatcagcggggatatttgaataaagacacacacgaccagctgagcgagccttccgaggtgcggagttatgttgatcctagcacagatgagcgactgtcctatacacaactgttaagacgctgccgaagagatgacggcactgggcaattgctgctccctctatctgacgcacgcaagctgacctttagagggcttcgcaaacagattactatggaagaactagtgaggtctcaggtaatggatgaggcaacagccctgcagcttagagaggggctgacatcaattgaggaggtcacgaagaatttgcagaagttccttgaaggtacctcatgtatcgcgggagtgtttgtggacgccacaaaagaacggctgagcgtgtaccaagccatgaaaaaggggatcatcagaccaggcacagcctttgagctcttggaagcacaagctgccacagggtatgtcatcgatcccattaagggactcaagctaacagtggaagaagcagtgagaatgggaattgtgggccctgaatttaaagacaaactgctgtccgcagagcgcgctgtgacggggtacaaagacccctacagcggcaagctgatcagccttttccaggcaatgaagaagggactgatcctgaaggatcacggtatccgcttgttggaggcccagatcgccaccggcggaatcatcgaccccgaggagtcacatcgattaccggttgaagtggcctacaaaagaggattgttcgacgaagagatgaacgagattctgacagacccctccgatgataccaaaggatttttcgaccctaatactgaagagaatctcacttatttacagctgatggaacgctgcattacagacccccagaccggtctgtgtctccttcccctaaaggaaaagaaacgggagcgtaaaacatcatccaaatcttctgtcagaaagcggagggtggtcatagtggacccagagacgggaaaggagatgtctgtgtacgaggcttaccgaaagggtctcatcgaccatcagacctatttggagttgtctgaacaagagtgcgagtgggaagagataacaattagttcttctgatggcgtggtgaagtctatgattatcgaccgccgtagcggtagacaatacgatatcgacgacgcgattgcaaaaaatctaatcgacagaagcgccctggatcagtacagagcaggcactctgtcaatcacggagtttgcagatatgctatccgggaatgccggaggattcaggtctagatcctcctccgtgggtagctcaagcagctatccgataagtcctgctgtttctcggactcaactcgccagttggtccgaccccaccgaagaaactggtccggtcgctggcattcttgatactgaaaccctagagaaggttagtatcacggaggctatgcacaggaatctggtcgacaacatcacagggcagcggctgttggaagcacaagcctgcacaggcggaatcatagatccctctactggcgagagattccctgttacagatgcagtcaataagggcctggtcgacaagataatggtcgaccggatcaacttggctcaaaaggccttctgtgggttcgaagacccacgcacaaaaacgaaaatgagtgctgcgcaagctctgaaaaaaggttggctttactatgaagccggtcagagattcctggaagtgcagtatttgaccggaggcctgatcgagccagacacccctggtagagtgccactcgacgaagcactgcaacgcggaactgtggatgcacgaaccgcgcagaagttacgggatgtgggagcctacagtaagtatctcacttgtccaaaaacgaaactgaagatttcctacaaggatgcactcgaccgatccatggtggaggagggaactggattgcggctgctcgaagccgcagcgcagtctaccaaaggctattatagcccttactccgtcagtggttccgggtcgaccgccggatctaggaccggcagtcgaaccgggagtcgcgcaggctcacgcagggggtcttttgacgcaacaggaagtgggtttagcatgacattcagctctagcagctactccagcagtggctatggcaggaggtacgcctccggcagtagtgcttcgctgggaggccctgagtcagccgtcgcctaa

SEQ ID NO: 235215 - DNA, 1503 bp, synthetic construct
  misc_feature 1..1503: note = Description of Artificial Sequence: Synthetic coding sequence
  source 1..1503: mol_type = other DNA
atggctacagtgataccgggagatttatctgaggtgcgtgatacacagaaagtcccaagcggcaagaggaaacgaggcgagaccaagccaaggaaaaattttccttgtcagctgtgcgacaaggcatttaacagtgttgagaagctgaaggtgcattcatactctcataccggtgaaagaccctacaaatgcattcagcaggactgtactaaggcattcgtgagcaagtataaacttcagaggcacatggcaactcactctcctgagaaaacccataaatgtaattactgcgagaagatgtttcatcgcaaggaccatcttaagaaccatttgcacactcatgacccaaataaggaaactttcaaatgtgaggaatgtggaaagaattataacactaaactcgggtttaaacgtcacttggccctgcatgccgctacttcaggtgacctcacttgcaaggtgtgtctgcagacatttgagtccaccggagtgctgctggaacatcttaaaagtcacgcgggaaagtccagtggtggcgtgaaggagaagaaacatcaatgcgagcactgcgatcgtcgattttacacccgcaaggacgtccgcagacacatggtcgttcatacaggtaggaaggatttcctgtgtcagtactgtgcccagaggttcggaaggaaagaccatctcaccagacatatgaaaaagtcccacaaccaagaactgctgaaagttaaaaccgaacctgtggattttctcgatccattcacgtgtaacgttagcgtacccatcaaggatgaactattgcctgtgatgtcactcccatcttccgagctcctgtctaagcccttcacaaatactcttcagctaaatttgtataacacgccattccagagcatgcagtcatccgggtccgcacatcaaatgataacaacattacctctaggcatgacttgccctatcgatatggacacagtgcaccctagtcaccacctgagctttaagtacccgttctcgtctacaagttacgcaatcagcatcccggaaaaggaacagccactgaaaggggaaattgaatcatacctgatggagttgcaggggggtgtcccctcttcttctcaagatagtcaggcctcctccagttctaagctgggcttagatccacaaatcggaagcttggatgacggtgcaggcgatctgtctctatccaaatctagcatatccatctcggaccccctcaacacgccagctttggacttctcacagttgttcaattttattcccttgaatggtcccccatacaaccccttgagcgttgggtcattgggaatgtcatacagccaggaggaagcccacagctctgtgtcccagttaccaccccagacacaggatttacaggacccagcgaataccatcggccttgggagtttacactccctgtccgccgctttcacttctagcctgagtacatcaaccacattacccagattccaccaggcctttcagtag

SEQ ID NO: 235216 - DNA, 1257 bp, synthetic construct
  misc_feature 1..1257: note = Description of Artificial Sequence: Synthetic coding sequence
  source 1..1257: mol_type = other DNA
atggccacacattccccagagaaaacgcacaagtgcaattattgtgagaagatgttccaccgcaaggaccatctgaagaatcacttgcacactcacgaccccaacaaagagacatttaagtgtgaagaatgcggtaagaattacaacacaaagctgggcttcaaaaggcaccttgctctccacgccgctactagcggagaccttacctgcaaagtgtgcctccagaccttcgagtccacaggagtgctgttagaacatttgaagtcccacgctggtaagtctagcggcggagtgaaagaaaaaaagcaccagtgtgagcattgcgacagacgcttttatacacgcaaagacgtaaggaggcatatggtggtgcacacaggcaggaaagattttttgtgccagtactgtgcccagcgcttcggaaggaaggaccatctgacacgccacatgaagaagtcccacaaccaggagttgctgaaggtcaaaacagaacccgttgactttttagacccctttacctgtaatgtgagtgtccccatcaaggatgaactgctgcctgtgatgagcctgcccagttccgaattgctgtcgaagcccttcaccaatacactgcaattgaacctgtataataccccttttcagagtatgcagagttcaggctcagctcaccaaatgataacaacactacccttagggatgacatgcccaatcgacatggacaccgtgcacccctctcaccatctcagctttaaatacccattctcctctacaagttacgccatttccattccagagaaggagcagcctttaaagggggagattgaatcttacctgatggagcttcagggaggagtcccttcgtcctcacaggactcacaggcctcttcgtcatcaaagctcgggctggatccgcaaataggttcgctggacgacggcgcaggggacctgtctttgtctaaatctagcatttcaatctccgatccccttaatacgccggcactcgacttttctcaactcttcaattttatcccgctgaacgggccaccctacaatcccctttccgtcggatcgttggggatgagctactcccaagaagaggcacatagttctgtgtcacagctgcctccacagactcaggacctacaggacccagcgaacactatagggctggggagcctccactccttgtctgccgctttcacgagctctttgtctacttccacaaccttgcccaggtttcaccaggccttccaatag

SEQ ID NO: 235217 - DNA, 1503 bp, synthetic construct
  misc_feature 1..1503: note = Description of Artificial Sequence: Synthetic coding sequence
  source 1..1503: mol_type = other DNA
atggcaacagtgattcccggagacctgtccgaagtaagggacacccaaaaagtgccaagcggaaaaaggaagcggggagagacgaaacctcgaaaaaactttccctgccagctgtgcgacaaagcctttaattccgttgaaaagctcaaggtgcactcctatagtcacacaggagaaaggccatacaaatgcatccagcaggattgcaccaaggcctttgtgagcaaatataagctccagaggcatatggcaacccacagcccagagaagacccataagtgtaattattgcgagaaaatgttccatcgaaaggaccatctgaaaaatcatctgcatacacacgatcccaataaagagacattcaaatgtgaggagtgtggcaagaactacaatactaagctgggttttaaaaggcacttagccctgcacgcagccacctctggggacctgacctgcaaggtgtgtctgcaaaccttcgagagtacaggagtactcctcgagcacctgaagtcccatgctgggaaatcctcagggggtgtcaaagaaaagaagcaccagtgcgaacactgtgataggcggttctacacccgtaaggatgtcaggcgacacatggtggtgcatacaggccgaaaagattttttatgtcagtactgcgcacaaaggttcggaagaaaggatcacctcacaaggcatatgaaaaagagtcacaatcaggaactgttaaaggtgaagacagagcctgttgacttcctggacccctttacttgtaacgtctccgtccccattaaggatgaattgcttcccgtgatgtcgcttccatcatcagagcttttaagtaaaccattcactaatactctccagctaaacttgtataacactcccttccagagcatgcagtcttccggttctgcccatcagatgatcaccactttgcctctaggtatgacttgtccgatcgatatggacaccgtgcacccaagccatcacctgagctttaaataccccttctcctcaaccagctacgcgatatcaattcccgaaaaagaacagccccttaagggtgaaattgaatcctatctgatggagctgcagggcggagtaccaagtagcagtcaggactctcaagcctcttcctcaagcaaactcggcctcgaccctcaaattggttcacttgacgacggagctggcgacctgtccctgagtaagtcttcaatctccatctctgatccgctgaatacccccgcactggacttcagtcagctgtttaattttattccgctgaatggtccgccatataatcccctgtccgttgggtccctgggtatgtcctactcacaggaggaggctcacagcagcgtatcacaattgccaccccagacacaagacctgcaggaccccgctaatacgattgggcttggcagtctccactcactgagcgcagccttcacttcatctctcagtacctccactactctccccaggtttcaccaggctttccagtag

SEQ ID NO: 235218 - DNA, 1392 bp, synthetic construct
  misc_feature 1..1392: note = Description of Artificial Sequence: Synthetic coding sequence
  source 1..1392: mol_type = other DNA
atggcaacttttccttgccagctctgcggaaagacttttctgacattggagaagttcacgatccacaactattcgcactcccgggagagaccctacaaatgcgtgcagccggactgtggtaaagccttcgtgagtcgctacaaactcatgcggcacatggccacgcactctccccagaaatcccatcagtgtgcccactgtgaaaagacgttcaatcggaaggaccaccttaagaaccacctccaaactcacgaccccaacaagatggctttcggatgtgaggagtgtggcaagaaatacaacacaatgttaggctacaagcggcacctcgcattacatgctgcctcgtccggcgacctgacatgtggcgtatgtgcattggagctgggctccactgaagtgcttctcgatcacctcaaagcacatgccgaggagaaacctcccagtggcaccaaggagaaaaaacaccagtgtgaccactgtgagcggtgtttctacacgagaaaggatgttagaagacatttggtcgtgcatacggggtgcaaagattttctgtgccaattttgtgcccagcgtttcgggaggaaagaccatctcacccgccacactaaaaaaacccatagccaagagcttatgaaagaatccctgcagacgggggatctgctatctacattccacacgatctcacctagcttccaactgaaggccgcagccctacccccattccctttaggggcttcagcccagaatggtttggcttcgagcctgcctgccgaggtccactcgctgacactgagccctcccgaacaagcagctcagccaatgcagcctctgccggagagtcttgcatctctccacccaagcgtcagtcctgggtcccccccaccccctctaccaaaccataagtataacactacatcaactagttacagtcctttagcgtccctccctctcaaggctgacacaaaaggtttttgcaacatcagtctctttgaggacctgcctctccaagaaccccagtccccccagaagctgaatccgggattcgatttagcaaaaggcaatgccggtaaagtgaatctgcctaaggagctccccgctgatgccgtgaacttgaccattcccgcttccctcgatctgagccctctcttgggattttggcagctcccccctcccgcaacccaaaataccttcgggaactcaacactcgctttgggccctggggaaagtctaccccatcggctgtcctgtctgggacagcaacaacaagaacctcctttggccatgggtactgtttcactaggacaactgccccttcctcccatcccacacgtatttagtgccggaactggcagcgcaattttacctcactttcatcacgcgttccgatag

SEQ ID NO: 235219 - DNA, 1392 bp, synthetic construct
  misc_feature 1..1392: note = Description of Artificial Sequence: Synthetic coding sequence
  source 1..1392: mol_type = other DNA
atggccacatttccatgccagttgtgtggtaagactttcctgactctggaaaagttcaccatccacaactattcccacagtcgcgaacgcccatacaagtgcgtccagcccgattgcgggaaagccttcgtatcacgctacaagctgatgcgacacatggccacccatagcccacagaaatcccaccagtgcgctcattgcgaaaagacctttaaccgcaaagaccatttgaagaaccacctgcaaactcacgaccctaacaaaatggccttcggttgcgaggagtgcggcaagaaatacaacaccatgctcggctacaaacgccacctggcactgcacgccgcttccagtggcgacctgacctgcggcgtgtgcgcacttgagctcggctctacggaggtgctgctcgaccatctgaaggcccacgccgaagagaaaccaccttcgggcaccaaggagaagaagcaccaatgtgaccactgcgagcgctgcttctacacccgcaaagacgtgcgacgccacctggtcgttcataccggatgcaaagactttctgtgtcagttttgcgcgcaaaggttcgggcgaaaggatcacttgaccaggcacactaaaaaaactcactcacaggaactgatgaaggagagtctgcagacaggggatctgctgagtaccttccacacaatctctccctccttccagctgaaagccgcagccctcccgccattccctctgggagcctctgcccagaacggtctcgcgagtagtcttccagccgaagtgcattctttgaccctgagcccacctgagcaggccgcacaaccaatgcagcctctacctgagagccttgcatcgctgcaccctagtgtgtcgccgggtagccccccacctccactccctaatcacaagtacaacactacgtccacgagttattcccctctggcgtcactccccctcaaggccgacaccaaggggttttgtaatatctcactcttcgaagatctcccattgcaagaacctcagtccccccaaaagctaaacccgggattcgatcttgcaaaaggcaatgccggaaaggtgaacctccctaaggagctgccggcagacgccgtgaacctgaccattcctgcgagcctagatctgagcccactgctgggattctggcagctgccacctcctgctacgcagaacacgttcggcaactcaacactggctttgggtccaggagaatctctgcctcacaggctttcgtgtctgggacagcagcaacaggaaccacctcttgccatgggaacagtatcgctggggcagttgccacttcctccaattccacacgtgttcagcgccggaaccggttcggccatcctgccgcacttccatcatgccttcaggtag

SEQ ID NO: 235220 - DNA, 1392 bp, synthetic construct
  misc_feature 1..1392: note = Description of Artificial Sequence: Synthetic coding sequence
  source 1..1392: mol_type = other DNA
atggctacatttccttgccaattgtgcggaaagacatttcttactctggaaaagtttactattcacaattactctcatagcagggagaggccctacaagtgcgttcagcccgactgtggcaaggcctttgtgtctcgatacaagcttatgcgacacatggccacacattctccccagaagtcacatcaatgtgctcactgcgaaaagacctttaaccgcaaagatcatctgaaaaatcacttacagacccacgaccctaacaagatggcatttggttgtgaagaatgtggtaagaaatacaatacaatgttgggatacaagcgtcacttggctctacacgcagcaagtagcggagacttaacttgcggcgtctgtgcattggaactgggcagcactgaggttctgcttgaccatcttaaggctcatgccgaggagaagcccccatcaggcactaaggagaagaagcaccaatgtgatcattgtgagcggtgtttctatacacgtaaggatgtgcgtaggcacttggtggtgcacactgggtgcaaagactttctgtgtcagttctgcgcccaacgttttggtcgaaaggatcatctgacacgtcataccaaaaagacacattcacaagagctgatgaaagagtctctgcaaaccggggatcttctctctacgttccacacaatcagccctagctttcagcttaaagccgcagcccttccaccttttcccttaggggcatcagcccagaatggactggccagctctttgccagctgaggtccattctctgaccctaagtccgcctgaacaggccgctcagcctatgcagccgttacccgagagcttagcgtctcttcacccctccgtgagccctggttccccaccacccccacttcctaatcataagtataataccacctccacatcatactctccccttgcctctctccctctgaaagccgatactaaaggattttgtaatatttcgctgttcgaggacctccccttgcaggagcctcagagccctcagaagcttaatccgggattcgacctcgctaaggggaatgcgggaaaagtgaacctgcccaaagagttgcctgctgacgcagtcaatttgacgatcccagcgtccctagacctttctccactgctcggattctggcagctgcccccacccgcaactcagaatacttttggcaatagtaccctggcccttgggcctggagaaagtctgccacaccgcctgtcctgcttgggccagcagcagcaggagccgccactggcgatggggaccgtgtcactcggccagctaccattaccaccaatcccacacgtgttctcggccggaactggatccgccatcctaccccatttccaccacgccttcagatag

SEQ ID NO: 235221 - DNA, 1236 bp, synthetic construct
  misc_feature 1..1236: note = Description of Artificial Sequence: Synthetic coding sequence
  source 1..1236: mol_type = other DNA
atggccacccatagtccacagaagagccaccaatgtgcccactgtgagaagacattcaatcgaaaagaccatttgaaaaatcacctacagacacacgatcccaataaaatggccttcggctgcgaagaatgtggaaagaagtacaatacaatgctagggtataaaagacacctcgctctgcacgctgccagttcgggcgatctcacttgcggcgtttgtgcccttgagctgggctctacagaggtgctgttggaccacctgaaggctcatgctgaggagaagcccccaagtggaacaaaagagaaaaaacatcaatgcgatcactgcgaacggtgtttctatacccggaaagacgtgaggcggcacctggtggtgcatactgggtgtaaggatttcctgtgtcagttttgtgcgcagcggtttggcagaaaggaccacttaaccagacacaccaaaaagactcatagtcaggagctgatgaaagagtccctgcagacaggagatctgctgtccacatttcatacgatcagcccgagctttcagttgaaagcagccgctttgccgcctttcccccttggcgcatccgcgcagaacggcctcgcctcttccctccctgcggaagtacattcacttactctctctccccctgagcaggccgcacagccgatgcagcctctccctgagtcgctggccagtcttcacccttccgtaagcccgggttccccacctcctccactcccaaaccacaagtacaatactacttcaacttcttattctcctctcgcctccctgccccttaaagcagacactaaaggattctgcaatatctcactgtttgaggatttgcccctgcaggaacctcagagtccccagaaactgaatcctggtttcgatttggccaaaggcaacgccggtaaggtgaatctccctaaggaactccctgccgatgctgtgaatcttacaatccctgcttcactcgacctgagtccgctgctagggttctggcaactgccaccgcctgctacacagaacacctttggtaactccacgttggctctgggcccaggggagtctttaccccacagactcagctgccttggacaacaacaacaggagcctcctctggccatgggaacagttagtctggggcaactcccactccctcccattccacacgtgttctcagcaggaactggctctgccatccttccccattttcaccacgcattccggtag

SEQ ID NO: 235222 - DNA, 1236 bp, synthetic construct
  misc_feature 1..1236: note = Description of Artificial Sequence: Synthetic coding sequence
  source 1..1236: mol_type = other DNA
atggcaactcattctccacagaaatcgcatcaatgtgctcactgtgaaaaaacatttaacaggaaagaccacctcaagaaccacctgcagactcacgatcctaataagatggcattcggatgtgaagagtgtgggaagaaatataacacaatgctgggatacaaaagacatctggccctccatgcggcttctagcggtgatctcacctgtggcgtgtgcgctctggagctcggatcaaccgaagttctccttgatcacctgaaagcccatgcagaggagaaacctccgtcagggaccaaggaaaagaagcaccagtgtgaccactgcgaaaggtgcttctatactagaaaagacgttagaaggcatctcgtggtccataccgggtgcaaagattttctgtgccaattctgcgctcagaggtttggtcgcaaggatcatctcactcggcacacaaaaaagacacacagccaggaactgatgaaggagtctcttcagactggagacctcctttccacatttcatacaatatccccgagtttccagcttaaggctgcggcattgccaccgtttccactgggcgcaagtgcccagaatggccttgcttctagcctgcccgcagaagtgcattcattaacactcagccctcctgaacaggcagcccagcccatgcagccgctgccagagagcttggcgtctttacatccttccgtgagccccggatcccctccacccccactgcccaatcacaagtacaacacaacgagcacctcttactcacccctggccagcttgcccctcaaggcagacactaaagggttctgtaatatttccttattcgaagacctgcccttacaggagccccagagccctcagaagttaaatcccggattcgacttggccaagggcaatgctggcaaagtgaatctccctaaagaactccccgctgatgccgtaaacctcactatccccgcttctcttgacctctctccccttcttggattttggcagttgcccccacctgccacacagaataccttcgggaactccacacttgcgttagggccaggggagtccctgccacaccgcctgtcttgcctcggacaacagcagcaggagccaccgctcgctatgggcactgtgtcccttgggcagctgcctctgccaccgattccccacgtttttagcgccggaactggcagtgccattctgccccacttccaccacgccttccgttag

SEQ ID NO: 235223 - DNA, 1392 bp, synthetic construct
  misc_feature 1..1392: note = Description of Artificial Sequence: Synthetic coding sequence
  source 1..1392: mol_type = other DNA
atggcaactttcccgtgccagctttgcggaaagactttccttactcttgagaagttcacaatccacaactatagccacagtagggagcgcccttacaaatgcgttcagccagactgtggcaaggctttcgtatcaagatataaacttatgaggcacatggcaacccattcccctcagaaatcccaccaatgtgctcactgtgagaaaactttcaaccgaaaggaccacctgaaaaatcacttgcagacacacgatcctaataaaatggctttcggttgtgaagagtgtggcaagaagtacaacacgatgcttggatacaagagacacctggcattgcacgctgccagcagcggtgaccttacctgtggagtttgcgctttagagctgggaagtactgaggtgctgttggaccatttaaaggcccatgcagaagagaaaccgccatctggcaccaaagaaaagaaacatcagtgcgatcattgcgaacggtgcttctacacacgaaaagacgtcagacgacacctggtggtccacaccgggtgcaaagactttctgtgtcaattctgcgctcagagatttggcaggaaggaccacttgacaagacacactaaaaaaacccacagccaggagttaatgaaggaaagtttgcagaccggcgatctcttaagtacgtttcacaccatttcaccttctttccagcttaaggcagctgcactcccccctttcccactgggagcttctgctcaaaatggcttggcctccagtctgccagcggaggtacactcactaactctgtctccaccggagcaggcagcccagcccatgcaacctttgcccgagagccttgcttccctacatcctagcgtgagcccagggtcacctccacccccattgccaaatcacaaatacaatactacctctacttcttatagtcctttggcctccttgccgctgaaagccgatactaaaggtttctgcaacatttccctgtttgaggatcttccgctccaggagccgcagagcccccaaaagctgaatcctggatttgatctggctaaggggaacgctggtaaggtgaatctgcctaaggagttgcctgcagacgctgtcaatctgacgatccccgcatctctggacctgagtcccttgttaggattttggcagctgccccctcccgctactcaaaataccttcgggaactcgaccctggctctaggaccgggagagagtttgccccacagattgagctgcctgggtcagcagcagcaagagcccccactggccatgggcaccgttagcctgggacagttacctctcccccctattccacacgtgtttagtgccggaaccggctccgccattttgccccacttccatcatgcctttcgctag

SEQ ID NO: 235224 - DNA, 1392 bp, synthetic construct
  misc_feature 1..1392: note = Description of Artificial Sequence: Synthetic coding sequence
  source 1..1392: mol_type = other DNA
atggctacctttccttgtcaactttgcggaaagacattccttacgttagaaaaattcacgatacacaattacagccactcgcgggaacggccatataagtgtgttcagcccgactgcgggaaggcctttgtatcgagatacaagctgatgcgccacatggccacgcattcaccacaaaaaagccatcagtgcgcccactgcgaaaagactttcaatagaaaagatcacttaaaaaaccacttgcaaacccacgatccaaataaaatggcgtttggctgcgaggaatgcgggaagaagtacaatacgatgctcggctataagcggcatcttgccctgcatgccgcatcttcaggcgatctgacttgcggtgtttgtgcattagaactgggctccacggaagtgctgctggatcatttaaaggcccatgcagaggaaaagcccccttccggaacaaaggaaaagaaacaccaatgcgaccactgtgaacgctgcttctacacaagaaaggatgtgcggcgtcatctggtggtgcacacaggctgtaaggactttctgtgccagttctgtgcacagcggttcgggaggaaggaccacctaacaaggcacactaagaagacccatagccaggagctcatgaaggagtctctgcaaactggcgacctcttatcaacattccacactatttccccatctttccagcttaaggcagccgctcttcccccttttcccctgggcgcatctgcccagaatggtctggcatccagcctccccgcagaggttcactctttgactctgagtcccccagagcaggcggctcagcccatgcagcctcttcctgagtctctggcatccttgcatccctctgtctcaccgggaagtcctccgccacctcttccaaaccacaagtacaatacaacaagcacatcctatagccctctcgcgagcctgccattaaaagccgacacaaagggcttctgcaatatctcactgttcgaggatcttccacttcaggaaccgcagtccccccaaaagctcaatcccggattcgacctagcaaaagggaatgccggaaaggttaacctacctaaggaattacctgctgatgctgtcaacctcactataccagcctcactggacttatcccctctgctcggcttttggcagctacctccgcctgcaacacagaatacctttggcaatagcactctagccctcggccctggcgagagtctgccccataggctttcttgcctgggccagcagcagcaggagcctccgctcgcgatggggacagtgagtttggggcagctgccacttccccctatccctcacgtgtttagcgcgggaaccggatctgccatcttaccccactttcaccacgcattccggtag

SEQ ID NO: 235225 - DNA, 531 bp, synthetic construct
  misc_feature 1..531: note = Description of Artificial Sequence: Synthetic coding sequence
  source 1..531: mol_type = other DNA
atggccactcactcacctcaaaagagtcaccaatgcgctcattgcgaaaaaacttttaaccgaaaagatcacctgaaaaaccatcttcagacccacgaccctaacaaaatggcctttggctgcgaggaatgcggcaaaaaatataacaccatgcttgggtataagagacacttggcactgcatgctgccagctccggggacttgacatgcggtgtatgcgcgctggagctggggtctactgaggtactgctagaccacctgaaggcgcacgcagaagagaagcccccatcggggaccaaagaaaaaaaacaccaatgcgaccactgcgagagatgtttctataccagaaaggacgtccggagacaccttgttgtgcacacaggatgcaaggactttctgtgtcagttttgtgcacaaaggtttggccgaaaggatcatcttaccaggcatactaagaagactcattctcaggagttaatgaaggagtcactgcagacaggcgaccttctgtctaccttccataccatctag

SEQ ID NO: 235226 - DNA, 1392 bp, synthetic construct
  misc_feature 1..1392: note = Description of Artificial Sequence: Synthetic coding sequence
  source 1..1392: mol_type = other DNA
atggctactttcccatgtcagctgtgcggaaagacatttctcacattggaaaagtttactatccataattatagccacagcagagagaggccatacaaatgtgtgcaacctgactgcggtaaggccttcgtttcgaggtacaagttaatgcgccacatggccacacatagcccacagaaatctcatcagtgtgcgcactgcgagaaaacatttaataggaaggaccatctgaaaaaccatctccagacacatgatcccaataagatggccttcggctgtgaggaatgcggcaaaaaatataacacaatgctggggtacaagcgccatctggcactacatgccgcttcctcaggcgatctgacctgcggcgtgtgcgctctcgagctggggtccacagaagtgctgcttgatcacctgaaggctcatgctgaagaaaagcctccttcggggaccaaagagaagaaacaccagtgcgatcactgtgaaagatgtttctacacaaggaaagacgtgcgcaggcatttagtggtccatactggctgcaaggactttctttgccagttttgtgcacaacggttcggccgaaaggaccacctgacacggcacaccaagaaaacccacagccaagaactgatgaaggagtcccttcagactggtgatctgttatctacgttccacacaattagcccttctttccagctcaaggccgctgccctacccccttttcccctgggtgcatccgcccagaatggactggcgtcttcactgcctgctgaggtacactctcttactctcagcccacccgaacaagctgcccagccaatgcagcctcttcccgagtcgcttgcgtcattgcatccttccgtgagccccggatccccgccaccacctttgcccaaccataagtataacacaacatccacatcgtactcaccacttgcttctttacctttgaaagccgacacgaaagggttttgtaacatctccctttttgaggacctgcccctgcaagagcctcagtcacctcagaaactgaacccgggttttgatctggcaaagggtaatgctgggaaagtgaatctaccaaaggagttaccagctgatgccgtgaacctcacaattccggcaagtctagaccttagccctctgctgggcttctggcagctgcccccacccgctactcagaatactttcgggaattcaacactggctctcggcccaggggaatctctcccacacagactgagttgtctggggcagcagcagcaggagcccccattagctatggggacagtgtccctgggtcagctcccattaccccctattccacacgtgttctccgcaggtaccggatccgctatcctgccgcactttcatcacgcattccggtag

SEQ ID NO: 235227 - DNA, 1236 bp, synthetic construct
  misc_feature 1..1236: note = Description of Artificial Sequence: Synthetic coding sequence
  source 1..1236: mol_type = other DNA
atggcgactcactctccacagaaaagtcaccagtgtgctcactgcgaaaaaacctttaaccggaaagatcatctcaaaaaccaccttcagacccatgatccaaacaaaatggccttcgggtgtgaggagtgcggtaagaaatacaatactatgctgggttataagcggcacctggcactgcatgccgcatcctccggagatctcacctgtggggtttgcgccctggaactggggtccacggaagtgctgcttgatcatctcaaggcacacgcagaggaaaaaccaccatcgggaacaaaagaaaagaagcaccagtgcgaccactgtgagcgctgcttctataccaggaaagatgttagaaggcacctcgtagtacacaccggctgcaaggactttttgtgccaattttgcgctcagaggtttggtcgcaaggatcatctgacacgtcataccaagaagacacactcgcaggaacttatgaaggaatccctgcagaccggagatctgctgtctacattccatactatctccccaagctttcagctcaaggccgctgccctcccccctttcccgttaggagcctcagcccagaatgggcttgcttcatctctgccagcagaggtccatagcctgaccctatcccctccagaacaggctgcccaaccaatgcaacctctgcctgagtccctcgcgtctttgcacccatctgtaagcccagggtcaccacctccccctctcccaaatcacaagtataacactaccagcacctcctattcccctcttgccagcttaccgttgaaggccgatacaaaaggcttttgcaacattagtctcttcgaggacttgcctctccaggagccacagagtccgcaaaagctgaaccccggatttgatctcgccaaggggaatgccggaaaagtcaacttgcctaaagagctccccgcagatgctgtcaatttgaccatccctgctagtcttgacctgtcaccgcttttgggcttttggcaactccccccacctgccactcaaaacactttcggaaattctacactcgcgctggggccaggagagtctttaccccaccggctttcctgcctgggccagcagcaacaggaaccgcctctggccatgggaaccgtgtccttggggcagctccccctgccccctataccacatgtcttcagcgctggcacagggtcagcaatcctgccccatttccaccacgctttccgctag

SEQ ID NO: 235228 - DNA, 1392 bp, synthetic construct
  misc_feature 1..1392: note = Description of Artificial Sequence: Synthetic coding sequence
  source 1..1392: mol_type = other DNA
atggctaccttcccttgccagttatgtggtaaaaccttcctgacgctggaaaagttcacaatccacaactattcccattccagggagagaccgtataagtgtgtccagccagattgtggtaaggcctttgtcagccgttataagctgatgaggcacatggctacccattctcctcaaaagtcccaccagtgcgcgcactgtgagaagacatttaacagaaaagaccatctgaagaatcatctgcagactcatgacccaaacaaaatggcctttggctgcgaagagtgcggcaaaaagtacaataccatgctgggttataaaaggcatctggccctccatgcagcctcatcgggtgatctgacttgtggcgtgtgcgccctcgagctgggcagtacagaggtgctgctcgaccacctcaaggcacacgccgaagaaaaaccgcctagcggcacaaaggagaaaaagcatcagtgcgatcattgtgaacgctgcttctatacccggaaggacgtccggaggcacttggtcgtgcatactgggtgcaaagacttcctttgccagttttgcgctcagaggtttggcaggaaggatcacctcacgcgacatacgaagaagacgcattctcaggaacttatgaaagaaagcctgcagacaggcgacctcctttccacgttccataccatctccccaagttttcaattgaaggctgccgcactgcctccattcccacttggggcttccgcccagaatggcttagcgagtagtctccctgccgaggttcactcacttacattgtctccacccgagcaggccgctcaacccatgcagccactccctgagagcctagcctctcttcatccatcagtgtccccaggcagccctcctcctcctctgcccaaccacaagtacaataccacctccactagctattcccccctcgcttcacttcccctaaaggccgacaccaaggggttttgcaatataagtctctttgaagaccttccgctgcaggagcctcagagccctcagaaacttaatccagggttcgacctggccaaaggaaatgccggtaaagttaatctgcctaaagaactgccagccgacgcagtcaatctcactattcctgcctccctggatctgtcccccctgttgggcttctggcagctgccacctccagccactcagaatacttttggcaactccaccctggccctgggcccaggggaatccctcccacacaggctgtcttgcctgggtcagcaacaacaagaacctcctttggccatggggactgtgagtctgggccagctccctctgccacctatcccccacgtgttttctgctggtactggctctgcgattctgccccacttccatcatgcttttaggtag

SEQ ID NO: 235229 - DNA, 759 bp, synthetic construct
  misc_feature 1..759: note = Description of Artificial Sequence: Synthetic coding sequence
  source 1..759: mol_type = other DNA
atgaaggaatctctacagactggagacctgctgtccacctttcatacaatttcaccttcttttcagctcaaggccgctgctctgcctcctttccccctgggcgcatctgcccagaatgggctggctagctcattgcctgccgaggtccactcccttaccctaagtccccctgagcaggctgcccagccaatgcagccactccctgagagcttggcctccctgcaccctagcgtgagccctggctcaccccctcctccactgcctaaccataaatacaatactactagcacaagctactctcctcttgccagcctgccgctcaaggctgacactaagggattctgcaacatttctttgttcgaggacctacctctgcaggaaccgcagagtcctcaaaaactgaatcccggtttcgatcttgccaaagggaacgccggtaaagtgaacctgcctaaggaattacctgcggacgccgtgaatttaactatacccgcttctctggacctctctccactgctggggttctggcaacttccacctcctgcgacacagaacacttttggaaatagcacactggctttgggccctggagagtctcttccacacaggcttagttgcctcggccagcagcagcaagagccccctctggcaatgggaacagtttcactgggccaactgccactcccccctatcccccacgtcttctctgcagggactggatccgcaatcctgccacactttcaccatgccttccggtag

SEQ ID NO: 235230 - DNA, 1491 bp, synthetic construct
  misc_feature 1..1491: note = Description of Artificial Sequence: Synthetic coding sequence
  source 1..1491: mol_type = other DNA
atgaccactttcttcacctcggtgcccccttggatccaggacgcaaaacaggaggaggaggtcgggtggaaacttgtgcccagaccaaggggaagggaagctgaatctcaggtgaagtgtcagtgtgagatctctggcaccccatttagtaatggagagaagctcagacctcacagtctgcctcagcctgagcaacggccttattcctgtccccagttacattgcggaaaagccttcgccagtaaatacaaactgtatagacacatggcgacacacagcgcacagaaaccccatcagtgcatgtattgcgacaagatgtttcaccggaaagaccacctcagaaatcacctccagactcacgatcccaacaaggaggccctgcattgttcagaatgtggaaagaactacaataccaagctgggctaccgacgccacctcgccatgcacgccgcaagtagtggggacttgagttgtaaagtctgcttacaaacctttgagtccactcaggcactactcgagcacctcaaggctcattcacggcgtgtcgccggaggtgcgaaagagaaaaaacatccgtgcgatcattgcgacagaaggttttatacaaggaaagacgtcaggagacacctggtggtccacaccggccgtaaagatttcctctgccagtactgtgcccaacgattcgggaggaaagaccacctaacaagacacgtgaagaagtcacactcacaggagctgctcaaaatcaagaccgagccagtcgacatgctgggtcttctgtcttgctccagcaccgtcagcgttaaggaggaactgtccccagttctgtgtatggcctctagggacgtgatggggaccaaagcctttcctggaatgctccccatgggcatgtacggtgctcatataccgaccatgccttcgaccggcgtcccccattcgttagttcataacaccctccccatggggatgagctaccctttagagagtagtcctatctctagtcccgcacaactccccccaaagtaccagctcggatcaacgagctacctgcccgataaattacccaaggtggaagtggactccttcctggcagagcttcctggatctttgtccctgagttcagctgagccccagcctgcttccccccagccagccgctgccgcagctctgctggatgaggcactgttagccaagagccctgccaacctgtcagaagctctctgtgccgctaatgtggacttctctcacctgcttggattcttaccgcttaacctccctccatgtaatcctcccggtgcgaccggaggcctggttatgggctacagccaggctgaagcacaacctctactcaccaccttacaggcccagccacaggattctcctggagccggagggccactgaacttcggacctcttcactcactgcctccagtttttacatcggggctgagctccactactctgccaaggttccatcaggcctttcagtag

SEQ ID NO: 235231 - DNA, 507 bp, synthetic construct
  misc_feature 1..507: note = Description of Artificial Sequence: Synthetic coding sequence
  source 1..507: mol_type = other DNA
atgcaggcccagcagtatcagcagcaaaggaggaaattcgctgccgcttttctcgccttcatattcatattggctgcggtggatactgccgaagccggaaagaaagagaaaccggagaaaaaggtgaagaagtcagactgtggcgaatggcaatggagtgtgtgcgttcctacaagcggcgactgcggactgggaaccagggagggcacgagaaccggtgctgagtgtaaacagacaatgaaaactcagcgttgtaagatcccttgtaactggaaaaagcagttcggagccgagtgtaaataccagttccaggcctggggcgagtgtgacttgaataccgcgttaaaaactaggacaggcagcctgaaaagagctctccataacgccgaatgccagaagacagtcacgattagcaaaccatgcggtaaactgacaaagccaaaaccacaggctgaatcaaagaagaaaaagaaggagggcaagaagcaggaaaagatgttggattag

SEQ ID NO: 235232 - DNA, 1518 bp, synthetic construct
  misc_feature 1..1518: note = Description of Artificial Sequence: Synthetic coding sequence
  source 1..1518: mol_type = other DNA
atggtagaagaagtgcagaagcattctgttcatacattggtgttccggagcttgaagcgcacccatgacatgttcgttgccgacaacggcaaacctgtgccactcgatgaggagtcgcataaaagaaagatggctataaagttaaggaatgagtacgggcctgttcttcacatgccgactagcaaagaaaatctgaaggagaaaggaccccagaacgctactgatagctatgtccacaagcagtatcccgcaaatcaggggcaggaagtggaatattttgtggccggagtggcccttacagcggatacaaagatccagcggatgccttccgaaagcgcagcccagagcctggccgtcgcccttcctctccagactaaggcggatgccaaccggaccgccccttctgggtccgagtataggcaccctggggcaagcgacaggcctcaacccaccgcgatgaacagcatcgttatggagaccgggaacaccaaaaattccgcattaatggccaagaaagccccaacgatgcctaaaccgcagtggcaccctccttggaaactgtacagagtgataagcggccacctgggatgggtgcggtgtattgctgtcgagcctggtaatcagtggtttgtgacggggagcgcagaccgaaccatcaagatctgggacctggctagtggcaaactgaaactgtcactgacgggccatatatctaccgtgcggggtgtcatagtcagcacccgctccccttacttgttcagttgcggcgaagataagcaggtcaaatgttgggatctcgagtataacaaggtcattagacactaccatggccatttgtcggcagtgtatggtttggacctgcatcctaccattgacgtgctagtgacctgctctcgagattcaactgctaggatttgggacgtaagaacgaaggcttccgtgcataccttgtctggccatactaatgccgtagcaactgttagatgccaagctgctgagccgcagatcattaccggatcccacgataccactatccgcctctgggatttagttgctggaaagaccagagtaacgttgaccaatcataagaaatctgtgcgcgctgtggttctgcacccgagacactatacattcgcatctggctcccccgataatattaagcaatggaagttcccagatggcagtttcattcagaatctgtctggacataacgcgataatcaatactcttactgtgaactcagatggtgtcctagtgtcaggcgcagataatggtacgatgcacctttgggattggcgcaccggatataatttccaacgcgtgcatgccgctgtgcagcccggaagtctggacagcgaatcagggattttcgcttgcgcattcgaccagtctgagagccgcctgctcaccgctgaagccgacaagacaatcaaagtttatagagaggacgacacagctaccgaggagacacaccccgtctcttggaagcctgaaattatcaagcgcaaaagattttag

SEQ ID NO: 235233 - DNA, 1545 bp, synthetic construct
  misc_feature 1..1545: note = Description of Artificial Sequence: Synthetic coding sequence
  source 1..1545: mol_type = other DNA
atgatctgcgaggtacagaagcattctgttcacactctagtgttccgcagcctcaagcgtacccatgatatgtttgtagcggataatgggaagccagtgcctctggacgaagagagtcacaagcgcaagatggcaatcaaactgaggaacgaatacgggccagtactgcacatgcctacatcaaaggagaatctgaaagagaaagggcctcaaaatgccaccgatagttacgtacataagcaatatccagccaaccaggggcaagaagtcgagtattttgtcgctggaacacacccataccccccaggtcccggtgtcgctctgacagctgacaccaagatacagagaatgccgtccgagtctgccgcacagtcattggcggtggcactgcctcttcaaactaaagccgatgccaataggaccgccccttcgggcagtgagtacagacacccaggagcatcagaccggccacagccaactgcaatgaactccatcgtgatggagacagggaacacaaaaaatagtgccctcatggcgaagaaagctcccaccatgcctaaaccacagtggcaccctccctggaaactgtatcgggtgattagcggacatctgggatgggtccgctgcatagctgtggagccgggaaaccaatggttcgtgacaggttctgccgaccggacaatcaagatttgggacctggcaagtgggaaattgaaattatctttaaccggccacatctccactgtgcggggagtgattgtctcaacacgatctccctatctcttttcctgcggcgaagacaaacaggtgaaatgctgggatttggagtataataaggttatccggcattatcatggtcacttaagcgctgtgtatggcttggatctccatccgaccatcgacgtgttggttacttgtagtcgcgatagcactgctcggatctgggatgtcagaactaaggctagcgtgcacaccctttctggacataccaacgcggttgcgaccgtacgatgccaggccgcagaaccgcaaatcatcactggcagtcacgacaccaccattagactgtgggatctcgtcgctggaaagacacgagtaaccttaaccaaccataagaaaagcgtgagagccgtggtgctccatcctcgacattacacctttgcttctggcagccctgataatatcaagcagtggaagttccctgatggctcttttattcagaatctctccggccacaacgctattatcaataccctcacagttaattcagatggggtcctcgtatcgggcgctgacaacgggacaatgcatttgtgggactggcgaacaggatataattttcagcgtgttcacgccgctgttcaacctggcagcctggatagcgaatccggcattttcgcctgcgcgtttgaccagtccgagagcaggctgctaaccgccgaggccgataagaccattaaagtgtatcgcgaggatgacaccgccaccgaggagacacacccagtttcctggaagccagagatcattaaacggaaacgtttttag

SEQ ID NO: 235234 - DNA, 1545 bp, synthetic construct
  misc_feature 1..1545: note = Description of Artificial Sequence: Synthetic coding sequence
  source 1..1545: mol_type = other DNA
atggttgaagaagtgcagaaacactccgttcacactcttgtttttcgttctctcaaaaggacccacgatatgttcgttgccgacaatgggaagcccgtgccactcgatgaagagagtcataagcgcaagatggcaattaaactcagaaacgagtacggtcctgtcctacacatgcctacctcaaaggaaaatctgaaggagaaggggccacagaatgcaacagactcctatgtacacaaacagtatccagccaatcaagggcaagaagttgagtacttcgtggccggaacccacccatacccaccgggacctggtgtggcactgaccgctgataccaagatccagaggatgccctcagagtccgcagcacagagcctagccgtggccttgccactccagacaaaggctgacgctaaccgaacggcaccatccggatccgaatatcggcatcctggcgcatccgaccgccctcagccaacagcaatgaacagcattgtgatggagactggaaacacaaaaaactctgctctgatggctaaaaaggccccaaccatgcctaagcctcagtggcatccgccatggaagctgtacagagttatcagtgggcacctagggtgggttcgatgtatagccgtcgagcctggtaatcagtggttcgtcaccggcagcgcagacagaacaattaagatctgggacctggcttctggaaagctgaaattgagtctgacgggccacatcagcacagtgcgaggagtcattgtcagcacaagaagcccttatctgttctcttgtggtgaagataagcaggtcaaatgctgggatttagaatataataaggttattcggcactaccatggccatttgtctgccgtgtacggattggatctccatccaacaatcgatgtcttagtgacctgcagtagggattcaacagcacgtatctgggacgtgcgcactaaagcctctgtacacactctgtctggtcatacaaatgcagtggcgaccgtgagatgccaggctgccgagccccagatcattaccggaagccatgacactacaatacggctgtgggacctcgtggccggtaaaacaagggtgacattaacgaaccataagaagagtgtgcgggcagtggtgctccacccacgacattacacatttgcgtctggtagcccagataacattaaacagtggaagtttccagacggctccttcatccaaaacctgagcggacacaatgccattatcaacacactaaccgtaaactctgacggcgtgctggtttccggcgctgacaatggaactatgcacttgtgggattggagaaccggatacaacttccagagagttcacgccgcagtgcagccaggatccctggatagcgaatcaggaatttttgcatgtgccttcgaccagtccgaatcgagactgctcaccgccgaagccgacaaaactattaaggtataccgagaggacgacaccgcgaccgaagagacacatcctgtgagttggaagccggagatcattaagagaaaaagattttag

SEQ ID NO: 235235 - DNA, 5622 bp, synthetic construct
  misc_feature 1..5622: note = Description of Artificial Sequence: Synthetic coding sequence
  source 1..5622: mol_type = other DNA
atgtgggccgaggccggactccccagagccggaggcggatctcagccacccttccggacttttagcgcctccgattggggattgacccatttagtcgtgcacgaacagacgggtgaagtgtatgttggcgctgtgaacaggatctataaactgtccggcaaccttactctcctgcgggcacacgtgaccgggccagttgaggataacgagaaatgttacccacccccaagcgtacaatcatgtccacacggcctcggaagcaccgataacgtaaacaagctgttgctgttggactatgccgctaacagactgctggcttgcggatccgcctcccaggggatttgccagttcctgcggctggacgacctctttaaactcggtgagccacaccacagaaaggaacattacctatcctccgttcaggaggctgggtcgatggccggagtgctcatcgctggacccccagggcagggccaggccaagctgttcgtgggcacccctatagatggcaagtctgaatactttccaaccctgtcttctcgccgactcatggccaacgaagaagacgccgatatgtttggcttcgtctatcaggacgaattcgtgagttctcagcttaaaatcccctcagatacattatcaaagttccctgctttcgacatctactacgtgtacagtttcagaagtgagcagttcgtctattatttgaccctacaactagacacccagcttacttcacccgacgcagccggtgagcatttctttaccagcaagatcgtcaggctgtgtgtcgatgaccctaagttttactcttacgttgagttccccattggctgtgagcaagccggtgtcgagtaccggttagtacaggacgcatacctgtctcgtcctgggagggccttggcccaccagttaggactcgcagaggatgaggacgttctctttaccgtatttgctcagggccagaagaatcgtgttaaacccccaaaggagagtgctctgtgtctgtttactctgagagccataaaggagaagattaaggagcgtatccagtcctgctatcgcggagaaggaaaactgagcctgccatggctcttgaacaaagagctgggttgtattaactctcctcttcagatcgatgatgacttttgtggccaagatttcaatcagccattagggggaactgttacaatagaaggcacgcccctatttgtcgacaaggacgatggcctcacagctgtggcggcatatgactataggggcagaaccgtggtgttcgcaggaactcgctcggggaggattcgcaaaatattagtagatctctccaatccaggaggccgacctgctctggcatacgaatcagttgtggctcaagagggatctcccattttgagagacctcgtgttgtctcctaatcaccaatacctctatgcaatgaccgagaaacaggtcaccagggtcccagtggagtcgtgtgtgcagtacacatcctgtgagctgtgtctgggcagtcgcgatccacattgtggttggtgcgtgctgcattcaatctgctcacggagagacgcttgtgagagagctgatgagccccaacggttcgcagctgaccttctgcagtgtgtgcagctgaccgtgcagccgagaaacgtctcagtgacaatgtcccaggtacccttggtcctccaggcctggaacgttccagatttgtcagcaggagtaaattgtagttttgaggactttactgagtctgagagcgtgctggaggatgggcgaatacattgtcggtctccctccgctcgagaagtcgcccctattaccagaggccagggggatcagagagtagtcaaattgtatctcaaatctaaggaaacagggaaaaagttcgcttcggtcgatttcgtgttctacaattgctccgtccatcagtcttgtcttagctgcgttaatgggtcctttccgtgtcactggtgcaagtataggcatgtctgcacccataatgtggctgattgcgcctttctggagggtagggtgaacgtgagtgaggattgccctcaaatcctgcccagcactcagatctatgtgcccgtgggtgtcgtgaagccgatcaccctggctgctcgcaaccttccccaacctcaatccggacagagagggtacgaatgtttatttcacattcccggttccccagccagagtgactgccttgaggttcaattcttcatctcttcagtgccagaacagttcttactcatacgaaggcaatgacgtcagtgatctccctgtgaacctgagcgtggtctggaatggcaactttgtaatcgacaacccacagaacatacaggcacatctgtacaaatgccctgccctcagagaatcctgtggcctttgtttgaaggccgatcctagattcgagtgtggatggtgtgtggccgagcggcgttgttcgcttcgccaccattgtgcggctgacactcccgctagctggatgcacgctcgtcacggaagctcacgctgcactgatcctaagatactgaagctctcacccgaaaccggcccacggcagggagggacccgcctcacaatcactggcgaaaatcttggccttcgctttgaggatgtgagattgggcgtgagggtgggcaaggtcctatgctctcctgtcgagtccgaatatatttctgctgagcagatcgtgtgcgaaattggcgatgcctcatccgtccgcgctcatgacgctttggtggaggtctgcgttagggattgttctccccactatagagcactgtctcccaagagattcacttttgtgaccccaactttttacagggtgagcccctctaggggccctctgtcaggcggtacatggataggcattgagggttctcatctgaacgccggatccgacgtggctgtctctgtgggcggaagaccctgctcctttagctggagaaactcaagagagatccgatgtctcacgccccctggacagagccccggatctgcgcctatcattatcaatatcaatcgagctcagctgacgaatcccgaagtgaaatataattacacagaagaccctacaatactgcgtatcgatcctgagtggagcataaactccggcggaactttgttgacagtcaccgggaccaatcttgccacagtgcgagagccacgtatccgcgcaaagtacggaggcattgaaagagagaatgggtgcctggtctacaatgacacaaccatggtatgtcgagcaccttcagttgcgaatcccgtgcggagtccaccagagttgggagagcggcctgacgaacttgggttcgtcatggataacgtccgttcactcctcgtattgaattccacctcttttctctactaccctgaccccgtgttggagccactcagcccaaccggactcctggaacttaagccctcaagccccctgatcctcaaaggaagaaacctgctgccaccagctcccggaaatagtcggctcaactacaccgtgctgattggctcaacaccatgtacgctcaccgtatcggaaacacagctgctttgcgaggcaccaaatctcaccggacagcacaaagtgaccgttagagcagggggatttgaatttagcccagggacactgcaggtctatagtgactctctgctcacactccctgccattgtgggaattggcggaggtgggggtcttctactcctcgtcatagtagctgtactgatcgcctataagcggaaatccagagatgctgaccggaccctgaagagattgcagcttcagatggacaatctggaatctagggtggctctagaatgtaaagaggcattcgccgaactgcagacagatattcacgagctgaccaacgacttagatggcgctggcatccccttccttgactatcgcacctatgccatgcgtgttctgtttcctggaatcgaggatcaccccgtcctcaaagaaatggaagtccaagcaaatgtggagaagagtcttaccctttttggtcaactcttgaccaaaaagcatttcctgttaacattcattcggactctagaggcacagcgctcgttcagcatgcgggaccgaggaaacgtcgcaagcctcatcatgaccgcactgcaaggtgagatggaatatgccactggcgtgctgaagcagctgctgagcgacctgatcgaaaagaacttagagagtaagaatcaccccaaactgctgctcaggagaaccgagtctgtcgctgagaaaatgttaacaaactggtttacatttctgctgtataagttccttaaggaatgcgcaggggagccactctttatgctgtattgcgctattaagcagcagatggagaagggcccaattgacgccattacaggggaggcacgctattccctgtccgaggataagttgatccgtcagcaaattgactacaagaccctgactctaaattgcgtaaacccagagaacgagaacgcacctgaggtgcccgtaaaaggtctggactgtgacaccgtgactcaagccaaagagaagctgctggatgcggcttacaaaggcgtaccgtattcacagaggccgaaggccgctgatatggatcttgagtggagacaaggcaggatggcgagaatcatcctccaggatgaagatgtgaccaccaagatcgacaacgactggaaaagactcaacacccttgcacactatcaagtgacagatggatcatccgtcgcactggtgcccaagcagactagcgcctataatatttccaatagctccacttttacaaaaagcctctccaggtacgagtctatgctgcggacagcgtctagtcctgatagcctcagaagccgcacacctatgatcaccccagatcttgagtctgggacaaaactgtggcatttggtcaaaaatcatgatcatctagaccagagggagggagatcggggaagcaagatggtaagtgagatctaccttactcggcttctggccacaaaagggacccttcagaaatttgtggacgatctgttcgagaccattttcagtaccgctcatcgagggagtgctctcccactggcaatcaagtatatgttcgacttcctcgacgaacaggctgacaagcaccagattcacgacgccgatgtgaggcacacctggaagtcgaactgcctaccactaagattttgggtcaacgtcataaagaacccccagttcgttttcgatattcacaaaaatagcatcactgatgcatgtctctcagtcgtcgcccaaacttttatggactcgtgctctacttcagagcacaagctaggcaaagattccccttcaaacaaactgctgtacgccaaggacatcccgaactataagagttgggtggaacggtattatgcggatatcgccaagatgcccgctatttcagatcaagacatgtctgcctacctcgcagagcaaagcaggctgcatcttagccaattcaacagtatgtctgcacttcacgaaatttatagttacattacgaagtacaaggatgaaatcctagcagccctcgagaaagacgaacaggcaagacgacaacgacttcgaagcaaactggaacaggtagttgatactatggccctcagctcatac

SEQ ID NO: 235236 - DNA, 5690 bp, synthetic construct
  misc_feature 1..5690: note = Description of Artificial Sequence: Synthetic coding sequence
  source 1..5690: mol_type = other DNA
atgccactcccacccagaagccttcaggttttgctgctgctattgctgcttttactgctgctgcccggaatgtgggccgaagctggtttgccaagagctgggggagggagccagccgcctttcagaaccttcagcgcttccgattggggcctgacccacctcgtggtccatgaacaaacaggggaggtgtatgtcggcgcagttaatcgtatatataagttgtcgggtaatctcacattactgagagcccacgtgaccggacctgttgaagacaacgagaagtgttatccgcctccatctgttcagtcctgtccccacggcctgggctcaaccgacaacgtaaataaactgctcctgctggactatgcggcaaatcgtttgctggcctgtgggagcgcttcccaggggatctgccagttcctgcgcttggacgacctattcaagctgggcgagccccaccacagaaaggagcactacctctcgtccgttcaggaggcagggtcaatggcaggagtcctaatcgccggacccccagggcagggccaggccaagctgtttgtcggaactccaatcgatgggaagtccgaatacttccccactttgtcaagccgtaggttgatggcaaacgaagaagatgcagatatgttcggcttcgtgtatcaggacgaatttgttagtagtcagctgaagatcccctctgacaccctgagtaaatttccagcgtttgatatatactatgtctactccttcagatctgaacagttcgtctactacttgaccctgcagctggacacccagctgacatcccccgacgctgctggcgaacatttcttcacgagtaagatcgtgagactgtgtgtggacgacccaaagttttattcctatgtggagttccctatcggatgcgaacaggccggagtcgaataccggctggttcaggatgcctatctgagtaggccagggcgagcactcgcccatcagctggggttggccgaagacgaggatgtgcttttcactgtcttcgcccagggtcagaaaaatagagtaaaacctcccaaagaaagcgcactgtgtctgttcaccctcagggcaattaaagagaagatcaaagagaggatccagtcttgttaccggggagaaggcaaactgtcacttccatggctgctcaacaaggagttagggtgcatcaactccccactgcagatcgacgacgatttctgcggacaggatttcaaccagcctttaggtgggactgtaaccatcgaaggcactcccctgtttgtggacaaggacgatggactcacagctgtcgccgcttatgactaccgcggacggaccgtggttttcgcgggtactcgctctggccgtatcaggaagattcttgtggacctttctaaccccggagggcgtcccgcactggcctatgagagcgtggtcgcacaggaagggagccccattctccgagacctagtgttgtccccaaatcatcagtatttgtatgccatgaccgagaagcaggtcaccagagtgccagtcgagagttgcgttcaatacaccagctgtgagctgtgtctgggcagccgcgacccgcactgtggatggtgcgttctgcactcaatttgcagtcggagggatgcctgcgaacgcgcagatgagcctcagcggttcgctgctgatcttctccagtgcgtccagctgaccgtgcagcctaggaacgtaagtgtaacaatgtcacaggtccccctcgtactgcaggcatggaatgttccagacctatcagctggcgtgaattgctctttcgaagactttacagagtctgagtctgtactcgaagacggcagaatacactgccgctcaccgtctgccagagaagtggcccctattacccggggtcaaggagaccagcgtgtcgtgaagctatatcttaaaagtaaggagaccggcaaaaaattcgcgagcgtcgatttcgttttctacaactgcagcgttcaccaatcctgcctatcttgtgtgaatggatcttttccctgccactggtgtaaataccggcacgtctgtactcacaacgttgccgactgcgcgttcctcgaaggccgtgtgaacgtgtcagaagattgccctcagatactcccctctacacagatttacgtccctgtgggcgtcgtcaagcccatcactctggccgcacgcaaccttccccagccacagtctggccaaagaggctatgagtgtttgttccacatccctggttcccccgctagagtgaccgcgctgaggtttaacagcagctctcttcagtgtcaaaattccagttattcatatgagggaaacgatgtgtctgaccttcctgtaaacctgtcggtggtttggaacggcaacttcgtgatcgacaatcctcagaacatccaggcccatctgtacaaatgccctgctctgcgagaatcctgcggactctgcttgaaggctgatcccagattcgagtgcggatggtgcgtagccgaaaggcgctgtagtctgcgtcaccattgtgctgccgatacacctgcctcttggatgcacgctcgccatggaagctccaggtgcactgatccaaagatccttaagttgtctcccgagacggggcctcgacagggaggaacgcgactgaccatcacaggcgaaaatctcggcctgcggttcgaggatgtccgactcggagtacgcgtgggtaaggtgctgtgtagcccagtggaatctgaatacatctcagctgaacagatcgtatgtgagattggtgatgcatctagtgtgcgggcacatgatgccttggttgaggtgtgcgtgcgtgactgctcaccccactatagggcgctgtctccgaagcgttttacctttgtgacgcctaccttttaccgagtatctccctccaggggccctctgagcggcggaacctggatcgggattgagggaagccatctcaacgccggaagcgacgtggcggtgtcggtgggcggaaggccctgcagcttctcctggcgaaattctcgagagatcaggtgcctgactcccccaggccagtccccagggtcagcacccataataattaacattaatcgcgcacagctgacgaatccagaagtcaaatataactataccgaagatcctaccatactcagaatcgatccagagtggagtatcaattctggcggtactctcctcacagtcactggtaccaacctggcgaccgtacgcgagccgcgtatcagagccaagtacggcggaatagagcgcgaaaacggctgtctggtgtacaatgatacgacgatggtgtgcagggccccatcagttgcaaatcccgtacgcagtccccctgagttgggcgagcggcctgatgaattaggcttcgtcatggataatgtaaggtcacttctggtcctaaactcgaccagtttcctgtattaccccgaccctgtacttgaaccactgagtccaactggcctgctggaactgaaacctagcagtcctcttatattgaaggggagaaatcttctgccacctgcaccgggtaacagccgcttaaattataccgttctgatcggaagcacgccgtgtaccctgactgtgagcgagacccagctcctgtgcgaggctccaaatttgacagggcagcacaaagtgactgtgagagccggtggtttcgagttttcccctggcactctccaggtttacagtgactccctcttgactctccccgctatcgtagggatcggcggaggcggtggcctgctgctgctcgtgattgtagctgtactcatcgcatataaacggaaatcaagggatgccgacaggaccctgaagaggctccaactccagatggacaacttggagtctagagtagcactggaatgtaaggaggcattcgccgaattgcaaacagatattcacgagctgacaaatgatctggatggggctggcataccattcctggactacaggacatatgcaatgagagtgttatttcccggtatcgaggaccatcccgtgcttaaggagatggaggtccaggccaacgttgagaagagtctgacactattcgggcagctcttaacgaaaaaacactttcttctgactttcatcaggaccctagaagctcagcggtctttttcaatgagagatcgaggtaacgttgcttctttgatcatgactgcattgcagggagaaatggaatacgctacaggggtgttaaagcagctgctgagcgacttgattgagaaaaacctggagagtaaaaaccatccaaagctgctgctaaggaggacagagtcagttgccgaaaaaatgctcaccaactggttcacattcctgctgtacaaattccttaaggagtgcgctggcgagcctcttttcatgctgtattgcgccatcaagcagcaaatggagaaaggtcctattgacgcaatcaccggcgaagcccgatactccttgtccgaagataaattgatccggcagcagatagactacaaaactctgacactgaactgcgtaaaccctgaaaacgagaacgcccctgaggtgcccgtgaagggccttgactgtgacacagtgactcaagccaaagaaaaactgctggatgctgcctataaaggcgtgccatactctcagcggccaaaagccgctgatatggatctagaatggcgccaggggagaatggcacggatcatcctccaggatgaagacgtcactactaagattgataacgactggaagaggctcaataccttggctcattatcaagttacagatggctccagtgtggctctagtgcccaagcagacttctgcctacaacatttctaatagttcgacctttacaaaatcactgtcccggtatgaatcaatgctacggactgcttcaagcccagactccctgcgaagcagaacaccaatgataacaccggatttagagtccgggaccaagttatggcacttggttaaaaaccatgaccacctcgatcagcgggagggcgatcggggatcgaaaatggtgtccgaaatttatttaactcgcctgctggctacgaaaggcacactccagaagtttgtcgatgatctgtttgagacaatcttcagcacagcgcatcgcggaagtgcactgccactggcaataaaatacatgtttgattttcttgatgagcaagccgacaagcatcagatacatgatgctgacgttcggcatacgtggaagtcgaactgtctgcctctacgcttctgggtgaatgtcattaagaacccccaattcgtatttgatattcataaaaattcgatcactgacgcctgcctcagcgtggttgcccagacattcatggacagctgttcaacaagcgagcataagctggggaaagactcacctagtaataagcttttatacgccaaggacatcccaaactacaagtcctgggtcgaaagatactatgcggacattgccaaaatgccagccatcagcgatcaggacatgtccgcataccttgctgagcagtctagacttcatctcagccagttcaatagcatgtctgcgctccatgagatctattcttatatcactaaatacaaggatgaaatccttgcagccctggaaaaagacgagcaggcccgacgacagcggttgagaagtaaacttgaacaggttgttgatacaatggccttatcctccta

SEQ ID NO: 235237 - DNA, 5684 bp, synthetic construct
  misc_feature 1..5684: note = Description of Artificial Sequence: Synthetic coding sequence
  source 1..5684: mol_type = other DNA
atggaacaacgaagaccatggccaagagctctggaagtagacagccggtcggtagtgctgctatcagtggtatgggtgcttctcgcccctcctgccgcagggatgcctcaattctctacatttcactccgagaacagagactggacatttaaccaccttaccgtccaccagggaaccggcgctgtctatgttggtgcgattaatagggtatataagctcacaggtaaccttacgatccaagtcgctcataagacaggtccagaagaggataacaagagctgctatccacctctgattgtccagccatgttccgaggtactgacactgacaaataacgtgaataaactgttgataatcgattattcggagaaccgccttttggcttgcggatcgttatatcagggggtctgtaagctgcttcggcttgatgacctttttattctggtggagccatcccacaagaaagaacattatctgagcagtgtgaacaaaaccggcacaatgtatggtgttatcgtgagaagcgaaggagaggacggaaagctgttcataggtaccgccgtcgacgggaaacaggactactttccaactttatctagccggaagctacccagagaccccgaaagcagcgcaatgctggactacgaactgcatagtgactttgttagctctctaataaaaattcctagcgacacattagccctcgtgtctcattttgatatcttctatatatatggattcgcctcaggtggattcgtttattttcttacagtccagcctgagactccagagggcgtcgcaatcaattccgccggagatctgttttatacctctagaatagtcaggctgtgcaaggatgacccaaaatttcatagctacgtaagcctaccttttggctgcacgagagcgggtgtggaatacagactgttacaggcggcttaccttgccaaaccgggtgactcgctagctcaggcgttcaatattacgagccaggatgacgtcctttttgctattttctccaagggccagaagcagtatcaccaccctccagacgattctgcgttatgcgcctttcctataagggccatcaacctgcaaatcaaagagaggctgcagagctgctatcagggcgagggaaatcttgaattaaactggctgctgggcaaagacgttcaatgtacaaaggcgccagttcctattgatgataacttctgcggcctggatattaaccagcccctgggcggttcaaccccggtagagggtcttactctatataccacaagccgagatcgtatgacctctgtggcttcttatgtatacaacggatatagtgtcgtgttcgtggggaccaaaagcggaaagctcaaaaaaatcagggcggatggcccaccccacggaggcgtgcagtacgagatggtatccgtgctcaaagacggaagcccgatactgagagatatggcatttagtatagatcagcggtacctctatgtcatgagcgaacgacaagttacacgggttcccgtcgagagctgcgagcagtacacaacctgcggcgaatgccttagttccggtgacccacattgcggatggtgtgctctgcataatatgtgcagcagacgagacaaatgccagcaggcttgggagcccaatagatttgccgcatctatttctcaatgtgtgtcactggcagtgcaccccagtagcatctctgtctcggagcactcgagattactttctctagtggtgtctgatgccccagacctgtctgcaggcatcgcttgcgcttttggaaacctgacagaggtcgaagggcaagtgtcaggaagccaggtgatctgcatcagcccgggtcctaaggacgttccagtgatcccgctggaccaggactggttcgggctcgagctgcaactgcggtccaaggaaactggcaagattttcgttagtacagaattcaagttctacaactgttcagcccaccagctgtgtctcagctgcgtcaactccgccttccgctgccactggtgcaaatacaggaacctgtgtacacatgatcctactacctgcagctttcaggagggtagaattaacatctccgaggactgcccacagcttgtgcccacggaggagatcctcatccccgtgggagaggtgaagccaattacgctcaaggccaggaatcttcctcaaccgcagtctggacagagaggctacgagtgcgtcctgaacatccaaggggcaatccatcgtgtccctgcactccggttcaacagctccagcgtacagtgccaaaattcatcctatcagtacgatggaatggacatctcaaacctggctgtggatttcgcggtggtgtggaatggcaacttcatcatcgacaacccccaagatctgaaggtacacctgtacaagtgcgccgcacagagagagagttgcggactctgtcttaaggctgacagaaaatttgagtgtgggtggtgctccggcgaaaggcgctgcacactccatcagcattgcacctccccctcctcaccttggttggattggagcagccacaatgtgaagtgctcaaacccacagataactgagatacttacggtttccgggcctccagaaggaggtacccgcgttacgattcatggggttaacctcggactcgattttagcgagatcgcccatcatgtgcaagtggctggcgtgccctgcacccctttacccggtgaatatatcatcgctgagcagattgtgtgcgagatgggccacgcacttgtcggaactacctcaggccctgtccgcctttgtattggcgagtgtaaacctgaatttatgacaaagtctcaccaacaatacacgtttgtgaatccctcagttctctccctgaaccctattcggggtcccgagagtgggggaacgatggtgacaataactggacattacctcggcgcaggatcgtccgtcgctgtttacctagggaatcagacttgtgaattctacggacgatcaatgagcgagatcgtgtgcgtcagtcccccttcatctaacgggctcggaccagttcctgtctccgtgtccgttgatcgcgctcatgtggatagcaatctgcagtttgaatacatcgacgatccgagagttcagcggatcgagcctgagtggagtatcgccagcggacatacccctttgaccatcaccggctttaacctggatgttatccaagagccaagaattcgcgtgaagttcaatggcaaagagtccgtcaacgtttgcaaggtcgtgaatactacaacactcacgtgcctggcacctagtctgactaccgattaccggcctggcctcgacacagtggagcggccagatgagttcggctttgtctttaacaatgtccagtctttactgatctataacgacactaagtttatatactaccccaaccccacctttgagctcctgtcccccaccggcgtactggatcagaaacctggcagccctataattctcaaagggaagaatctgtgtccaccagcctccggtggggcaaagctaaactacacagttcttattggtgagaccccgtgcgcggtgacagtgagcgagacgcagttgttatgcgagcctcccaatctgactgggcagcataaggttatggtccatgtaggaggcatggtctttagccccggttccgtcagcgtgatttccgattctctgcttacgctcccagccatcgtgagcattgcagccggtgggagcctgctcttgatcatagtgatcatagtgttaatagcttataagagaaaaagccgagaaaatgatcttaccttaaaacgtctgcagatgcagatggacaatctcgaaagccgagtcgctcttgaatgtaaggaagcgttcgctgagctccagaccgatattaacgaactgaccagcgatctggaccggagcggaatcccgtacctggattaccggacttatgccatgagggttttgttccccggaattgaggaccaccccgttctcagggaactggaagttcagggtaacggccaacagcacgtcgagaaagcacttaagctgttcgctcaacttattaacaacaaggtattcttgctgacattcatacgaacccttgagctgcaaagaagctttagtatgcgcgataggggaaacgtagctagcttaatcatgactggcctccagggacggctcgagtacgccacagacgtcctcaagcagttgctttcagacctcattgacaaaaatctagagaacaaaaatcatcccaagctgctcctgcgtcgcacagagagcgttgcagaaaagatgcttaccaactggttcgccttcctgcttcacaaattcctaaaagagtgtgcgggagaacctctgtttatgctctactgtgccattaaacagcaaatggagaagggacctatagacgctatcacgggtgaggccagatattccttgagcgaagacaaacttattcggcagcagatcgaatacaaaacactcattctgaactgtgtaaatcctgataatgaaaatagtccagaaatcccagtgaaagtgctgaactgtgacacaataacccaggtaaaggagaaaatcctcgatgccgtctacaaaaacgtgccctatagtcagcgcccaagagctgtcgacatggaccttgagtggaggcagggaagaattgcgagggtggtcttgcaagatgaggacattacaactaaaatcgagggcgactggaagcgattgaatactctgatgcactatcaagtgtccgacaggtcagttgtggccctagtccctaagcagacatcgtcatacaacattcccgcatccgcatctatatctaggaccagcatcagccgctatgatagtagctttcgctacacaggttccccagactcactgaggagtagggctccgatgattacgccggacctggaaagcggcgtaaaggtgtggcatctcgttaaaaaccacgaccatggcgatcaaaaagaaggtgacagaggatccaaaatggtctccgagatatatcttacacgtcttctcgccaccaaagggaccctacagaagttcgtcgacgacctcttcgagacactattcagcacagttcatcgcggttctgcgcttccattggccattaagtacatgttcgacttcctggacgagcaggcagacagacactcaattcacgacactgacgtcaggcacacatggaagagcaactgtctgcccctgcggttttgggtgaacgttataaaaaacccccagttcgtgtttgacattcataaaggcagcattacggacgcttgtctgtccgtggtagcacagacattcatggacagctgtagcacatctgaacatcgcctgggaaaggatagtcctagcaacaagttgctctacgccaaggacatccctagctataaatcctgggtggaaagatattacgcagatattgccaagttacctgccatttccgaccaggatatgaatgcttatctggctgagcagagccgactccatgctgtggagttcaatatgctaagtgccctgaatgaaatttattcttacgtgtctaagtattccgaggagttgatcggcgcactggagcaggatgagcaagcgcgtagacagcggttggcatataaggtggaacaactgattaatgcaatgagtattgagtccta

SEQ ID NO: 235238 - DNA, 5684 bp, synthetic construct
  misc_feature 1..5684: note = Description of Artificial Sequence: Synthetic coding sequence
  source 1..5684: mol_type = other DNA
atgaaggccatgccttggaactggacttgtttgcttagccacctgctcatggtcggtatggggtcctctacgcttcttacgcgccagccagcacctctctcccagaagcaaaggtctttcgtgactttcaggggtgaaccagctgaagggttcaatcatcttgtggtagacgagaggactggccatatttatttgggcgcagtgaacaggatctacaagctgagtagtgacttgaaagtgcttgtaactcacgaaaccggccctgacgaggacaatccaaaatgctacccacctcgtatcgtgcagacctgcaacgagcccctaaccactactaacaacgtgaacaaaatgctgctgatcgattacaaggaaaacaggctgatcgcctgtggatccctgtatcaaggtatatgtaagcttcttcgcctggaagacctgtttaaactgggagagccctaccataaaaaagagcactatctgtcaggggtgaatgagtcaggctccgtgttcggggtcatagtttcttacagcaatctggacgataaactttttatagccactgcagtagacggaaaaccggagtacttccccacgataagctctaggaaactgaccaagaactctgaggctgatggaatgttcgcttacgtctttcatgacgagttcgtggccagcatgattaagataccgtcggacacattcactatcatccctgattttgacatttactacgtatatgggttctcgtcaggaaactttgtttacttcttaacgctgcagcccgaaatggtttcccccccaggcagtactacaaaagaacaagtgtatacctcaaagcttgtaaggctgtgcaaagaggacacagccttcaactcctatgtggaagttccgattggatgtgagagaagcggagtggagtatcggttgctccaggccgcttatctgagcaaggcaggcgctgtgctcggacggaccctgggcgtgcatccagatgatgacctcctgtttacagtgttctctaaggggcagaaacgcaaaatgaagagcttggacgaatccgccttgtgtatcttcattcttaagcagataaacgaccggattaaggagaggttacagagttgctacaggggtgaagggaccctggatctcgcgtggctgaaagtgaaggacatcccatgtagctcagcgcttctgactatagacgacaacttttgtggcttggacatgaacgctcccttaggcgtctctgatatggttaggggaatcccagtatttaccgaagatcgtgatcgcatgacttcagtaatagcatatgtgtataagaatcactctctggctttcgtggggacaaagagtggaaagctgaagaaaatccgggtagatggtcctcgagggaatgcgctccagtatgagacagtgcaagtggtggaccccggacccgtgcttagggacatggcgttctccaaggatcacgagcagctgtatattatgagtgagcggcaactgacacgggttcctgtggaatcttgtgggcagtatcagtcctgcggtgagtgcctggggtccggtgatcctcactgtggatggtgcgtgcttcacaatacctgcaccaggaaagagcgttgcgagcgcagcaaagagcccaggaggtttgccagcgaaatgaaacagtgcgttcgcttaacagttcaccctaataatatctcagtttctcaatacaatgtgctgctggttctggagacctataacgtgcccgaactcagcgccggagtgaattgcaccttcgaggacctgtccgagatggacggcctggtcgtagggaaccagatccaatgctacagtcctgcagcaaaggaagtgcctcgcatcatcaccgaaaacggggaccatcatgtggtgcagctgcagcttaagagtaaagagacagggatgacatttgcttctacctcatttgtgttctacaattgttccgttcacaacagttgtctatcttgcgtcgagagtccttaccgctgccactggtgtaaatacagacatgtttgtacccacgatccaaagacttgcagtttccaggagggaagggtcaagttaccggaggattgccctcagctcttaagggtagacaagatactcgtgccagtggaggtgatcaaacccattactctgaaggcaaagaacttgccccagccgcagtctggacagaggggatacgaatgcatcctaaacatacagggaagcgaacagcgggtgcctgctctcagattcaattccagttctgttcaatgccagaacacttcgtattcatatgagggaatggagattaacaatttgccagttgaactcactgtcgtctggaacggccattttaacatcgataatcctgcacagaacaaggtacatctgtacaagtgtggcgctatgagggagagttgcggactgtgcctgaaagcggatccggactttgcctgtggctggtgccaggggccaggacagtgtacgctgcgccagcattgtccggctcaggaatcccaatggcttgaactgagtggagcaaagtccaaatgtaccaacccgaggattacagagattattcccgttaccgggcctcgcgagggaggaacaaaagtcactatccgcggagagaacctggggttggagttcagagatatcgcttcccacgtgaaggtggctggagttgagtgctcgcccctggtggacgggtatattccagctgaacagattgtgtgtgaaatgggcgaggccaaaccctcccagcacgcaggttttgtggaaatctgtgtggcagtttgtcgccctgaattcatggctagatcaagccagctctactattttatgacactgacactgtcggatctcaaacccagtcggggacccatgagcgggggaacacaggtcacaattacgggaaccaatcttaacgcaggctccaatgttgtcgtgatgtttggaaagcaaccctgtctgtttcacaggagatctccctcctacattgtttgtaacacgacctcatccgatgaggtgctggagatgaaagtcagtgtgcaagttgatagagccaaaatacaccaggacctcgtgttccagtatgtcgaggatcccacaattgtaagaatcgagcccgagtggtcgatcgtttccggtaatactccgatcgctgtgtggggtacacacctagatctgattcaaaatccacagataagagcgaagcacgggggtaaggagcatatcaatatctgcgaggtacttaacgcgacagagatgacttgccaggctcctgccctcgccctaggccctgaccaccaaagcgatctgactgagcggccagaagagtttggctttatactggataatgtgcagtccctcctgatcttgaacaaaacaaacttcacctattatccaaacccagtgtttgaagctttcggcccatcagggatcttagagctgaagccaggtacccctatcatcttaaagggcaagaacctcattccgcctgtggcagggggaaatgtgaagttgaactacacagttctcgtcggagaaaaaccatgtactgtcacggtgtctgatgtgcaactgttgtgtgaaagccctaacctgattggaaggcacaaggttatggctagggtcggcggaatggagtatagcccaggaatggtgtatattgcacctgactctcctttgtcactgccggcaattgtgagcatcgcagtagcaggcggtttgttaatcatatttatcgtcgccgtcctcatcgcatataagcgtaagagtcgtgaatccgacttaacattgaagaggcttcagatgcagatggataatctcgaatctcgagtagctctggaatgcaaagaagcattcgctgagctacaaactgatattcacgagctgacaagcgatctggatggtgctggcattcccttcctcgattatcggacttacactatgagagtactcttcccagggattgaagatcacccagtactcagagatctggaggtgccgggttaccgccaggagcgcgtggaaaagggtctgaagttgtttgctcagttaatcaacaacaaggtgtttctgctaagcttcattcgcactctggaatctcaaagatctttcagcatgcgcgaccgcggaaatgtggcctcactcataatgactgttctccagtcaaagctggaatacgcgacagatgtcttaaagcagctgctggctgatcttattgataaaaacctagagagtaagaaccatccaaaattgctcctgcggcgtacagaaagtgtggccgaaaagatgctgacaaactggtttacatttctactgtacaagtttcttaaagagtgcgccggagaacccctcttttcactcttctgcgcaatcaaacagcagatggaaaaaggaccaatcgatgccattaccggagaggccaggtatagtttatccgaggataagctcatacggcaacaaatagactataaaacgttagtactgagttgtgtttcccctgacaacgccaactcccccgaggtccccgtcaaaatattgaattgtgatacaataactcaagttaaggagaaaatattggatgcaatttttaagaatgtgccatgcagccacaggcccaaggcagctgacatggacctggagtggaggcaggggtcaggagctcgtatgatattgcaggatgaggatatcacaaccaaaattgagaacgactggaaacggctgaacactttggcccactaccaggtgcccgatggcagtgttgtggcgctcgtttctaagcaggtgaccgcctacaacgctgtcaataattccacagtatctcgtacctcagccagtaaatacgagaacatgatccggtacactggctctccagacagtctcagatcacgaacccccatgatcacacctgacctggagtcaggtgttaagatgtggcatcttgtgaagaaccacgaacatggcgaccagaaagagggagatcgaggcagcaagatggtttctgaaatctacctcacaagactgctcgcaaccaaaggcacattacaaaagtttgtagatgacctgtttgaaacaattttcagcaccgcccacaggggcagcgctttgccactcgctattaaatacatgttcgatttcttggacgaacaggctgacaaacacggcatccatgacccacacgtgaggcacacttggaagtctaattgcttgcctctgcgcttttgggtcaacatgataaaaaatccccagtttgtttttgatatccacaaaaattccatcacagatgcatgcctatcagtagttgcccagaccttcatggactcatgttctacatccgaacacaggttgggcaaagattccccttccaataagctgctctatgccaaggatataccatcctataagaactgggtagaaagatactacagcgacatcggcaaaatgccagctattagtgaccaggacatgaatgcatatctcgctgagcagtccagaatgcatatgaatgaattcaataccatgtccgctttgtccgagattttctcgtacgtagggaagtattcagaagaaatccttggtcccctagaccatgatgaccagtgcggcaaacagaagcttgcatataagttggagcaggtgattaccctgatgtctttggatagcta

SEQ ID NO: 235239 - DNA, 5684 bp, synthetic construct
  misc_feature 1..5684: note = Description of Artificial Sequence: Synthetic coding sequence
  source 1..5684: mol_type = other DNA
atgaaagcaatgccatggaattggacatgtctgctgtcgcatttattaatggttggtatggggtcgtccactctgctgacccgacagcctgccccactgagtcagaagcagaggtctttcgtgacttttcggggagaacccgcagagggctttaaccatttggtggtcgacgagcggaccggccacatttacctcggcgctgtcaatcggatttacaagttgtcctccgacttaaaagtgctggtgacccacgaaactggccctgatgaagataatcccaagtgctatcctcctaggatcgtgcagacatgcaacgagccactgactactacgaacaacgtgaacaagatgttactgattgattataaagaaaacaggctcatcgcatgcggatcgctctaccaaggcatctgcaaacttctgcgcctggaggacctcttcaaactgggcgagccctaccacaagaaagaacactacctgtcaggcgtgaatgagtccgggtccgtctttggagtgattgtgtcttattcaaacctcgacgacaagttatttatcgccactgcagtagatggcaagcctgaatacttccctactatatcctcccgcaagttgactaaaaatagcgaggcagatggtatgttcgcctacgtatttcacgatgaatttgtcgctagtatgatcaaaatcccttccgacacctttaccatcatcccggacttcgatatctactacgtgtatggattctcttcaggaaactttgtgtactttctcactctgcagccggagatggtaagccctccaggaagcaccacaaaggagcaggtctacacaagcaagcttgtgcgactgtgcaaggaggacaccgcattcaacagctatgtagaggtgcccatcggatgtgagagatctggggtggaataccgcctcctgcaggccgcttacctttctaaggctggggcagtgctgggcagaactctgggcgtacaccccgatgacgatttgttattcaccgtctttagcaagggccagaaaaggaagatgaaatcacttgacgagtctgcactttgtattttcatcctgaaacaaattaatgaccggatcaaggagcggctgcagtcctgctaccggggtgaaggaacgctagatctagcctggctgaaagttaaagacattccttgtagttcagccctactcaccattgatgacaacttctgtggcctagatatgaatgcccctctcggggtgagtgacatggtgcgcggaatacctgtttttacggaggatagagatcggatgacctccgtgattgcgtatgtgtacaagaaccacagcctggctttcgtgggtacaaaaagtggcaagctgaagaaaatccgggtggatgggccacgcggaaacgccctgcagtatgaaaccgttcaggttgtggaccctggcccagtcctgagggatatggcattctctaaggatcacgaacaattatatatcatgtccgagcgacaattaacccgcgtcccagtcgaatcttgcggccaatatcagtcgtgtggtgaatgcctgggctcaggcgatccccattgcgggtggtgcgttctccacaacacgtgcacaaggaaggagcgatgcgaaagatctaaagagcctagacgttttgcatccgagatgaaacagtgcgtgcgactgaccgtacatcccaacaatatctctgtcagccagtataacgtgctgctcgtgcttgagacctataatgtaccggagctatccgccggtgtgaattgtactttcgaggacttatccgagatggatgggctggtcgtgggaaaccagattcagtgttattctcccgctgccaaggaagtccctagaattatcactgagaatggggatcaccatgttgtgcagctgcagttgaagtcaaaagagacaggcatgacattcgccagcacttcatttgtgttctataactgctcagtgcataacagttgcctgagttgtgtggaatctccatacaggtgtcactggtgtaaatacagacacgtgtgcacacacgaccccaagacatgcagttttcaggaggggcgtgtaaaactgcctgaagattgtccacagctgctgcgagtggacaaaatccttgttcccgtcgaggttatcaagccaatcacactcaaagcgaaaaacttgccgcagccccagtctggccagcggggatacgagtgcatcctcaatattcagggttcagagcagagagtcccggctttaagattcaacagctcctccgtgcagtgtcagaataccagttatagctatgaaggcatggaaatcaataacctgccggttgagctgacagtcgtatggaacggccatttcaacattgataacccagctcagaataaggtgcacttatataaatgtggcgcaatgagggagtcttgcggtctgtgcctcaaggctgaccccgacttcgcttgcggctggtgtcaaggcccaggacagtgcactcttcgccagcactgtcctgcgcaggagtctcagtggctcgagttatcgggagccaagtcaaagtgcacgaaccccagaatcactgagatcattcccgtgaccggtcctcgcgagggcggaacaaaagtaacaattagaggtgagaatctaggcttggagttcagggacatcgcttcgcatgtgaaggtggccggtgtagagtgtagtcccctcgtagatggctacataccggctgagcagatcgtctgcgagatgggggaggcaaaaccttcacagcacgcagggttcgttgagatttgtgttgcagtctgtcggcctgagtttatggcacggagctcccaactctactatttcatgactctcactcttagcgatctgaaaccaagcaggggccctatgtctgggggtacacaagtcaccatcacagggacaaacttgaacgccggatcaaacgtggtggttatgttcggcaagcagccttgtttgttccaccggaggtcccctagctatattgtatgcaataccaccagctccgatgaagtcctcgagatgaaagtaagtgtgcaggtggatagggccaagattcaccaggacctagtgtttcagtacgtggaggatccaaccatagtgagaatcgagccggaatggagcatagttagtgggaacacccctattgccgtttggggaactcacttagacctgattcagaacccacagatccgggctaagcacggcggtaaggaacacatcaatatctgcgaggtacttaacgctactgaaatgacctgtcaggcacctgccctagccttaggacccgaccaccagtctgatctgactgagcggccagaagaattcggttttatcctggacaatgtccagagcttacttatcctcaacaagactaattttacctattaccctaatcctgtgttcgaggcattcgggccttctgggattttggaactgaaacctggcaccccgatcatcttgaagggaaaaaatctcatcccaccagttgccggtggaaatgtgaaattgaattacaccgttctggtcggagagaaaccctgtacagtgacggttagtgatgtgcaattgctgtgcgagagcccaaatcttatcggccgacataaagttatggccagagttggcggtatggagtacagcccaggaatggtgtacattgccccagacagcccgctctcactacccgcaattgtatccatcgcggtagctggaggtcttctcatcatatttatagtggcagtactgatcgcctataagaggaagagcagggaatctgatttgaccctgaaaagactacagatgcaaatggataacctggaatctcgtgttgctttggaatgcaaagaggccttcgccgagctacagaccgacattcacgaactgacatctgatctggatggggcaggcattccatttctagattatagaacctataccatgagggtgctcttccccggtattgaagatcaccctgtgctgcgggacttggaggtcccgggatacaggcaggagcgcgtggaaaagggcttaaagctgtttgcacagttgatcaataacaaagtattcttgctgtctttcatccgaaccctggaaagccagcgcagcttctccatgcgcgaccggggaaatgtggcaagcctgattatgacagtcttacagagcaagctggaatacgcaacagacgtgctaaagcagctccttgccgatttaatcgacaagaaccttgaatctaaaaatcaccctaagctgctactccgcaggacagagagcgtggccgagaagatgcttactaattggttcacctttctactctataagtttttgaaagagtgtgccggagaacccctgttctctctgttctgtgccatcaaacaacagatggaaaaagggcctatcgatgccataacgggtgaagcaagatattcactgtcagaagataaactaatcagacaacaaatcgactacaaaacattagttctctcgtgtgtgagcccagacaacgcaaacagccccgaggtgcctgtaaagattctcaattgcgatactatcacacaagttaaagagaaaatcttggacgcaatcttcaagaatgttccgtgctctcatagacctaaggccgctgatatggacctggagtggcggcagggttcaggcgctcggatgatcttgcaagacgaggacattacaactaaaattgagaacgattggaagcggctgaacaccttggcgcactatcaagtccctgacggatccgtcgtcgcgctggtatccaagcaggtgacagcctacaatgccgtgaataattctactgtcagccgaaccagcgccagcaaatacgaaaacatgatccgttacacaggctctccagatagcctcagatctagaactcccatgatcacaccagatctggagtcgggggtaaagatgtggcacttagtcaagaatcatgaacacggcgaccaaaaggagggcgatcgagggagcaaaatggtgtctgagatatacctaactcggcttctggccacaaagggtactctgcagaagttcgtggatgacctgttcgaaaccatttttagcacagctcaccgcggtagtgctctgccattggcaatcaagtacatgtttgactttctggatgagcaggcagataagcacgggatccatgacccgcatgtacggcatacttggaagagtaattgtctccccctgcgcttctgggtaaatatgattaaaaatccgcagttcgtgttcgatattcacaaaaattctataacggatgcttgcctgagcgtggtagcacaaacctttatggacagctgctcaacctccgagcaccggttagggaaggactccccatctaacaaattgctgtacgctaaggatatcccctcctataaaaactgggtggagaggtactactccgacatcggtaaaatgccagccatatcggatcaggatatgaacgcttacttggccgagcaatcacgcatgcatatgaacgagtttaataccatgagcgctctgagtgagattttctcttacgtgggtaaatatagtgaggagattctcggtcccttagaccacgatgatcagtgtggcaaacagaagctcgcctacaaactagagcaagtcataacactgatgtccttagatagcta

SEQ ID NO: 235240 - DNA, 1569 bp, synthetic construct
  misc_feature 1..1569: note = Description of Artificial Sequence: Synthetic coding sequence
  source 1..1569: mol_type = other DNA
atgaaagcaatgccatggaactggacatgcctccttagccacctgttaatggtggggatgggcagcagtacactgcttacccgccaacctgctcctctgagccagaaacaaaggtccttcgtgacctttaggggggagcccgctgaggggtttaatcacttggtggtggatgagcgcaccggacacatttacctcggagccgtcaacagaatctacaagcttagttccgatctaaaagttcttgtgacccacgaaaccgggcctgacgaggataacccaaagtgctaccccccacgcatagtacagacatgtaatgaaccattgacgactactaataatgttaataagatgttgctcatcgattacaaagagaaccggttgatagcttgcgggagtctctaccagggcatttgtaagttactccggctggaggatctgtttaaactgggagagccatatcataagaaggaacattacttatcaggtgtcaacgagtccgggtccgttttcggtgtgatcgtctcctacagtaatctggacgataagctgtttatagctactgccgtcgacggcaagcccgagtatttccctaccataagctcccggaagctgaccaaaaacagcgaggcagacggaatgttcgcctacgtatttcacgatgagtttgtcgcctctatgataaagatccctagtgacacatttaccattattcctgactttgatatatattacgtatatggtttttcgtccggaaattttgtgtactttcttaccctgcagccagagatggtttcccctcccggatctaccaccaaggaacaagtgtatacgtcaaaacttgttaggttgtgtaaggaggacacggcttttaatagctacgtagaggttccaatagggtgcgagagatccggcgtggaatataggttgctgcaggctgcttacctgtcaaaagcaggtgccgtgcttggcaggacactgggcgttcatcctgacgacgatctgctcttcactgtgttcagcaaaggacaaaagagaaagatgaagagtctggatgaaagcgccctttgtatattcatactaaagcagatcaacgatcgaatcaaagagagactgcagtcttgctacaggggagaaggcaccctcgacttagcctggctgaaggtgaaagacatcccgtgtagttcggcattgctgacaattgatgacaacttctgcggccttgatatgaacgcgcctttgggagtgagcgacatggtcagaggtatccccgtttttaccgaggaccgggaccggatgacaagtgtaatagcctacgtatacaaaaatcatagtcttgccttcgtgggcacaaagtctgggaagttgaagaaatctttcgggactggaccccaggggggaatcactcaggaatggatcggcgtggagggtgaccccccaggggcaaacatagccagtcaggaacagatgctgtgcgtgtatctgcaatgttcaagtcacaaggcaatttcagatcagagagtgcagcccctgctgtgttgctttctcaatgtgccaggcaattcaagctag

SEQ ID NO: 235241 - DNA, 1479 bp, synthetic construct
  misc_feature 1..1479: note = Description of Artificial Sequence: Synthetic coding sequence
  source 1..1479: mol_type = other DNA
atgaaggccatgccttggaactggacttgtctgctcagtcatctgttaatggtgggcatgggctccagcacactcctcacgcgacagcctgcccctctaagccagaaacaaagatcgttcgtgacttttaggggtgaacccgctgagggctttaatcatctggtggtggacgagaggaccgggcatatatatctcggagcagtaaaccggatatataaactctcatccgatttgaaggtgttagtcacacacgagacagggcctgacgaggacaatcctaagtgctatccaccacgtatcgtgcagacctgcaacgagccactgaccaccacgaataacgttaacaaaatgctcctcattgattataaggaaaatcggttgatcgcctgtggatccctgtatcaaggaatctgcaagctcctgagactcgaggatctttttaagctgggggagccttatcataagaaggagcactacctgtcgggcgtgaacgaaagcggttctgttttcggggtcattgtgtcctactccaacctcgatgacaagctgtttatcgccactgccgtggacggtaaaccagagtacttcccgaccatttcctcacgaaagttaacaaaaaactccgaagcagatggaatgtttgcttatgtgttccacgacgagttcgtagcatcaatgattaaaattccctccgatacctttaccatcatcccagactttgatatttactatgtgtacggatttagctccggaaactttgtgtatttcctgaccttacagcctgagatggtcagcccaccaggcagcaccaccaaagaacaggtgtacacctctaaactggtgcgcctgtgtaaggaggacacagcttttaattcttacgttgaagttccaatcggatgtgagaggtcgggtgtcgagtaccggctgctgcaggctgcatacctgagcaaagctggagcagtgcttgggaggactctaggggttcatcctgatgatgatctgctgtttactgtcttttcaaagggccaaaagcggaaaatgaaaagtctggacgagtccgcactttgcattttcatactgaaacagattaacgataggatcaaagaacgactacagtcatgctacaggggcgagggcactcttgacttggcgtggcttaaggtgaaagacattccatgctctagtgcgctgttaaccatcgacgacaatttttgcgggctggacatgaatgcgcctctgggggtcagcgatatggtcagaggcatccccgtcttcactgaggatcgcgatcgcatgacaagtgtgattgcctacgtgtacaaaaaccacagcctagcctttgtaggcactaagagtggtaagctgaaaaagatgcctggtacctctctgtgcccaactttggaacttcagacaggaccccgatcacaccgggctaccgtcaccctagagctccttttctcttcctgctctagtaattag

SEQ ID NO: 235242 - DNA, 5516 bp, synthetic construct
  misc_feature 1..5516: note = Description of Artificial Sequence: Synthetic coding sequence
  source 1..5516: mol_type = other DNA
atggcgctgcagttatgggctctcaccttactggggctattgggtgccggtgcgtcactcagacccaggaagctggatttctttcgatctgaaaaggagctcaaccatctcgctgtcgatgaggcctctggtgtggtgtatctgggtgcagtaaacgcactttatcagctggacgcaaagctccagttagaacagcaagtggcaaccggaccagctttggataataaaaaatgcacacctcccatcgaagccagccagtgccatgaggcagagatgaccgataatgtcaatcagcttttgctgcttgaccctcccagaaagcgtcttgtggagtgcggttctctgttcaaaggaatatgtgctcttcgcgctctgagtaatatttccttgagactgttctatgaggatggcagcggggagaagtcttttgttgctagcaacgacgagggggtggctaccgtgggcctggtgtcttctaccgggccaggcggagaccgcgtgctgttcgttggcaaaggcaatggcccacatgacaatggaataatcgtgtccactaggttgctcgatcgcactgactcgcgggaagccttcgaagcatacaccgaccacgctacttacaaggccggttatctgtccacgaatacacaacagtttgtggctgcttttgaggatgggccttacgtgtttttcgtgttcaaccagcaggataagcacccggctcgcaacagaaccctattggcgcgtatgtgccgtgaagaccccaattactatagctacctcgagatggatctgcagtgcagggatcccgatatccacgcagctgcctttggcacctgtctggccgcatcagtggccgcacctggaagtggtagggtcctatatgcagtcttttcacgagatagtagatccagcgggggacccggagccggtttgtgcttatttcccctcgacaaggtgcacgcaaaaatggaggccaacaggaacgcttgctacacaggcaccagggaggcgcgtgatatattctacaagcctttccacggcgacattcaatgtggagggcacgctccaggttcgtcaaagagctttccctgcggtagtgagcatctgccttatcccctcgggtcccgggacggtctgaggggcaccgcagtgctccagcggggagggcttaacctcactgccgtgacggtggcagccgagaacaatcacacagtcgcattcctcggcacatctgacgggaggatcctcaaagtgtatctcacacccgacggtacctccagcgaatacgactctattttggtggaaattaacaagagagttaaacgcgacctggttctcagcggtgacctgggaagcctttacgcgatgactcaggataaggttttccggctgccagtacaagaatgcctgagttaccccacctgcacacagtgccgtgattctcaagatccgtactgcggatggtgtgttgtggaaggacgatgcacgcgcaaagccgaatgcccgagagccgaggaagcatcccactggctctggtcccggagtaaatcatgcgtcgctgtgacgagcgcacaaccacagaacatgagcaggagggcccagggcgaggttcaactaaccgtcagccctctgccagctctgtctgaagaggacgaactactgtgcctttttggtgagtctccacctcaccctgcgagagtcgagggggaggctgttatttgtaactccccatctagcattccagtcactccaccgggacaggaccacgtggccgtgacaatccaactgctgttgagacgtggtaatatatttctaaccagctaccaatacccattctacgattgccgacaggccatgagtcttgaggagaacctgccttgcatcagctgcgtgagtaatcgttggacgtgtcaatgggacctgcgctatcatgagtgtagagaggctagcccaaacccagaggacggcattgtgagagctcatatggaggattcttgcccgcaattcttggggccatccccgcttgtgatccccatgaatcatgagactgacgtgaatttccaggggaaaaatctggataccgtcaaggggagttccctgcacgttggttcagaccttctaaagttcatggaacccgttactatgcaggaatctgggacattcgccttcagaactcctaagctgagtcacgacgccaatgaaacactgccccttcacctatacgtcaagtcgtatggaaagaacattgactctaagcttcacgtgaccctgtacaactgttcattcggacgttccgattgttccctctgccgggctgcgaatccagactacaggtgtgcctggtgtggtggccagtcacgctgtgtgtatgaggcgttgtgcaacacgacaagtgagtgtcctcctcccgtgataacaaggatccagcccgagaccggtcctctgggagggggtattcggatcactattctgggatcgaacctgggcgtgcaggctggagacattcagaggatcagtgtggctggcaggaactgtagcttccagcccgagcgatatagtgtgagcacacgaatcgtgtgtgtgatagaggccgctgagacacccttcaccggtggagtcgaggtcgatgtcttcggaaagctgggtagaagtcctccaaatgttcagttcactttccaacaacctaagcctttaagcgtggaacctcaacaaggtccacaagctggcggtacaactctgactatccacggcactcatcttgacacaggctctcaggaagacgtgcgggtcacactgaacggcgtcccatgtaaagtgacaaagttcggagcccaacttcagtgtgttaccggccctcaggccaccaggggtcagatgctactggaagttagctacgggggatcaccggtgcctaatcccggaatttttttcacctaccgcgagaaccccgtccttcgggcattcgaacccttacgcagctttgcatctgggggaagatcaatcaacgtgaccggtcagggcttttcacttatccagcgttttgctatggtggtcatcgccgagcccctgcagtcttggcagcctcccagagaggctgagtcccttcagcccatgaccgttgttggtacagactacgtttttcataacgatactaaggtggtcttcctttcaccagctgtgcccgaggagcccgaagcttacaacctgactgtcttaattgaaatggatggtcatagggcccttttgcgtaccgaggcaggagcctttgagtacgtgcctgatccaacctttgagaacttcaccggaggtgtgaaaaaacaagtgaataagctgattcacgctagagggactaacttgaacaaggcaatgaccctgcaggaggcagaagctttcgtcggcgcagaaagatgcacaatgaaaaccctcacagagacagacctgtactgtgaacccccagaagtccaaccacctccaaaaaggcgtcaaaagagagacacaacccataacctgcccgaattcattgtgaagtttgggtctcgcgagtgggtcctcgggagggttgagtatgatacccgggtctcagacgtcccactctccctgatcctgcccctcgttattgtaccgatggtggtggtaatagcagtctcagtatactgttactggagaaagagtcagcaggctgagcgtgaatacgaaaaaattaagagccagctcgaggggctggaggagtccgtgagagaccgctgcaaaaaagaatttaccgatttgatgatagaaatggaggaccagaccaacgatgtgcacgaggctggcatccctgtgcttgactacaagacttacactgatcgggtctttttccttcctagtaaggatggcgacaaagatgtgatgatcacggggaagcttgacatacctgagcccagaaggccagtagtggagcaggctctatatcagttcagcaacctgctcaacagtaagtccttcttgatcaacttcattcacaccctcgagaatcagcgggaatttagcgctcgtgctaaggtgtatttcgcttcattactgactgtggctcttcatggcaagctcgagtattacactgatatcatgcataccctattcctggaacttctggaacagtacgtggtagccaagaacccaaagttgatgctgcgacgaagcgagacagtcgtggagaggatgctgtccaattggatgtctatctgtttataccagtacctgaaggactctgctggggaacctctctacaaactgtttaaagctatcaagcaccaggtagagaagggacctgtggatgccgtccaaaagaaggcaaagtacaccttgaatgacactggcctcctcggagatgacgtggaatatgcaccccttactgtatccgtgatagttcaagacgaaggggtagacgccatacctgtgaaggttttgaattgcgacaccatttcacaggtcaaggagaaaataatcgaccaggtgtataggggacagccctgttcttgttggccaaggcccgattctgtagtgctggagtggagaccaggaagtactgcgcagatcctgtctgatctcgacctgaccagccagagggaagggagatggaagcgagtgaacactctgatgcattacaacgtgagggacggagcgactctcatcctttctaaggttggtgtaagccagcaaccagaggactctcagcaggaccttcccggagaacgccacgcactacttgaagaggagaatcgcgtgtggcatctggtgcgccctacagacgaggtcgacgaggggaagagtaagcgaggtagcgtgaaagaaaaagagcgtaccaaagccatcacagaaatctacttaacaaggttactctctgtaaagggaactcttcaacagttcgtggacaatttctttcagagcgttctggcccctggccacgccgtaccaccagccgtgaagtatttcttcgattttctcgacgagcaggccgagaagcacaacatccaagatgaagacacaattcatatctggaaaacaaactccctgccacttcgcttctgggtgaatattcttaagaatccccacttcattttcgatgtgcatgtgcatgaggtggttgatgcttccctgtctgtaatcgcgcagacctttatggacgcctgcactcgaaccgaacacaagttaagcagggatagcccttccaacaagctactgtacgctaaggagatctctacttacaaaaagatggtcgaagactactacaagggaatccgacagatggttcaggtcagcgatcaagacatgaacacgcacctcgccgagatctctcgtgcacatactgatagcttgaacactctggttgctctgcatcagctgtaccagtacacgcaaaagtattatgatgaaattattaatgctctggaggaggacccagcagcacagaagatgcagctggcttttcgcctccagcagattgcggctgctctcgagaataaggtgactgatctata

SEQ ID NO: 235243 - DNA, 1044 bp, synthetic construct
  misc_feature 1..1044: note = Description of Artificial Sequence: Synthetic coding sequence
  source 1..1044: mol_type = other DNA
atgcataccctcttccttgagctgctcgaacagtacgtggtggcgaagaaccccaaattgatgttgcgcagatccgagacagttgttgagcgtatgctcagcaactggatgtctatctgtctttatcagtatctgaaggattcagccggtgagcctctttataagctgttcaaggctattaagcaccaagtggagaaaggacccgtggacgctgtccagaagaaggcgaaatatacactaaatgacacaggcctgttgggcgatgacgtggagtacgcccctcttacagtgtccgtgattgtgcaagatgagggggtggacgcaatccctgtgaaagtgttgaactgtgatacaatttctcaggtgaaggagaaaataatcgatcaggtctacagaggccaaccctgcagctgcggccctgggcagacagcctggtcttggagtggcgtccgcgcaccacagcgcagatccgtgggacctgggcctgacgtcactgcaggagggcctgtcgaggcaagacagcacccttatgcactccaatgtcctggatggtcacatccccaccccgtgcaagggggagggcttccggcagcgggtgggcagccggctgggccagcttggagtgcaatgccgccagggggtggcgagcccggagttgcacccggagccgctgacagacggggaggcaggggccaggtgcaagagcggcaacgggaacgggagggggctgatgagggacaccacagagatttacctgacgctgccgcactgtcgcagggtcacactgcggctgtttgcgggcaacttctgcctgaacgcgcaggcgcatggcatgcggtgccgcctgccgttaagtacttcttcgacttcttggatgagcaggccgagaagcataacatccaggatgaagatacaattcacatctggaagaccaatagcctccccctgcggttttgggtaaatatccttaaaaatccccactttattttcgacgtgcacgtgacccggtggtggacacccagatgccagtcctctcgccgttag

SEQ ID NO: 235244 - DNA, 483 bp, synthetic construct
  misc_feature 1..483: note = Description of Artificial Sequence: Synthetic coding sequence
  source 1..483: mol_type = other DNA
gggccagacgtgaccgcaggcggtcctgtggaagcccgacagcacccctacgcattgcagtgcccgggatggtcacaccctcaccctgtgcaaggcggaggactgcctgcagctggcggtcagccggcagggcctgcatggggcgcaccatgtccccctggcggtggcgagccaggtgttgcacctggtgccgctgatagaagagggggtcgcggacaggtgcaggaacgacagagggaaagagaaggagctgacgagggccaccatcgcgacctgccggacgccgctgccctgtcccagggccacactgcggcagtttgtggacagctgctgcctgaacgagcaggcttaggcacgcgttgccatctccagtcttccacttcctcaacctcgtggaccagtcggcagcggagtacaaccagcagaatgaaaaccccatctacgagtggacgcaggactgcttacaggtctggctctggctag

SEQ ID NO: 235245 - DNA, 1569 bp, synthetic construct
  misc_feature 1..1569: note = Description of Artificial Sequence: Synthetic coding sequence
  source 1..1569: mol_type = other DNA
atggcgctgcagctgtgggcattgacgctgttagggttgctgggcgctggcgcttctctccggcctcggaagttggacttcttcagatctgagaaagagcttaaccatctcgctgtcgatgaagcttcaggggtcgtctacctcggagcagtcaatgccttataccagttggacgccaaattgcagctggaacaacaagtcgccaccggaccagccctcgacaataaaaagtgcaccccaccaatcgaagctagccagtgtcatgaagccgagatgaccgataatgtgaaccagctgctcctcttggacccccctcggaagcggctcgtggagtgtggctcattgtttaagggaatttgtgccctgcgagcacttagcaacatcagtctccgtttgttctacgaagacggctccggtgaaaagagctttgtggcgtctaatgacgagggtgtggccaccgtgggcctggtgagttctacagggcctggaggtgacagggttctgtttgttggcaagggaaacgggccacatgacaacgggattatcgtgagcacacgcctgttggataggacagatagcagagaggccttcgaggcctacacagaccacgcgacttacaaggccggatacctctccactaacacacagcaattcgtggcggcattcgaagacggaccctatgtgttctttgttttcaaccagcaggacaaacaccccgctcgcaacaggactttgctggctagaatgtgtcgcgaggatccaaattattattcttacctggagatggacttgcagtgccgcgatcccgacatacatgcagcggcattcggcacctgtcttgctgcaagtgtggctgctccgggatcgggacgagtcttgtacgccgtcttttctcgcgattctaggtcatccggcggacccggagcagggctctgcctattccctctggacaaagtgcacgccaaaatggaagctaacagaaacgcttgttataccggcacacgggaagctagagatattttctataaaccttttcacggggatattcaatgtgggggacacgctccaggaagttctaagtcattcccctgcgggagtgagcacctcccctacccccttggctcccgagacggcctgcgcggaacagcggttctgcaaaggggaggactaaatctgaccgccgttacagtggcggcagaaaacaaccacactgtggcttttctgggcacctcagacgggagaattctgaaggtatacttaacgcccgacggcactagttcagagtatgattccattttagtggagattaacaagagggtaaaacgtgatctggtgctgtccggtgatctcggctccctttatgccatgactcaagacaaggtttttcgtctgcctgtccaagagtgcctttcatatcctacatgcacacagcttcctccagctgccgagcccgcttcaggcgtccactgtcgcgtcagctctgacctcaaaatgtgtctcactctgccaaggtgggggcagctggcgtctgccagcgcgcacgcccctgccgcagccagcatgccatag

SEQ ID NO: 235246 - DNA, 489 bp, synthetic construct
  misc_feature 1..489: note = Description of Artificial Sequence: Synthetic coding sequence
  source 1..489: mol_type = other DNA
atggcactccaattgtgggccctgacactccttggactcttgggggctggagcatcattgcgacccaggaagctagatttcttcaggtcagaaaaagaattaaaccaccttgccgtggatgaggcaagtggtgtggtctatttgggcgctgtgaacgccctctaccagctcgacgctaaactgcaactggagcagcaggtggcaaccggtcctgctctggacaataaaaaatgtacacctcccattgaagcctcgcaatgccacgaagcagaaatgacagacaatgtgaaccagctgctactgttggacccccctcgtaaacggctagtggaatgcgggtcgctgtttaaaggaatttgcgccctgcgcgcactgagtaacataagtcttcgcctgttctacgaagacggatctggggagaagtcttttgttgccagcaatgacgaaggtgttgcgacggttggccttgtaagctcaacaggtccatag

SEQ ID NO: 235247 - DNA, 1434 bp, synthetic construct
  misc_feature 1..1434: note = Description of Artificial Sequence: Synthetic coding sequence
  source 1..1434: mol_type = other DNA
atggctctgcaactgtgggcactgacgctactgggcctcttgggcgctggggcatcactgaggccgaggaagctggacttttttaggtctgaaaaagaacttaaccatttggcggtagacgaagcctcaggagtggtgtatttaggcgcagtaaatgcattgtatcagttggatgccaagctccagctggagcaacaggtggccaccgggcctgccctggataacaaaaagtgtactcccccaatagaggccagccagtgccacgaggctgagatgactgataatgttaatcagctgctgttactggatcctcccaggaaaagacttgtcgagtgcggttctctgttcaagggcatttgtgccctgagagccctgtccaacattagtctgcgccttttctacgaggacgggagcggcgaaaagtccttcgtggctagcaatgacgagggtgttgctactgtgggtttagtgagcagcaccggcccaggaggagatagagttctgttcgttggcaagggaaacggccctcacgacaacggaattatcgtgtccaccaggttattggaccggactgacagtagagaagcatttgaggcttacaccgatcatgctacatataaggcaggctacttgtcaacgaatacccagcaattcgtggccgcatttgaggatggaccctacgtgttcttcgtgttcaatcagcaggacaagcaccccgcacgaaaccgaacccttctggctcgtatgtgtagagaggaccctaattactactcctacctggagatggacctgcagtgtagagacccagatatccatgccgctgctttcggcacatgtttagctgcctccgtagctgctcccggaagcggcagagtcctctatgctgtgttttcgcgcgattcccgaagcagcgggggacccggagccggtctttgtctcttccccctggacaaagtccacgccaagatggaagctaatcgaaatgcctgttacacaggtacaagggaggctcgcgacattttttacaagccatttcatggcgatatccagtgtggagggcacgcaccagggtcctccaaatcatttccttgtggatccgaacacttgccctatcctctggggtcccgcgacggattgcggggtactgccgtccttcagcgcggaggcctgaacctaactgccgtgacagtggccgctgagaataaccataccgtggccttcctgggcacctctgacggtcggatcctcaaggtatatctaacaccagatggtacctcctctgagtacgatagcattctcgtagaaatcaacaaaagggtgaagagagacctggtgctatcaggtgatctcgggtcactctatgccatgacgcaggataaggtgttccggctaccagtgcaggaatgcctttcctatcccacctgcactcagtag

SEQ ID NO: 235248 - DNA, 5516 bp, synthetic construct
  misc_feature 1..5516: note = Description of Artificial Sequence: Synthetic coding sequence
  source 1..5516: mol_type = other DNA
atggccttacaactgtgggctttgacgctcctcggtttacttggagcaggcgctagcttgcgtcctcgcaaacttgacttttttcgctctgagaaggagctcaaccacttggccgtggacgaggcgtcaggcgtagtgtacttgggggctgtgaacgctttgtaccagctagatgccaagcttcaactggaacaacaggtggccactgggcctgctctcgataataaaaagtgtacccctccgattgaggcctcccagtgccatgaggctgagatgacagataacgtgaaccagcttttgctattagaccccccaagaaagcgcttggtcgaatgcggctctctgttcaaaggcatctgtgcactccgggctttgtccaacattagcctgagactattttacgaggatgggtcaggcgaaaaatcattcgtggccagtaacgacgagggagttgctactgttggacttgtgagttctaccggacctggaggagaccgggtgttgtttgttggaaagggcaacggaccccacgacaatggcattatagtctcaacaagactcttagatagaacagacagtagagaagctttcgaagcttacacggatcatgccacttacaaggctggatatctcagcactaacacccagcagttcgttgccgcatttgaagatggcccatatgtgttcttcgtgtttaatcagcaggacaagcaccccgctagaaatcgtaccctcctggctcgaatgtgccgagaggaccctaactactacagctacctggaaatggatcttcagtgtcgcgaccctgacatacacgcagctgcttttggcacctgtctggcagcatcggtggccgcacctggtagcggtcgagtgctctacgccgtgttttccagagatagtaggtcatccgggggaccaggggctgggctgtgtcttttcccactcgataaggtgcatgcgaagatggaagctaaccgaaacgcatgttacacaggcacccgtgaggcccgagatatcttctataagccgttccacggtgatatccagtgcggaggtcatgccccaggatcatccaagagttttccctgcggttccgaacacttgccctacccactgggatctagagatggcctgcggggaaccgcggttctacagcgaggcggtctcaatctcaccgccgtgactgtggcagccgagaacaatcatacagttgcctttttgggtactagcgatggaaggatcctgaaagtgtacctgacgcccgatgggacatcatccgaatacgacagcatcctggtggaaataaataagcgtgttaagagagatctggtattatcaggcgatctgggtagcctgtatgctatgactcaggataaggtgtttcgattaccagtccaggaatgcttatcctatccaacctgtactcagtgtcgggatagtcaggatccatattgcggatggtgcgtcgtagaaggccgttgtacgcgcaaagctgagtgtccacgagccgaggaggcctctcactggctctggagccgatcaaagagctgcgtggccgtcaccagtgcccagcctcagaacatgtcccgacgggcacagggcgaagtgcagctgactgtctctcctctacctgcactgtccgaagaagacgaactgctgtgcctcttcggcgaaagccccccacatccagctagagtggaaggcgaagccgtgatctgtaacagcccgtcaagcataccagttacccccccagggcaggatcacgtggcagtgaccattcagctccttcttcggaggggcaacattttcctgacgagctaccagtaccccttctatgattgtagacaggccatgtccctggaggagaacttaccatgtatatcatgtgtcagtaataggtggacttgtcagtgggatttacgctaccacgaatgccgtgaggcttctcccaaccccgaggatggaatcgtcagggcccatatggaggactcatgcccccagtttctcggccctagccctcttgtcattcccatgaatcacgaaaccgatgtgaacttccagggtaagaacctggacacggttaagggaagctcgctgcatgtgggcagcgatctcctaaaattcatggagcccgtcacgatgcaggaatctggaacatttgcttttcgtactcccaagctttcccacgacgcaaacgaaacacttccactgcatctctatgtgaagtcatatggcaagaatattgacagcaaactccacgttacgctctataattgtagctttggtaggagcgactgcagcctgtgtagagccgcaaatccggactacaggtgcgcatggtgcggcggtcaatctagatgtgtgtacgaggctttgtgtaataccacttccgaatgcccccctcccgttatcactaggattcagccggaaactggccctctgggaggcggaatcaggattacaatattaggaagcaatttgggcgtgcaggccggagatattcaacgcatctccgtggcaggacgtaactgtagtttccagcccgagcgctactctgtgtcgacccggatcgtctgcgttattgaggccgcagaaacacctttcaccggcggtgtggaagtggacgtgtttggtaaactagggaggtcacctcctaatgtccagtttacctttcagcaaccaaaaccactgtcggtggagccccaacagggccctcaggcagggggtactaccctcacaatccacggcacccacctggatacggggtcccaggaggacgtgcgcgtgacactgaatggcgtgccttgtaaagtaacaaaattcggtgcccagctgcagtgcgtcacgggaccccaggccaccaggggacagatgctgctcgaagtctcctacggcggatcacccgtcccaaatcctgggatcttcttcacctaccgtgaaaacccggtcctgagagcctttgagcccttgaggtctttcgcctctggtgggaggtctatcaacgtaactgggcaggggttttcgctcatccagcggtttgcaatggttgtgattgcagaacctctgcagagttggcagcccccacgggaggctgagtccttgcaaccaatgacggttgttggaaccgactacgtgtttcacaatgacactaaggtggtgtttctcagcccggcagtcccagaggaacccgaggcctacaacctaactgtgcttattgagatggatggccaccgcgcactgctgaggacggaagcaggcgcattcgagtacgtgcccgacccaactttcgagaatttcacaggaggcgtaaaaaagcaggttaataaattgatacatgcgaggggaaccaatctgaacaaagccatgacacttcaggaggcggaggcgtttgttggcgcagagaggtgcaccatgaagactctcacagagaccgatctctactgtgagccccctgaggtgcagccaccaccaaaaagacgtcagaagcgcgatacaacccacaacctgcctgaattcattgtcaaattcggtagcagggagtgggttcttggaagggtggagtacgacacaagggtgtctgatgtccctttgtcgctgattttgcctctcgtcattgttcctatggtggtcgttatcgccgtctccgtgtactgctactggagaaaatctcagcaggccgaacgcgaatacgaaaagatcaaaagccagctggagggtttagaggagtctgtaagagacagatgtaaaaaggaatttaccgatcttatgatcgaaatggaggatcagaccaatgatgttcatgaggctggtataccagtgcttgactacaagacatacactgaccgcgtattttttctccctagcaaggatggcgataaggatgtcatgataacaggaaagctagacattcctgagcccaggcggcctgtggttgaacaggcactctaccagttctcaaatctcctcaactctaagtcatttctcattaattttatacacacgctggaaaatcaaagagaattctcagctagggccaaagtgtattttgccagtctcttgacggtagcgctacacggtaagctggagtactacaccgacataatgcatacactctttctggaattgttggagcagtacgtcgtggcaaagaaccctaagctgatgctcaggcggtccgagactgtggtggaaaggatgctcagcaattggatgagcatctgtctttaccagtacttgaaagatagtgcaggagaaccattgtacaagcttttcaaggcgatcaaacaccaggtggaaaaagggcctgtggatgctgtccagaagaaggctaagtacaccctcaacgacactgggctgctgggagatgatgtggaatacgcgcctctcaccgtgagcgtaattgtgcaagacgagggagtggacgcaataccggtgaaggtgctgaactgcgacacgatcagtcaggtgaaggaaaaaattatcgatcaggtgtacagaggccagccctgcagctgttggcctagaccggatagcgtagtcctggaatggagaccaggctcgaccgcccagatcctgtctgatctggacctgacctctcagcgcgaaggcaggtggaagagagttaataccctcatgcactacaacgtcagggatggggctacattgattctatccaaggtcggggtctcccagcagcccgaagatagtcaacaggatctgccaggggaacgccacgccttgttagaagaagagaatagagtctggcacctggtgcgaccaaccgacgaagtggatgagggcaagagcaagcggggaagcgtcaaggaaaaggagcgcaccaaggcaattacggagatctacctgactcgcctgctgagcgttaaggggactttacagcagttcgtggacaattttttccagtcagtgcttgcccctggccatgccgtgcccccagctgtgaaatacttttttgactttctggacgaacaggccgaaaagcataacattcaagatgaggataccattcacatatggaaaacaaacagcctcccactgcgcttctgggtgaatatccttaaaaaccctcattttatcttcgacgtgcacgttcacgaagtggtggatgctagcttatccgttattgctcaaacctttatggacgcttgcactagaaccgagcacaagctcagccgggatagcccctcaaataagctcctctatgccaaagagatttcaacctataaaaagatggtggaagattactataagggcattcgccagatggtgcaggtgtccgaccaggacatgaacacacacctggccgaaatttcgcgtgctcataccgattcccttaacaccctggtggccctccaccagttatatcagtatacacagaaatattatgatgaaatcatcaacgccctggaggaggatcccgcagctcagaaaatgcaacttgcctttcgcttgcagcaaattgctgccgctctcgaaaataaggtgaccgacttgta

SEQ ID NO: 235249 - DNA, 5729 bp, synthetic construct
  misc_feature 1..5729: note = Description of Artificial Sequence: Synthetic coding sequence
  source 1..5729: mol_type = other DNA
atgtgtcacgccgcacaagagacccctctgctccatcacttcatggcgcctgttatggccagatggcctcctttcggactgtgtctcctcctgctcctgctgtctccccctccattgccactgaccggcgcacatagatttagcgccccaaacactacactcaatcacctggccctggctcccggtcgaggtaccctatacgttggcgcagttaaccggctgttccagctatccccggaactccaactcgaagctgtggctgttaccgggcctgtgattgactcgccagattgtgtcccgtttagagacccagcggagtgcccccaagcccagttgaccgataacgctaaccagctgttgcttgtctcaagcagagcccaagagcttgtggcttgcggccaggtgagacaaggggtttgcgagactaggaggctcggggacgtggcggaggtcttgtaccaggccgaggatcccggagacggccagtttgttgcagcgaatacacccggagtggcaacggtgggattggttgtgcctctgcccggacgggatctgctattagtcgcccgaggcttggcaggaaaattgtccgctggggttcctcccctggccatacggcagctggccggaagtcagcctttctcttctgagggactcggtcggctggttgtgggagacttttctgactacaataatagctacgtgggagcgtttgccgacgcccgaagcgcgtatttcgtttttcggcgacgtggggcacgggctcaagcagaatatcgctcgtacgtggccagagtctgcctgggagataccaatctttacagctacgtagaggttcccctcgcttgccaagggcaggggctaattcaggcagcctttctggcgcctggaacattgctgggcgtctttgctgcaggcccacggggtacacaagcggctttatgcgccttcccaatggtggaattgggcgcatcaatggagcaagctcgtagactgtgctacactgccggaggacgagggccttctggcgctgaagaggcgacggtggagtacggagtgacatcccggtgcgtgacgctccccctcgattctcccgagtcctatccttgcggcgacgagcatacaccaagcccgatagctgggagacagccgttggaggtacagcccctactgaaattaggtcagcccgtaagcgctgtcgccgctctccaggccgatggccatatgattgccttcttgggcgatacccagggccagctatacaaagtgtttctacatggctctcaggggcaagtgtaccatagtcagcaagtgggcccacctggctccgcgatttcccctgacttactgctggacagcagcggctcccacctttacgtgctcaccgcccaccaggtcgatcgcatcccagtggcggcatgtccccagttccccgattgtgccagctgcctccaggcgcaggatcccttatgtggctggtgtgtgctgcaagggaggtgcaccaggaagggacaatgcggcagggcgggacagcttaaccaatggctgtggagctacgaggaagacagtcattgtctccacatacagagccttcttcctggccaccaccccagacaggagcagggtcaggtgacactatcagtccctaggcttccgatcctcgatgcagacgaatacttccactgcgcctttggagactacgacagtctggcgcacgtcgagggccctcacgtggcatgcgttactccgcctcaggaccaggtgcccctgaaccctcccggaactgaccatgtaaccgtgccacttgcactcatgttcgaagatgtgacggtcgcagccacaaacttcagtttctacgattgctcagcagtccaggcactcgaggccgctgcaccttgtagggcctgtgtggggtccatatggcggtgtcactggtgtccccagtcatcccattgtgtctatggcgagcattgtccagagggggagcgaacaatttacagtgcgcaagaggtggacatacaggttcgcggtcctggcgcatgtccacaggtggaaggactggccggacctcacttggtgcccgtgggatgggagagccacctagcccttagagtcagaaatttgcagcactttcgcggtttaccagcctccttccactgctggcttgaattgccaggggaactcaggggcctgcccgcaactctggaagagactgctggggatagcggcttgatccactgccaggcgcaccaattttacccttcaatgagccagcgagaattgccagtccccatatatgttacacaaggggaagcacagaggctggataacacccacgcactgtacgtgatcctgtatgattgtgccatggggcatcccgattgcagtcattgccaggctgctaatcggtctctaggttgcttatggtgcgccgacggacaaccagcctgccgctatgggccattgtgtcccccaggagccgttgagctgctgtgccccgcaccctcaatagacgctgtggaacccttaactggaccaccagaaggaggtttagccctgactattcttgggagcaatctaggtcgcgctttcgccgatgtgcagtacgcagtgtctgtcgctagccgcccttgtaatcccgagccttccctgtacagaacgtccgcacgtatcgtgtgcgtcacaagtccagctcccaatggaaccacaggccctgttcgtgtcgcaattaaatctcagccgcctggtatcagttctcaacactttacatatcaggacccggtattgctcagcctgagccctcggtggggaccacaggctgggggaacgcagttgaccatccgaggtcagcatctccagacagggggtaatactagcgcatttgttgggggacagccatgcccgatcctggagcccgtgtgcccagaggctatcgtgtgtagaactcgtccccaggctgcgccaggagaagccgctgtgctggtcgtgtttggacacgcacagaggaccttgttggcaagccctttccggtacactgccaatccccagctcgtggcagccgaacccagtgcctcgtttaggggtggcggacggttgatccgagtgcggggtaccggcctcgatgtggtccagcgtcccctcctgtcagtttggctcgaggcagatgccgaggtccaggcctcccgggcacagccgcaggacccacagccacggcgatcctgtggagcgccagcggctgatccacaggcgtgtatccagctgggtggaggtctgctgcagtgttctaccgtgtgttctgtcaacagctcttcactgctcctgtgccgttctcctgcagtccctgacagagcacacccacagagagtgtttttcacccttgataatgtgcaagtcgacttcgcaagcgcaagcggaggacaaggctttctctaccagcccaatccacggctggcacccctctccagggaaggaccagccagaccgtatagattgaaaccagggcacgtactggatgtagagggcgagggacttaacttaggaatttccaaagaagaagtccgagtgcacattgggagaggagaatgcttagtgaagacactgaccagaacacatctgtactgcgagccccctgcacacgcaccccagccagcaaacgggagtgggttaccccaattcgtcgttcaaatgggaaacgttcaactggcactaggacctgtacagtatgaagccgagccccctctgtctgcgtttccagtagaggcccaggccggagtaggcatgggtgcggctgttctgatcgcggctgttctgctactcactctgatgtacagacacaagagcaagcaggctttgagggattatcagaaggtcctggtacagcttgagagtctggagaccggtgtcggcgatcagtgccggaaggaatttacagacctgatgacagagatgacagacttatcgtctgaccttgagggatcagggattcccttcctcgactatagaacctacgcagagcgcgcatttttccccggacatgggggttgtccattgcagcctaaacccgaaggacccggtgaggacgggcactgtgccactgttcgccaaggccttactcagctgtcgaacttgcttaatagcaaactcttccttttgacactgattcacacgctggaagaacagccctcattttctcaacgagatagatgccacgtggcctctctgctgtccctagccctgcatggcaaactggaatatctaaccgacatcatgcgaacactgctaggcgatctagccgctcattatgtgcacaggaatcctaagctgatgcttcgtaggacagaaaccatggtggaaaagctgctaactaactggctgagcatttgcctgtacgcctttttacgcgaggtggcgggtgagccattatacatgttgtttcgcgctatccagtatcaggtggataagggcccagtcgacgccgtgacgggaaaggccaagaggactctaaacgatagccgcctgctaagggaagatgtcgagttccagcccctaactctgatggtactggtgggaccaggagccggaggcgctgccggttcaagcgaaatgcagcgggtgccagcaagggtactcgacacggacaccatcacacaggtcaaagagaaggttctcgatcaggtttataaaggtacgcctttttctcagcgtccttctgttcatgcattggaccttgaatggagatctggactggccggacacctaaccttgagcgacgaggatcttacttcagtgacgcagaaccactggaagaggcttaacacactccaacactacaaggtgccggatggggctacggttggactggtgcctcagttacatcgagggtccaccatcagccagtctctggctcagcgatgccctctgggagaaaacattcccacactggaagacggtgaggaggggggagtttgtttatggcacctagtcaaagcaacggaagagcctgaaggcgcaaaggtgcggtgcagttccttgcgtgaacgggagcctgcgcgtgcgaaggccatcccagagatttaccttacccggttactgtctatgaagggaacccttcaaaaatttgttgacgatacgtttcaggctatcctgtcagttaataggcccattcctatagctgtgaagtatttgtttgatcttcttgatgaattggcggaaaagcatggaatcgaggatccagggacactacatatttggaagactaatagcctgctgctgagattctgggttaacgcgctgaaaaacccccagctcattttcgatgttagagtgagcgacaacgtcgacgccatcctggccgttatcgctcaaacatttatcgacagctgcactacctctgaacataaggttggaagagattccccggtcaataagctgctttatgcgagagaaattcctagatataagcaaatggtagaacgctattacgcggacatcagacagagttctcctgcttcataccaggagatgaattcggccctggcagaactgtcagggaattacactagcgcaccacattgcctcgaggcgctgcaagagctctacaatcacatccataggtattacgatcagattatttcggctctggaagaggatcccgtgggccaaaaactgcagctggcttgcagactccagcaggtcgcagccctcgtcgaaaacaaagtaaccgatttgta

SEQ ID NO: 235250 - DNA, 777 bp, synthetic construct
  misc_feature 1..777: note = Description of Artificial Sequence: Synthetic coding sequence
  source 1..777: mol_type = other DNA
tagagtctggagacaggcgtaggagaccagtgcaggaaggagttcacagatctcatgacagagatgaccgacctatcctctgacttagaggggtccggcataccttttctggactatcgtacctatgccgagcgcgcattctttccaggtcacgggggatgtccactacagcccaaacctgagggccctggggaggatggccattgcgcaactgttaggcagggcctgactcaactttccaatcttctaaactctaagctgtttttgctcacacttattcatacattagaagagcagcctagtttctcacagagggatcgttgtcatgtcgcttccttactgagcctcgccctgcacgggaagttggaatatctaaccgacatcatgcgaaccctgctgggagacctggcggctcactatgtacatagaaatcctaagctgatgctcaggaggacggagactatggtggagaaacttttgacaaattggctgagtatatgcctctatgcattcctacgagaagtggccggagaaccactgtacatgttatttcgggcaatccaatatcaggtagataaagggcctgtcgatgctgtgacagaatggcgtagcggcctggctggccacttaaccctgagcgacgaagatctgaccagtgtaacacaaaaccactggaaaaggctgaatacattacagcattacaaggtgcccgacggtgccaccgtggggttagtaccccagttgcaccgaggctcaactattagccaatctctatag

SEQ ID NO: 235251 - DNA, 531 bp, synthetic construct
  misc_feature 1..531: note = Description of Artificial Sequence: Synthetic coding sequence
  source 1..531: mol_type = other DNA
tgagcttcccagggaactctacagaaatttgtggacgataccttccaggcaatcctctccgtaaacaggccgatcccaattgcggtgaaatacttgtttgaccttcttgacgagctggccgagaaacacggtattgaagatcccggaaccttacacatttggaagacaaacagcctgctgctgaggttctgggtcaatgccctaaagaacccgcagctcatatttgatgtgagggtaagcgataatgtggatgcaatcctggccgtaattgctcaaacctttatagacagttgcacgaccagcgagcacaaagtcggcagagtacgggcagtccctgccgcagccgcagggaggggtctgcgacggaaaggcctatggggaaagcctagggggctgtgcaccgagctgtgggtaggtagtggttcaatcatgggtgcaccaagtcccccatcatcctgtctggccccaccactgcctccagaacaagactctccagttaataagcttctgtacgctcgggagattccctag

SEQ ID NO: 235252 - DNA, 492 bp, synthetic construct
  misc_feature 1..492: note = Description of Artificial Sequence: Synthetic coding sequence
  source 1..492: mol_type = other DNA
tgaaagcgcactttgaatgattcacgactgttgcgcgaagacgtggagtttcaacccttaaccctcatggttttggttggacccggagcaggcggagctgcaggttccagcgaaatgcagagagtgcccgcaagggtgttagatacagacaccataactcaagtgaaggagaaagtgctcgatcaagtgtacaagggcacccccttttcccaacgtcccagcgttcatgctttagaccttgagtggaggagcggacttgccggtcacctgactcttagtgacgaggatctgacaagtgtcacccagaaccattggaaacgtttgaacaccttacagcactacaaggtgcccgatggagccaccgtgggcttggtgcctcagttacaccgcggatccacgatatcccagtccctggcccagcgctgtccactgggcgaatcagagtccctgggccctgacctcggtcctctggaaagcaggctgggcagatag

SEQ ID NO: 235253 - DNA, 2967 bp, synthetic construct
  misc_feature 1..2967: note = Description of Artificial Sequence: Synthetic coding sequence
  source 1..2967: mol_type = other DNA
atgtgtcacgcagcccaggagacacccctgttgcatcacttcatggacagcccagaaagttacccatgcggggacgagcatacccccagcccaattgcaggccgacagcccttggaagttcagcctctgctaaagttaggacagcctgttagcgccgtcgccgcactgcaggctgacggtcatatgatcgccttcctgggagatactcaaggtcagttgtacaaggtggatcgcatacctgtagccgcatgcccacagtttcccgactgcgcctcctgccttcaagcccaggatccactttgcgggtggtgcgtactccagggccgttgcacacgtaaaggccaatgcggacgggcaggccaattaaaccagtggctgtggagctacgaggaggactcccactgcttacatatccaaagtctgctaccgggtcaccatcctaggcaggagcagggtcaagtcaccctgagtgttccaaggctgccaatcctggatgctgacgaatatttccactgcgccttcggggactacgattcattagctcacgttgagggcccacacgtcgcctgtgtcactccacctcaggatcaggtgcccctcaatccacccggaacagatcacgtaaccgtacccttggcattaatgttcgaggacgtgacagtggccgctaccaattttagcttttatgattgtagcgctgtgcaggcgctggaggccgctgcaccatgtcgagcctgcgtgggaagcatatggcgatgccattggtgtcctcagtcctcccactgcgtgtacggtgagcactgtcctgaaggcgagagaactatatattctgcccaagaagtggacatccaggtccgaggaccaggggcatgtcctcaagtcgagggtctggcagggcctcacctagtgcccgtgggctgggagagtcatctcgctctgcgagtaagaaatctgcaacacttcaggggtctgcccgcttccttccactgttggcttgagctgcccggtgaactgcggggattgccagcgacgttggaggagacagccggagatagcgggctaattcattgtcaagcccaccaattttacccaagcatgagccaacgtgagctgccagttccgatctatgttacccagggtgaagcccagcgcttagacaacacccacgccctgtatgttattctgtatgattgtgcgatgggccaccctgattgcagtcattgtcaggccgctaatcggtctctcggatgcttgtggtgcgccgatggccagcctgcttgtaggtacggtccgttgtgcccgcctggtgctgtcgaactgctgtgccctgccccatcgatagatgctgtcgaaccacttacaggaccccctgaaggcggtctcgctctcaccatcctgggtagcaatctgggccgagcattcgcagatgtgcagtacgctgttagtgtggcatcccggccatgcaatccagaaccctccctctataggacatcagccaggatcgtctgcgtgacttccccagcccctaacggcacaactggcccagttcgagttgctattaaatctcagcctccagggatctccagccagcatttcacttaccaggatcctgtgttgttaagtctgagtcccagatggggcccacaggccggtggaacacaacttaccatcagaggccaacacctgcagacagggggaaatacatctgcattcgttggagggcagccctgccctatattggaaccagtttgcccagaggccatcgtgtgtcgaaccagaccacaagcagccccaggcgaggccgctgtccttgtcgtcttcggacatgcgcagcggaccctcctggccagtccttttagatacaccgcaaatcctcagctcgtggctgccgagccctcagcctcattccgagggggtggcagactgattagggtgcggggtactggcctcgacgtggtccagcggcctcttctatccgtgtggctcgaggctgatgcagaggtccaagcaagcagggcacagccccaggatccccagccaaggaggtcctgtggagcccctgcagcagacccacaggcttgtatacagcttgggggaggactgctgcagtgctccaccgtgtgttcagtcaacagttccagcctcctcctttgtcgatctccagctgtgcccgacagggcccaccctcagcgggtcttcttcactctcgataatgtgcaggtggatttcgcctcagcaagcggcggacaggggtttttgtatcagccaaaccccaggctggccccactctcaagggaaggaccagccagaccttacagactcaagccaggacacgtcctggatgtggaaggcgaagggctgaatctgggcatttcaaaggaggaggtaagagtgcatattggtcgcggagagtgcctggtgaagactctgacccgaacacacctgtattgcgagcctcccgcacacgcacctcagcctgcgaacggctcaggcctgcctcagttcgtggtgcagatggggaacgtgcagttggccttgggccctgtgcagtacgaggcagaacctcccctgtccgcttttccagtggaggcccaagccggagtcgggatgggggctgctgtgttaattgctgccgtgcttctgcttaccttgatgtaccggcacaaatcaaagcaagcactcagggactatcagaaggttctggtgcaactggagtcactggagactggggtgggcgaccagtgccggaaggagtttaccggcggatgtggcggaggaggcaccggataccccagaggactgaacagccatctgggggctagctggccacgcagacctcacgacggggatgacaggccacagcagcggccaggcggtcagcgtgaccctcttccaggactcccccatctccgcagggcccgactgctaccatggccttggagactccccgctgcagcccaagcctag

SEQ ID NO: 235254 - DNA, 675 bp, synthetic construct
  misc_feature 1..675: note = Description of Artificial Sequence: Synthetic coding sequence
  source 1..675: mol_type = other DNA
atgtgccacgcggctcaggaaacccccctgttgcatcattttatggtggataggatccctgttgctgcctgtccacagtttcctgattgtgcatcctgccttcaggcccaggacccgctttgcggctggtgtgtcctgcagggccgttgtacacgcaagggccaatgtggtcgggctggtcagttgaatcaatggctctggtcctatgaggaagactctcactgcctccacatccaaagtttgcttcccggtcaccacccccgtcaggagcagggacaggtgacgctgtccgtccctcgactgccaatactggatgccgacgaatacttccattgtgcttttggtgattacgattctctggcgcacgtggagggcccacatgtggcttgcgttacaccccctcaagatcaggtgcccctcaatcccccaggcacagatcatgtgacagtgcctttggctcttatgtttgaggatgtcaccgtggctgctaccaattttagcttttacgattgcagtgctgtccaggctttggaggcggctgcccctgcctgtcttccaccaagtaccgccggttggtcctgcctggagaacttcggagactgccgcccaccttggagacgccagcagggcattcaggcctcctctacagcccgacctacacggtcttccccctag

SEQ ID NO: 235255 - DNA, 4689 bp, synthetic construct
  misc_feature 1..4689: note = Description of Artificial Sequence: Synthetic coding sequence
  source 1..4689: mol_type = other DNA
atgtgccacgcagctcaggagacccccctcttgcatcacttcatggatagtcctgagtcctacccatgcggagacgagcatactccgagccccattgccggtaggcagccactcgaagtgcaacctctgctgaagctgggacagcctgtttcggccgttgcagcgctgcaggcagatgggcacatgatagcgttcctcggcgacacccagggtcagctgtataaggttttcctacatggtagccagggtcaggtgtaccatagtcagcaggtcggccctccaggctctgccatcagtccggacctgctcctcgatagcagtggctcccacttgtacgtgttaactgcccatcaggtggataggattcccgttgctgcctgtccccagttccctgactgtgcatcgtgcctgcaagcccaggatccactgtgcggttggtgtgtgttgcaggggagatgtaccagaaaagggcagtgcgggagggcgggacagctcaatcagtggctgtggtcctacgaagaagactcacattgcctgcacatccagtcactgcttcccggtcaccatccaagacaggaacagggtcaagtcactctgagtgtccctcgtctcccgattctggacgccgacgaatatttccactgcgccttcggagactacgactccctggcacacgtggagggtcctcacgttgcctgcgtcactccccctcaggaccaggtacctcttaatcctccgggaaccgatcatgtgactgtacctctagccctcatgttcgaagatgttaccgtcgccgcaaccaatttttccttctacgactgctctgctgttcaggccctggaggctgctgcaccatgtcgagcatgcgtgggatccatctggcgttgtcattggtgcccccagtcgtcgcactgtgtctacggcgagcactgtcctgaaggcgagcgaaccatatactcagcccaagaagtcgacatccaagtacgcggtcctggagcctgcccacaggtggagggtttagcaggccctcacctggtgcctgtgggttgggagtcacacctggccttgcgtgtccgtaacctgcagcattttcggggactgccggcttctttccactgctggctcgagctccccggtgaactgagggggctgcctgccaccctcgaggaaacagctggcgatagcgggcttattcattgtcaggcacatcagttctacccctcgatgtcccaaagggagctgcccgtcccaatctacgtgacccagggggaagctcagcgtctggataatactcacgcactttacgttattttatatgattgcgccatggggcatccggactgcagtcactgtcaagccgctaaccgttcccttggatgtttatggtgcgcggatggacagcctgcatgtaggtatggccctctgtgccctcctggcgctgttgagttgttgtgtccagccccttccatcgacgccgtcgaacctctgacagggcctcccgaggggggattggcactgacaattctggggagtaatcttggcagggcttttgccgatgtacagtatgccgttagtgtcgcctctaggccatgcaaccctgaacccagcctctatcgcacatctgctagaatcgtctgcgtaacatctcccgcaccaaacgggactactggcccagtgagagtcgcaattaagagtcagccgccaggcatttcctcccagcacttcacctaccaggaccccgtccttctgtcactctcacccaggtgggggccacaggcaggcggaacccagctcactattcggggtcagcacctgcagactgggggaaacaccagcgcctttgtgggcggacaaccttgtccgatacttgaaccggtctgccctgaggctatagtatgtcggacacgaccccaggccgcaccgggagaagccgcagttctggtagtgttcggtcacgcgcaaaggaccctgttagctagcccctttcgctatactgctaacccccaactggtggctgctgagccatcagcgagcttccgcggtggcggaagactgattcgtgtgagaggcacaggtcttgatgttgtgcagagaccactgctgagtgtgtggttggaagccgacgccgaggtgcaggcttcacgggctcagccacaggatcctcaacctagacgttcatgtggcgctccagccgcagaccctcaggcttgcatacagctcggcggagggctgctccagtgctctaccgtatgtagtgtgaattcctcatctctgttgctttgtaggtccccagccgtacccgaccgggcacatccccagcgcgtatttttcacacttgacaacgtccaggtcgattttgcatcagccagcggtggacaaggattcctgtaccagccaaaccctcggctagcccctctgtcacgagaagggcctgcccgtccatatcgcctaaagcccggacatgtgctggatgttgagggcgaaggactgaacctggggatctccaaagaggaagttcgagtgcacataggcagaggagaatgtctcgtgaaaacgctgacaagaactcatctctattgcgagcccccagctcatgccccacagcctgccaacggctcaggacttccccagttcgtggtgcaaatgggcaatgtgcaactggcactgggtcctgttcaatatgaggccgaacctccgctcagtgcctttcctgtggaagcacaagctggagtcggaatgggggcagcagtactgattgctgctgtgcttctcttgaccttgatgtacaggcataagtctaagcaggctctgagagactatcagaaggtccttgtgcagctggagagtctagaaacaggcgtgggtgatcagtgccgtaaggagtttacagacttgatgactgagatgaccgatctgagctcagacctcgaagggagcggcatcccttttttagactatagaacatacgcagagcgcgctttcttcccgggacacgggggttgcccgctgcaaccgaagcctgaaggacctggggaagatggccattgtgctacagtcagacaaggacttacgcagctttccaacctgctgaacagtaaactgtttctgctgactctgattcataccctggaggaacagcctagcttttcacaacgcgacagatgtcatgtggctagccttttgagtctggccttgcatggcaaactagagtacttgacggacatcatgaggaccttgctgggcgacctggccgctcactacgtacatagaaacccaaagctcatgctgcgacgcacagaaactatggtggagaaactgctgaccaattggctgtctatttgtctgtatgcattcctacgcgaagtagccggtgaaccactgtatatgcttttccgggcaatccagtatcaggtggataaagggcctgtggacgccgtgacaggcaaagccaagcgtacattaaatgatagccgactcctccgggaagatgtagaattccaacccttaaccctcatggtcttggttgggcctggcgctggaggtgccgcaggtagttctgaaatgcagcgggttcctgccagagtcctggataccgacacaatcacccaggtgaaggagaaggtgttagatcaagtgtacaagggcacaccgttcagccagcgaccaagtgtgcatgccctcgacctagaatggaggagtggcctggcgggtcacctgactctcagtgatgaagatttgacatctgtaacccagaaccactggaagaggcttaacaccctccagcactacaaagtgcctgatggcgcaaccgtcggtctggtacctcaactgcatcggggatccacaatcagccagagtctggcccagaggtgccccctgggcgaaaatatccctacccttgaggatggagaagagggaggggtctgcttatggcacctcgtaaaagccaccgaggagcctgagggtgccaaagtccgatgcagctctctgcgagagcgggagcccgctcgggctaaagccatccctgagatttatctcactaggctgcttagtatgaaaggcacactgcagaaatttgtagatgacacgtttcaggctatcttgtccgtgaatcggcctattcccattgcggtcaaataccttttcgatttgctcgacgaactggccgaaaagcatggaatcgaagaccctggcaccttacatatctggaagactaactctctcctgctgcggttctgggtgaatgcacttaaaaatccacagcttattttcgatgttagggtgagtgataacgtagatgctatcttggctgtcatcgcgcagacgttcatcgacagttgtacaacatcggagcacaaggtgggcagagatagtccagtgaataaactgctgtatgcccgagagatccccaggtacaagcagatggtggaacgctattatgctgatattcgccagtcttccccagccagctaccaggagatgaactccgccctggccgagctgagcgggaattacacctcagctccgcactgcctggaagctcttcaggagttatataatcatatccaccggtactatgaccagatcatcagcgcactcgaagaggatccagtgggacaaaagctgcagcttgcgtgcagactgcagcaagttgctgcactggtagaaaacaaagttactgatctctag

SEQ ID NO: 235256 - DNA, 5798 bp, synthetic construct
  misc_feature 1..5798: note = Description of Artificial Sequence: Synthetic coding sequence
  source 1..5798: mol_type = other DNA
atggaactgacccctgccagcagtctaacgtgcagcctcctgtcccctcgactccctggaagctttccccaactcaggagagtgcccccttgcagtcgaccatggctgccaaaggcccctgttatggcacggtggcctccttttgggctgtgcttgctcctcctgcttctttctcctccacccctgcctctgacgggagctcatcggttttcagccccaaacaccactcttaaccacctagccctggctccaggtcgagggacactttatgtcggcgcagtgaacagactgttccagctgtcgcctgagctccagctggaggccgttgccgtaactggacctgtgatcgactccccagattgcgtgccgttccgcgatcctgcggaatgtccacaggcacagttgaccgataatgccaatcaattgctgcttgtgagttcaagagcgcaagagctcgtggcatgcggccaggtgaggcagggcgtgtgtgaaacccgtcggttgggcgacgtcgctgaggtgctgtatcaagccgaggacccgggagacggccaatttgtggcagcaaacactccaggcgtggctaccgtgggcctggtggtccctctcccgggacgcgaccttttgcttgtcgccaggggactggcagggaaattgtcagccggagtaccacctcttgcgatccgacagctcgctggcagccagcccttttcctctgagggactgggccgactggtggtgggagattttagtgactataacaacagttacgttggcgcattcgctgatgcacgcagtgcgtacttcgtgttccgaaggagaggagccagagcgcaggcggagtaccggagctacgtagcccgtgtgtgcctgggcgataccaacctgtactcttacgtggaggtccctctggcttgccaaggtcagggactcatccaggcagcatttctggcacccggtaccctgctgggcgtcttcgccgctggaccaagaggcacccaggctgccctttgcgcctttcccatggtagagctgggtgcctccatggagcaagcacgcagactgtgttatacagctgggggacggggaccgagcggtgccgaagaggcaacagtcgagtatggagtaacatcgagatgtgtgactctacccctcgatagtccagaatcctacccctgcggcgatgagcataccccatcccccatcgcgggacgacaacctctcgaagtccagccactgctgaaacttgggcagcctgtgtctgccgtcgccgcactgcaagccgatggacacatgatcgcctttcttggggatactcaggggcagctttacaaagtcttcttgcacgggagccagggtcaggtctatcatagccagcaggttgggcctccaggaagcgctatttcgccagatcttctgttagatagttccggaagccacctctacgtcctaaccgcacatcaggtagataggatcccggttgccgcttgcccgcaattcccagactgcgcttcatgcctgcaggcgcaggatcctctttgtgggtggtgcgttttacaaggaaggtgcacacgcaaaggccaatgcggacgggcaggccaactgaatcagtggctttggagttatgaagaagatagtcattgcctgcacatccagtcactgctgcctggccaccacccccgacaggagcaaggtcaggtaactctgtcggtgcccagactgccaatactggacgccgatgaatactttcactgtgcttttggggattacgactctctagcgcatgtggaaggacctcatgttgcttgtgttacccctccacaggatcaagtccccttgaatccacctggtactgaccacgttactgtaccactggctctgatgtttgaggatgtgacggtcgccgcaacaaactttagcttttacgattgctccgccgtgcaggccttggaagctgcagctccctgtcgagcgtgtgtgggaagcatttggcgatgtcactggtgtccccagtcaagtcactgtgtgtacggtgagcactgtccagaaggggagagaaccatatacagtgcgcaagaagtcgatatccaggtaagggggccaggtgcttgcccacaagtagagggtctcgcgggaccccacctcgtaccggtgggctgggaaagtcatcttgcactcagggtacgcaatcttcagcactttcgaggtctgccagcatcctttcattgctggcttgagctgccaggcgagctccggggtctcccagctactctggaagagaccgctggcgattcaggcctcattcattgccaggctcatcagttctacccttccatgagtcagcgggagctgccagtgcccatctacgtcacccagggggaagctcaaaggcttgacaatactcatgctctatacgtaatcctgtatgactgtgcaatgggacacccagattgctcccattgccaagcagcaaaccgcagtctcggatgtctgtggtgcgcagatgggcagcccgcttgtcgctacggacctctgtgcccacccggagccgtggagctgctttgtcccgctcctagcatcgatgcggtggaacctctgaccgggccacccgaaggcggtctggcactgaccatactgggctccaacctaggacgtgccttcgccgacgttcagtacgccgtctctgtggctagccgcccatgtaacccagagcccagtttataccgcaccagcgcaaggattgtctgtgtaacttcacccgctccaaacggcaccactggcccagtgcgggtggccataaaaagccagccaccaggaattagcagtcaacacttcacgtaccaggatccagtgttgctcagcttaagcccgaggtggggaccccaggccggtgggacccagctgactatccggggacaacacctgcagaccggcggtaacaccagtgcttttgttggcggtcagccatgtcccatcctggaacctgtgtgtcctgaggctattgtgtgccggactagaccacaggcggctccaggcgaggccgcagtcctcgtagtgtttggtcatgctcagcgaactctgctcgcttctccctttaggtacacagcaaaccctcaactggttgccgctgaaccttcggcatctttccgcggaggtgggaggttgatacgcgttagggggaccggcctcgacgtcgtgcagagaccattgctgagcgtgtggcttgaggcggatgccgaagtccaagcctcaagggcacagccgcaggaccctcagccccgacgcagttgcggggcaccagccgctgatccacaggcttgtatccagctgggtggtggattgttacagtgctccacagtgtgttcagtcaattcatcttcactcttgctgtgtaggtcccctgctgttccggatcgcgctcaccctcagcgggtatttttcaccctcgacaacgtacaggtggattttgccagcgccagcggaggccagggattcttgtatcaacctaatccccgactcgctcccctgagccgtgaaggaccagctcggccttacagactcaaaccaggccacgttctggatgtggagggggagggtctgaacctggggatatccaaagaagaagtgagagtgcacataggccgtggtgagtgtttagtcaaaactctaacgagaacccacctttactgtgagcccccagcacacgccccacagccagccaacggtagtggcctccctcaattcgtggtacagatgggaaacgttcagcttgccctcggtcccgtgcaatacgaagcagagccccctctgagtgctttccccgtcgaggcgcaggcgggagtgggcatgggagccgctgtactaatcgccgcagtgcttctcctaaccctcatgtatagacataagagtaagcaagcactgcgagactaccagaaggtgctagtccaattggagtcactggaaactggcgtgggagatcagtgcagaaaggagttcaccgacctcatgactgaaatgactgacctttcatccgatcttgaggggagcgggatccccttcttagactacagaacctacgctgagcgggcatttttccccggacacgggggttgtccgttacagccaaagcctgagggacctggtgaggacgggcactgtgctaccgtgagacaaggtttaacccagttaagtaatctgcttaattctaaactgtttctcttgacccttattcacactttagaggaacagccctcattcagtcagcgagatagatgccacgtggcctctttgctgtccctggcactgcatggaaaactagagtaccttacagacattatgaggacactcctcggggacctagccgcacactatgtacacagaaaccctaaattgatgcttcgtaggacagagaccatggtcgagaagctgctgactaactggctctctatctgcctgtatgctttcctgcgcgaggtcgcgggtgaacccttatacatgcttttccgtgccatccagtaccaggtggacaaggggccagtggacgctgtaaccgggaaggcaaaaaggacactgaatgactctcgcctgctgagagaggacgtagaatttcagccccttacgcttatggtgctggtcggccctggggctgggggagccgcaggatcctcagagatgcagagagtacctgcccgtgtgctggataccgacacaatcacccaggtcaaggagaaagtgttggatcaggtctataagggaaccccatttagtcagcggccatccgtccacgctctagacttggagtggagatcgggactggctggacaccttactctgtctgacgaagatctcacttctgtcactcagaatcactggaaaaggctgaataccttgcagcactacaaagtgcctgacggtgcgacagttggactcgtgccgcagctccaccgcggttccactatctcacaatcactcgcccagcggtgccccctgggcgagaacatccccacgttagaggacggagaggaggggggagtttgtctgtggcacctggtgaaggcaacagaggagcccgagggtgctaaagtcagatgctcatcactccgggaacgcgagccagcaagagccaaagccattcccgaaatatatctcactcggctgctcagcatgaagggcacactccagaagtttgtggatgacacctttcaagccattctgtcagtgaaccggcctattcctatagcagtgaagtacctgttcgatttgttggacgagctcgctgagaagcatggcattgaggatccgggaactcttcacatatggaaaactaacagtctgttgctgcgattttgggtcaacgccttaaaaaacccacagttaatttttgacgtcagggtaagcgataatgtcgacgctattctggctgtgattgctcagactttcatcgactcatgcaccacaagcgagcacaaggtgggtcgcgattcccctgttaacaaactgctttacgccagggagattccaagatacaagcagatggtggagaggtactacgccgatatccggcagtccagcccagccagctaccaagaaatgaactccgcactagccgaactctcgggtaattatacctcagcaccgcactgcctggaggcccttcaggagctatataatcatatccaccgttattatgaccagattatttccgcactggaggaggacccggtgggacagaaattgcagctggcttgccggctgcagcaagttgccgctctggtggaaaataaggtaactgacctgta

SEQ ID NO: 235257 - DNA, 5777 bp, synthetic construct
  misc_feature 1..5777: note = Description of Artificial Sequence: Synthetic coding sequence
  source 1..5777: mol_type = other DNA
atggctccgcgtgccgctggaggcgcacccttaagcgccagagctgccgcagccagtcccccaccttttcagacccctccacggtgtccggtcccgctgttgctcctcctgttgctgggcgctgcccgagctggagccttagaaatccagcggagattcccatcccccacgcccaccaacaattttgcattggacggtgcagccggtacagtgtacctcgcggcagtgaacaggctgtatcagctctccggcgcaaacctgagtctggaggcagaggccgctgtcgggccagttcccgatagtcccctctgtcatgcaccgcaactcccgcaggccagctgcgagcaccccaggagattaactgacaactataataaaatccttcaactggatccaggccagggactcgtcgtggtttgtggatcaatttaccaaggattctgtcagttacgcagacgcggaaacatctcagctgtcgccgtccggtttccaccagcagccccaccagccgagcccgttacagtattcccttccatgctaaacgtcgctgctaaccatccaaatgcttccaccgtgggtcttgttcttcctcctgctgcaggggctggaggaagtaggctgttagtgggtgctacctacaccggctacgggtcctcattttttccacggaaccgctctctagaggaccatagattcgaaaatactcctgagatcgccattagatcactggatacacggggagatctcgcgaagctgttcaccttcgatctcaacccatcagatgacaatatactcaaaattaaacagggcgctaaggagcaacacaagttgggctttgtgtctgcttttctgcatccctccgatccacctcctggggctcagtcctacgcttatttggccctaaacagcgaggcccgtgctggcgacaaggagtcccaggccaggagcctgctggcccgaatatgcctcccacatggagctggcggagacgcaaaaaaactgacggagagctatatacagctggggctacaatgcgctggcggagccggacgtggcgacctttactcgaggctggtgagtgtgttccctgcccgagagaggctctttgcagtcttcgagagacctcaaggtagccccgctgcccgagccgcaccggctgccttgtgcgcgttccggtttgctgatgtgcgggctgccattcgcgcagccaggaccgcatgttttgtggaaccagccccagacgtggtggcagtgttggacagtgtggtgcagggaactggacctgcctgcgagagaaaactgaacatccaactacagccggaacaactggactgtggcgcagcccatctccagcatcccctcagcatcctccaacccctaaaggctacccccgtgttcagggcccctggcctcacttctgttgctgtggcgagcgtgaataactataccgcggtgttcttaggtacggtaaatgggaggctgttaaagattaatctcaatgagagcatgcaggtggtttctcggagagtcgtgactgttgcatacggcgagccagttcatcacgtcatgcagttcgatcctgccgattccggatatctgtacctcatgacctcccatcagatggctagagtaaaagttgcagcgtgtaatgtgcactcgacatgcggcgactgtgtgggagccgctgatgcatactgcggttggtgtgccctagaaacccggtgcactctgcaacaagattgcacaaattcgagtcagcaacacttttggacatccgcatcagagggtccttcacgctgtccagccatgaccgtgctgccttccgagattgatgtgagacaggaatatcccggaatgatcttacagattagcggctccctcccgtcactatccggaatggagatggcatgcgattatggaaataatattaggactgtcgcacgcgtgccagggcctgcctttggtcatcagatcgcctattgcaatctcctgccccgagatcagtttccgccttttccccctaaccaggatcacgtgaccgtcgagatgagcgtcagggtcaatggtcggaatatcgtgaaggcgaactttacaatttacgactgttcacgcacggcccaggtctacccacacaccgcatgcacaagttgtctgtccgcacagtggccctgcttctggtgctcacagcaacactcgtgcgtgtctaatcaaagtagatgtgaagcttcgcccaatcccacaagcccacaggattgcccgaggacattattgagccccttagcaccagtgcctacgggcggttcccagaatattctggttcctctggcgaacacggccttctttcagggcgcagccctcgagtgtagttttggtctggaggaaatttttgaggccgtctgggttaacgaatccgtggtccggtgtgaccaggttgtgcttcacaccactcgtaagtcacaagtttttccattgtccctgcagttgaagggtaggcccgctcggtttttggattccccggaaccaatgacagtgatggtgtacaattgcgcgatgggcagccctgactgttcccaatgcttgggcagggaagatctgggccacctgtgtatgtggagtgatggctgccgcctgcggggaccactgcagccaatggcaggaacttgccctgctcctgagatccacgctatcgagccactgtccggccctctggacggcggtacgctactaacgatccgcggacggaatctgggaagaagactctccgatgtagcccacggcgtctggatcggcggtgtggcttgcgagcctctcccagacagatacacagtgtctgaggaaattgtatgtgtgacaggcccagcccctggacctctttcgggcgttgtgaccgtgaacgccagcaaggagggaaagtccagggacagattttcctacgttctacccctggtgcactctcttgagcctaccatgggcccaaaggccggaggtacccggatcacaatccacggaaatgacctccacgtgggttccgagctgcaggttctcgtgaacgacaccgacccttgtacagagctcatgagaaccgatacgtctatcgcctgtacaatgcccgaaggggctctccccgctccagtacccgtgtgtgtgcggtttgaacgacgaggttgtgttcatggaaacctcaccttttggtatatgcagaaccctgtcatcacggcgataagccctcggagatcccctgtgagcggaggaaggacaataactgtcgctggagaaagatttcacatggtgcagaacgtgtcaatggccgtacaccacataggtcgggagccgaccctctgtaaagtcctcaattccactctaattacctgtccctcacctggagccttatccaacgcaagcgcacccgtcgacttctttataaatgggagggcctacgctgatgaggtggcagtggctgaagagctcctcgaccccgaggaggcacaaagagggagcagatttcgcctggattatctgcccaatccccagttctccaccgccaagcgcgaaaagtggataaaacaccatcctggcgaaccacttactctcgtgattcacaaggagcaggatagccttggcctccagagtcatgagtaccgcgtaaaaatcggacaggttagctgtgacatacagatcgtctctgatcgcataattcactgttccgtcaatgagagccttggggcagccgttgggcaactgcctattacgattcaggtggggaacttcaatcagacaatcgcaactttgcagctcggcggtagtgagacagcaattatcgtttccattgtcatctgtagcgtgctgttgctgctgtccgtggtggctctctttgtattttgcaccaaaagccgacgcgctgaacgatactggcagaaaactctgctgcaaatggaagagatggagtcgcagataagggaagaaatccgcaaaggcttcgccgagctgcagaccgacatgactgatttaactaaggaactgaacagaagtcaggggatcccattcctggagtataaacacttcgtgactcgcacattttttccaaagtgcagctccttgtatgaggaacgatacgtccttccatcacagaccttgaactcacagggttcgtctcaggcccaagagactcaccctcttcttggagaatggaagatccctgagagctgcaggccgaacatggaagaaggtatttcactcttctcttcgctcctcaataataaacacttcctcatagtgtttgttcacgccctggaacagcagaaagactttgccgtgagggataggtgttcccttgcctccttactcaccatcgccctgcatgggaagctggaatattacacctctatcatgaaagagctgctcgtggacctcatagatgcctctgctgccaaaaatccaaagcttatgctcagaagaaccgagtccgtcgtcgagaagatgctaacaaattggatgtccatatgtatgtactcttgcttgcgagagacagtcggcgagcctttcttccttctgctgtgcgcaataaagcagcaaattaacaaaggttcaattgacgccataacaggtaaagccaggtacaccttgagcgaagagtggctcctgagagagaacattgaggccaagccgagaaacctaaatgtgagcttccagggctgcggaatggactcactgtctgtgagggcaatggatactgatacactcacccaggtcaaagagaagatactcgaggcgttttgtaagaacgtcccttactctcagtggccaagagcagaagatgtagacttggaatggttcgctagttccacacaaagttacatacttcgggatctggatgacacatctgtggtcgaggatggccgtaagaaattgaatacactcgctcattacaaaattccggagggagcgagcttggccatgtcactgattgacaagaaggacaacacactgggcagagttaaggacttggacaccgagaagtattttcacctggtactgcccacagacgaactagctgaacctaagaaatcccatcgccagtcacaccgtaaaaaagtgctgccagagatatacctgactcgccttctcagcaccaaaggcactcttcagaaatttttagatgatctgttcaaagcaattctgtccatccgggaagataagcctccactcgcagtgaagtatttctttgactttctcgaagagcaagccgaaaagcggggaattagtgatcccgacacgctgcatatttggaagactaattccctgccacttcgattttgggttaatatcctgaaaaaccctcagtttgtcttcgatatcgataaaaccgaccacatcgacgcatgcctgagcgtgatagcccaggcattcatagatgcatgcagcatcagcgatctgcagctcggaaaagactctcccactaataaactactgtatgccaaggagatccctgaatatcgaaagattgtgcagcgctattacaaacaaattcaggacatgacgcccctgtccgaacaggaaatgaacgcccatctcgctgaagagtcacggaagtaccaaaacgagtttaatactaatgtggctatggcggaaatttataaatacgctaagagatatcgtccccagataatggcagccttagaggctaaccccacagcgaggcggactcaacttcaacacaagtttgagcaagtggtggccctgatggaggacaatatctacgagtgctactctgaggccta

SEQ ID NO: 235258 - DNA, 5357 bp, synthetic construct
  misc_feature 1..5357: note = Description of Artificial Sequence: Synthetic coding sequence
  source 1..5357: mol_type = other DNA
atggccccaagagccgctggaggcgcaccactgtcggcccgagccgcagcagcctccccacctcccttccagactccgcctcgatgtccggtaccactcttgctgcttctgctgcttggagccgcacgggcaggagcacttgaaatccagaggcggttccccagtccaaccccgaccaataatttcgcactcgacggagctgccggtacagtctatctcgctgctgttaatagactctaccaattgtctggcgcaaacctgtcattggaggccgaagcagccgtaggaccagtgcctgatagccctctctgccacgccccacagctgcctcaggcttcctgcgagcaccctaggcgtctgacagataactacaacaaaatacttcaactggaccctggccagggcctcgtggttgtctgcggaagcatctaccagggattctgtcagctgcgtaggcgaggcaatatctccgctgtagccgttcgcttccccccagctgctccgcctgctgagcccgtgactgtgtttccaagtatgctgaacgtggcagccaaccacccaaatgcgtctactgtcggattagtgttgcctcctgctgccggtgctgggggaagcagactcctggtgggggcaacgtatacggggtatgggtcatcctttttccccagaaaccggtcattggaagatcatcgattcgaaaatacgcccgaaatcgccatccgaagcttggataccaggggtgatctggctaaactgtttacgttcgacctcaatccatcagatgataacatactgaagattaagcagggcgcaaaggagcaacacaagttgggattcgtatcagcattcctgcatccttcggatccacctccaggcgcacaaagttatgcttatcttgccctgaacagtgaggcacgggctggtgacaaagaaagccaagctagatctttgctggcccgaatctgtcttccgcatggcgctgggggagacgccaaaaaactaacagagagctatatccagctggggctccagtgtgctgggggtgccggacgaggggacctgtactctcgactggtaagtgtgtttcccgcacgagaaagattgttcgcagtgttcgagaggcctcagggaagcccagccgcacgagccgcacctgccgcattatgcgctttcaggtttgcggacgtacgggctgcaatcagagctgcgagaacggcttgctttgttgagccagctccagacgttgtcgctgttttagatagcgtcgtacaaggtaccggcccagcttgcgagagaaaactcaatatccagctccagccggagcagctggactgtggcgctgcccacttgcagcacccactgtctattctccagccattgaaagctacaccggtctttagagcccctggcctgacctcggtggccgtcgcttccgttaacaactatactgccgtcttcctcggcacggtgaatgggcgtttgctgaaaatcaacctgaacgagtctatgcaggtggtgagtagacgtgtggtaacagttgcgtacggagagcccgtgcaccacgtcatgcagtttgacccagcagattctggctacctctaccttatgacctcccatcagatggcaagggtcaaggtggccgcttgcaatgttcattctacgtgtggtgactgcgtgggggcagcggatgcctattgcggctggtgcgctctggagactagatgcactctccaacaggactgcaccaactctagccaacagcatttttggacaagtgccagcgaggggccaagcagatgcccggcaatgaccgtgcttccatccgaaatcgacgttaggcaggagtatcccggaatgattttacaaatttccggaagtctcccgtccctaagcggaatggaaatggcatgcgactacggcaataatatacgtacggtcgccagggtcccaggccctgccttcggtcaccaaatagcctattgtaatctgttgccgagggaccagtttcctccattccccccaaaccaggatcacgtcactgtggaaatgagtgtccgcgtgaatgggcgaaatattgtaaaggccaattttacaatatacgattgctctcggaccgcccaagtataccctcacactgcatgtacatcgtgcctctctgctcaatggccttgtttttggtgtagccagcaacactcctgcgtctccaatcagagtaggtgcgaggcgtccccgaatcctacatccccccaagactgtcccaggaccttattgtcaccgctcgcaccagtgccaactggcggttcccagaacattctggtgcctctggctaacactgccttctttcagggcgctgccctcgagtgcagctttgggctggaggagatcttcgaggccgtctgggtaaatgagtcagttgtgcggtgtgaccaggtagtccttcacacgactaggaagtcccaggtctttcccttgtcattgcagctgaagggacgccctgcacggttcttggattcaccagaacccatgactgtgatggtctacaactgcgccatgggcagcccggactgcagccagtgtctagggagagaggacctgggacacctttgcatgtggtctgacggctgccgactgcgcggaccattacagcccatggccggtacctgccctgcaccagaaatccacgccatcgagccgttaagcggaccactggacggaggcaccctgctgaccattcgcggtcgcaatctcggcagacggcttagcgacgtggcccatggcgtgtggattggaggcgtggcttgcgaaccactgcctgacaggtataccgtgtccgaagaaattgtatgtgtgacgggccctgcacccggtcccctctccggtgtggttacggtaaatgctagtaaggaaggcaaaagccgggaccgcttcagttacgtgctgcctttggtgcatagcttggagccgacgatgggaccaaaggccggaggaacacgcatcaccatccacggcaatgatctgcatgtgggttcggagctgcaagtgcttgttaacgacacggacccttgtaccgagctcatgagaacggacaccagcatcgcctgcactatgcctgagggcgcactgccagcccctgtgcccgtgtgcgtgcgatttgaacgtcgagggtgcgtccacggcaatttgacattctggtacatgcagaatcccgtcattacagccatttcgcccagaagatcgcctgtgtccggcggtcggacgataactgtcgcgggtgaacggttccatatggttcagaacgtgagtatggctgtgcatcatatcgggagagagcctacactctgcaaagtcctgaactccacactgattacttgccccagtccaggcgctttgtccaatgcctccgccccagtggactttttcatcaatgggcgagcttacgctgatgaggttgctgttgcagaagagttactcgacccagaggaagcccagcgcggatctcgcttccgattagattatcttcccaacccacagttctcaactgctaagcgcgagaagtggataaagcaccatcctggagagccgttgactcttgtgatccacaaggaacaagattctctgggtctgcagagtcatgagtatagagtaaagatcggacaagtgtcatgcgatattcagatcgtgagtgacagaataatccactgttctgtaaatgagagcttgggcgctgctgttggacagctgcctatcacgatccaggtcggtaacttcaatcaaaccatcgctactttacagttaggaggatccgaaacagcaattattgtttccattgtgatatgcagcgttcttctcctgctcagcgtcgtggcactgtttgtcttttgtacaaagagcagacgggctgaacggtactggcagaagaccctgctgcaaatggaggagatggagtctcagattcgtgaggagattcgaaaagggtttgccgagctccaaaccgatatgacggatctcaccaaggagctcaaccgtagccaggggatcccctttcttgaatacaaacatttcgtgacacgtaccttttttccaaagtgcagtagcctgtatgaggagagatatgtgctgccgtcacagaccttgaattcccaagggtcttcgcaggcacaagagactcaccctctgctgggagagtggaagatccccgagtcctgccgaccgaacatggaggagggaatatccctgttttccagcctgttgaacaataaacattttctcatcgttttcgtgcacgcgctggagcaacagaaggactttgccgtccgagatcgatgttcgctggcctcgcttttgaccatcgccttgcacggcaaactggaatattacaccagcattatgaaagagctactagttgatttaattgacgcctctgcggcaaagaacccaaaattaatgctgcggcgtacagagtctgttgtggagaagatgttaaccaactggatgtccatttgtatgtattcctgtcttagggagaccgttggagagccctttttcctgcttctatgtgcgattaaacagcagatcaataagggtagcattgatgccatcactggcaaggcacgatacaccctgtctgaggagtggttgctccgagagaatattgaagcaaagccaaggaatctcaatgtatcctttcaggggtgcgggatggactccttatcggtgcgcgcaatggacaccgataccctgacacaagttaaggaaaagatactggaggctttttgtaagaatgtcccttactcccagtggccacgtgctgaagatgtggacctcgagtggtttgcatccagcactcagtcctacattttacgggacctggatgatacgtctgtggttgaagacgggaggaaaaagttgaatacccttgctcactacaagatccccgaaggcgcatcgctggcgatgtcccttatcgataaaaaggataacactctcggtcgggtcaaagatttggacaccgaaaaatattttcacctcgttttgcccactgacgagctggcagaaccaaaaaagagccatcgccagtcccacaggaagaaagttctgccagagatctacctgactcggctgctcagcactaaggggactctgcagaaattcttggatgacttatttaaggctatacttagcatacgagaggataaacctcccctggcagtgaagtacttttttgattttctggaagagcaggccgaaaagcggggaatctccgaccctgacaccctccacatttggaaaacaaataggtggagaccaagcagtcccgtcctcggagaacaccccgaggagcctccggtgtgcttata

SEQ ID NO: 235259 - DNA, 1503 bp, synthetic construct
  misc_feature 1..1503: note = Description of Artificial Sequence: Synthetic coding sequence
  source 1..1503: mol_type = other DNA
atgcgcggtgaactgtggttactggtgctggttttaagggaggcagcccgagctctctccccccaacccggtgccggacacgacgagggtcccggatctgggtgggccgctaagggcacggtgagagggtggaaccggagagcacgagaatctccaggccacgtatccgaacccgacaggacccaactcagtcaggatctggggggtggaaccctcgccatggacacgctgcccgataaccgcacacgcgtggtagaggataaccacagttattacgtgtcacgtctttacggcccttctgagcctcacagtcgcgagctgtgggttgatgtggcggaagccaaccgtagtcaggtcaagattcacacgatcctaagcaacactcaccgccaggcttcccgcgtcgtcctgtccttcgatttccctttctacggacaccccctgcgccagattacgatcgctacaggtggttttatattcatgggagatgtgatccacaggatgctgacagctacccagtacgtcgcacccctcatggccaactttaaccctggctatagtgataattcaactgtggtgtactttgataacgggaccgtgtttgtggtgcagtgggaccacgtttatttacaggggtgggaagacaagggatcattcacattccaggctgccctgcaccacgatggaagaatcgtgtttgcatacaaggagatcccaatgagtgtgccagagatcagttcttcccagcaccctgttaagaccggcttgagcgatgcattcatgatccttaacccgagccccgatgtcccggagagccggagaagaagtatcttcgaataccaccgtatcgaactggacccatcaaaagtgacatcaatgtctgccgttgagttcactcccctgccgacttgcctccagcatcggagttgcgatgcttgtatgtcaagtgaccttaccttcaactgcagctggtgccacgttctgcaaagatgcagcagtgggtttgataggtatcgtcaggagtggatggactacggctgtgcccaggaagcagaagggcgaatgtgcgaggacttccaggatgaagatcatgatagcgccagccccgacacaagttttagtccctatgatggggacctaacgacgactagtagctccctgtttatcgactcactgactacagaggatgacacaaagctgaatccctacgccggaggcgacggcctgcaaaataacttatctcccaagaccaaaggcactcctgtgcacctcggcacaatagtggggatcgtcctggctgttttactggtagccgcaatcatcttggctggcatctacataaatggccaccccacctctaatgccgcactgtttttcatcgaacggagaccgcaccactggcctgcaatgaagtttaggtctcatcccgatcactccacgtacgccgaggttgaacccagcgggcatgagaaagaagggtttatggaggctgagcagtgctag

SEQ ID NO: 235260 - DNA, 1014 bp, synthetic construct
  misc_feature 1..1014: note = Description of Artificial Sequence: Synthetic coding sequence
  source 1..1014: mol_type = other DNA
atgcggggagagttgtggttgctggtgctcgttctccgggaggccgctagagccctgtcacctcagccaggggcaggccatgacgaaggccctggatctggatgggctgccaagggaaccgtccgcggatggaaccgcagagctagagagtcccctggccatgtgtccgagccggatcggacccagctgagtcaggacctgggaggaggcaccctcgctatggacacactccccgacaaccgaaccagagtggtggaggacaatcactcgtactacgtgagtaggctgtacggaccttccgagccgcactcgagagagctctgggtggatgttgccgaagctaatagatcgcaagttaagatacacaccattctgagcaacactcacagacaggccagccgggtggtgcttagtttcgacttcccattctatggacatccccttcgtcagattactatcgccacaggtggcttcatcttcatgggtgacgtcatccaccggatgttgacagctacacagtacgtggccccattaatggccaatttcaatccagggtactctgataactccacagtcgtgtactttgacaatggaacagttttcgtggtgcagtgggatcacgtctacctgcagggttgggaggacaaggggagtttcactttccaagctgcacttcaccacgacggtcggatagtctttgcatacaaagagatccccatgtccgtgccagagatctcaagcagccagcatcctgtaaaaactggcctatcagacgcattcatgatcctgaaccctagcccggacgttcccgaaagccgacggagatcaatattcgaatatcaccgcatcgagttagacccatctaaggtgacatctatgagtgccgtcgaattcacaccgctgcctacttgtctgcaacatcggtcatgcgatgcttgcatgtcttccgatctcactttcaactgttcctggtgccatgtcctgcagagccgcgatgaggtaagcccgtgctag

SEQ ID NO: 235261 - DNA, 1284 bp, synthetic construct
  misc_feature 1..1284: note = Description of Artificial Sequence: Synthetic coding sequence
  source 1..1284: mol_type = other DNA
atggatacgctgccagataatcgcactcgggttgtcgaggacaatcactcctattacgtgtcccgcctatacggaccctccgagccacattccagagaactctgggtcgacgtggccgaggcaaaccgctctcaagtcaagatacataccatactctcaaacacccatcgccaggcaagtagggtggtgctcagcttcgatttccccttctacggccatcccctgagacaaattactatcgcgaccggcggatttattttcatgggtgacgtcatccatagaatgctgacagcaacgcagtacgtggccccactgatggctaacttcaatcccggatactccgacaactctacagtggtgtactttgacaatgggacggttttcgtcgtacagtgggatcatgtgtatctgcagggatgggaggacaagggaagcttcaccttccaggccgcactacatcacgatggtcgcatcgtgttcgcctacaaggaaattccaatgagcgtgccggagattagcagcagtcaacatccagtgaaaaccggcctttccgacgcctttatgattcttaatccatccccggacgttccagagagcaggagaagatcaatattcgaatatcatcggattgaattggacccctccaaggtcacctctatgtcagcagtagagttcacccctttgcctacatgcctgcagcacaggagctgtgatgcgtgtatgagtagcgacttgactttcaattgttcttggtgccacgtactgcagcgttctttgaataaccaagatgagaacacctacgtgaactgccttgatagccagcaatgtcacgggtcatcagaaagcaggcggccattccaagacgaggatcatgactccgcgtcgcccgacacttcttttagcccttacgacggtgaccttaccaccacttcctcctctttgtttatcgatagtctcacaacagaggacgacactaagttaaacccgtatgccggtggggatggtttgcaaaataatctctctcctaaaacaaagggtactcccgtgcacctgggaaccattgtcggaattgtacttgctgtgctgcttgtcgcggcaataattttagccggtatttacatcaatggccaccctacctcaaacgccgctctgttctttatcgagcgcagaccacaccactggcccgcaatgaagtttcgaagtcaccccgatcacagcacgtatgccgaggtcgaacctagcggccacgagaaggagggttttatggaagctgagcagtgttag

SEQ ID NO: 235262 - DNA, 375 bp, synthetic construct
  misc_feature 1..375: note = Description of Artificial Sequence: Synthetic coding sequence
  source 1..375: mol_type = other DNA
atggacactctcccagataaccggacgcgggtggtggaggataaccacagctattatgtgagcaggctgtatggtccatctgaaccacactccagggagctatgggtggatgtggcagaagccaaccggagccaggtcaagatccacactatcttgagcaatacacataggcaggcttctagggttgtactgtctttcgactttcctttctacggacatcccctgcggcagatcaccatcgccaccggcggattcatcttcatgggggacgtgatccataggatgttgaccgccacccagtatgttgcacctctaatggccaattttaatcctggatactcagacaactcaaccgtggtctactttgacaactag

SEQ ID NO: 235263 - DNA, 669 bp, synthetic construct
  misc_feature 1..669: note = Description of Artificial Sequence: Synthetic coding sequence
  source 1..669: mol_type = other DNA
atggacacactgcctgataaccgaacccgggtcgtggaagacaatcactcctactatgtctctcggttgtacggcccttccgaacctcatagcagggagctatgggtggatgtcgccgaggccaataggagccaggtgaagattcacactatattaagcaacacgcacagacaagcttccagagtcgtcctgtctttcgattttccgttttacggccacccattgaggcagataactatcgcaactggcggtttcatctttatgggtgacgtgatacaccgtatgttgaccgccactcaatatgttgctccactgatggccaactttaaccctgggtattctgacaactctaccgtcgtctattttgacaacggcaccgtgttcgtggttcagtgggaccatgtgtatctccagggctgggaggacaaaggtagctttacttttcaagcagccttgcaccatgacgggagaatcgtgtttgcctataaagagatccccatgtcagtgccagaaataagtagttcccagcatcctgtcaaaaccggcctcagcgacgcgttcatgattcttaacccttcccccgatgtgcccgaatccaggaggcgcagcatcttcgaataccatcggatcgaattggacccaagtaaagtgaccagcatgtccgcatag

SEQ ID NO: 235264 - DNA, 198 bp, synthetic construct
  misc_feature 1..198: note = Description of Artificial Sequence: Synthetic coding sequence
  source 1..198: mol_type = other DNA
tgatcatttacctttcaagctgcacttcatcacgacggccgaattgtttttgcttacaaggagatacccatgtctgtgcctgagatctcctccagccagcaccccgtgaaaaccggtcttagcgacgcattcatgatccttaaccctagccccgacgtacctggcttcagcgctgaaagcgccaaacacttgtggtag

SEQ ID NO: 235265 - DNA, 1383 bp, synthetic construct
  misc_feature 1..1383: note = Description of Artificial Sequence: Synthetic coding sequence
  source 1..1383: mol_type = other DNA
atggccctgagcgttcgaaccctaccgcttcgcggtttcctcgttccgcgtccacagcccactcgttcccaggacgcaccctccccgagactgcccctttctagcgctccagccccttgcagacacaaaaatgaagaagacaatcatagttattacgtgtccaggctatatgggcctagcgaaccccattcgagagagctctgggttgatgtggcggaggctaatcggtcacaggtgaagatacatacaattcttagcaatacccataggcaggcgagccgcgtagtgctgtcattcgattttccattctatgggcaccctctccgccagattacaatagccaccggtggctttatatttatgggcgacgtgattcataggatgctgactgctactcagtacgttgccccattgatggctaatttcaatcctggatacagtgacaatagcacagtagtatacttcgataatggcactgtatttgtggttcaatgggaccacgtgtatctgcaaggttgggaggataaaggatcatttacttttcaggccgcattgcaccatgacggcaggatcgtgttcgcttacaaggagatccctatgtccgtcccggaaatatccagctcacagcatcccgtgaagacaggcttgagtgatgccttcatgatattaaaccctagccccgacgtgcctgagtctcggagaagatcgattttcgagtatcacagaatcgagcttgatccaagcaaagtgacctctatgagcgcggtggaatttactccactccccacctgtctgcaacatcgctcctgcgacgcgtgtatgtcctcagacctgacattcaattgctcatggtgccatgttcttcagagatgctcttctgggtttgaccggtacagacaggaatggatggactatggctgcgctcaggaagccgagggacgtatgtgtgaagacttccaggatgaagaccacgactccgcctccccggacacgtccttcagcccatacgacggcgatctgaccaccacaagctcttctctgttcatcgattcattgacgaccgaggacgataccaagttaaatccctatgccggaggtgatgggctccaaaacaacctgtcacctaagactaaaggaacccctgtccatttgggaactatagtcggcattgtgctggccgttctgttggttgctgctattattttggccggaatatatatcaacgggcacccgacaagcaatgctgccctattctttatcgaacgccgtccacaccactggcctgccatgaaattccgttctcaccctgatcattccacatacgccgaggttgagccctccggacacgaaaaagaggggtttatggaggcagagcagtgttag

SEQ ID NO: 235266 - DNA, 723 bp, synthetic construct
  misc_feature 1..723: note = Description of Artificial Sequence: Synthetic coding sequence
  source 1..723: mol_type = other DNA
atggacaccctacctgataaccggacccgcgtggttgaagataatcactcttactatgtttccaggctatacggaccctcggagccacactcgcgagagctctgggtagatgtggcagaagctaatcgcagccaagtgaagattcatacaattctgtctaacactcacagacaagcaagtcgggtggttctgagctttgatttcccgttttacggccacccactacgccagatcactatagctacggggggatttatcttcatgggggatgtgattcacaggatgctcaccgccacgcaatatgtggcacccctcatggccaattttaaccccggatatagcgacaactcgaccgtggtgtactttgacaacggcacagtgtttgtggtccagtgggatcacgtctacctacaagggtgggaagacaaaggtagcttcacattccaggcagccctgcaccacgacggtcgcatcgtgttcgcttataaagagatcccaatgtccgtccccgagatatcctcttctcagcacccggttaagaccgggttgagcgacgcctttatgatcctcaacccctctcccgatgtgcccgaatcacggaggagatcaatctttgagtatcatcggattgagttagacccgagtaaagtgacatccatgtccgccgttgagttcactccattgcctagccctagtactacccgcatgaagacaaggatgtag

SEQ ID NO: 235267 - DNA, 1179 bp, synthetic construct
  misc_feature 1..1179: note = Description of Artificial Sequence: Synthetic coding sequence
  source 1..1179: mol_type = other DNA
atggagaaagacaaggtcaagatccacgggattctgtcaaacactcaccgacaggccgctcgggtcaatctgagttttgactttcctttttacggccattttctgagagagattacggtggcgaccggcggttttatttacactggcgaagtggtgcacagaatgctgacggctactcagtacatagcccctctgatggctaattttgaccctagcgtaagtagaaatagtaccgtgagatattttgataacggtacggccctggttgttcagtgggatcacgtacacctccaggacaattacaatttgggcagttttacctttcaagctacactactaatggacgggaggataattttcggatataaagaaatccccgttctggtaactcagatctctagtacgaatcatcctgtgaaagtgggactgtcagatgctttcgttgtcgtgcaccggattcagcagattccgaacgtcaggaggaggaccatttatgaatatcatcgggtcgagctgcagatgagtaagatcacgaacatctccgctgtcgagatgactcctttacctacctgtctccagttcaatcggtgcggcccatgcgtttctagccagatcgggtttaattgctcctggtgcagtaagttacagcggtgttccagtgggtttgacaggcaccggcaagactgggtggactcaggctgccccgaggagtcgaaggagaagatgtgtgagaacaccgaacctgtggaaacgagcagcagaacgaccaccactgtgggcgcaacaacaactcagttcagagtgctcacgacaaccaggagagccgtcaccagtcagtttccgaccagtctccccacggaggacgatacaaagatcgcgctgcatcttaaggacaacggagcttctaccgacgactccgcagccgaaaaaaaggggggtacactccatgcaggccttatcattggcattctgatcctggtactgatagtggcaaccgcgatcttggtgacagtgtacatgtaccatcatcctacaagtgccgcatccatcttctttattgagcgacgcccaagtcggtggcccgcaatgaagttccgacgcggatccggccacccagcgtatgccgaagtggaaccagttggcgaaaaagaaggattcatcgtgagcgagcaatgctag

SEQ ID NO: 235268 - DNA, 1443 bp, synthetic construct
  misc_feature 1..1443: note = Description of Artificial Sequence: Synthetic coding sequence
  source 1..1443: mol_type = other DNA
atggcccgattccctaaggcagacctagccgcagctggtgtaatgctgctctgccacttcttcactgaccaattccagtttgctgacggcaaacctggtgaccagatcttggactggcagtatggcgtgacacaggcattcccacacaccgaggaggaagtggaggtcgattcccacgcttactcccaccgttggaagaggaatttagacttcctcaaggccgttgatacgaatagagcgagcgtcgggcaagatagcccggagccccgtagtttcacagacttattactggacgacggccaggataataatactcagatagagagggtcaacttaagttttgactttccattctacggtcatttcctaagggaaatcaccgtagccaccggcggattcatctacacgggcgaggtggtgcaccgtatgcttaccgccacccaatatattgctcccctcatggcaaactttgaccccagcgtgtcaaggaacagcactgtgagatatttcgataacggaaccgcactggttgtccagtgggaccacgtacacttgcaggataattacaacttaggaagttttacctttcaggcaaccctgttaatggatggccgaatcatctttggttataaagagattccagttctagtaacccaaatatcttcgactaaccacccagtgaaagtcggcttatccgacgcttttgtcgtcgtccatcgtattcaacaaatcccaaacgtccgaaggcgcacaatttatgaataccacagggttgagctccagatgtctaagattactaatatatccgctgttgaaatgacaccccttccaacatgcttgcagtttaatcgatgcggaccttgtgtgtcatcacagatcggtttcaactgttcctggtgtagtaagttacagcgctgtagctcgggctttgaccgtcaccgacaggactgggtagactctggatgccctgaagagtctaaggaaaagatgtgcgagaacacggagcccgtcgagacctcttcacggaccacgaccaccgttggggctacaaccacgcagtttcgggtgctgacaaccacacggcgtgccgtgacttcccagttcccgacttcgttgcctaccgaagacgataccaagatcgctctccacctgaaggataatggagcgtcaacggatgattctgcagctgaaaagaagggcggaacgctgcacgccggactgataattggaatcctcatactggtcctgattgtcgcgacagccatattggttacagtgtatatgtatcaccacccaacatcagctgccagcatcttttttatcgagcgtcgcccaagtcgttggcctgctatgaagttccggaggggaagcgggcatccggcttacgcggaggtggagcccgtgggtgagaaagaaggtttcattgtgagcgaacagtgttag

SEQ ID NO: 235269 - DNA, 1590 bp, synthetic construct
  misc_feature 1..1590: note = Description of Artificial Sequence: Synthetic coding sequence
  source 1..1590: mol_type = other DNA
atggccagatttcccaaggctgacttagctgctgccggagtcatgcttctctgccactttttcacagatcagttccagtttgctgacgggaagccaggcgaccagatcctcgactggcaatacggcgtaacgcaagcatttccccatacagaagaggaagttgaggttgattcacacgcgtactctcatcggtggaagcgcaatctggacttcttgaaggccgtggatacaaaccgagcttccgtagggcaggacagccccgagcctcggtcattcaccgatctcctcttggatgatggccaagataacaatacccagattgaggaggacaccgaccataactattatatatcccgaatttacggccctagcgactctgctagcagagacctttgggttaatatcgaccagatggagaaggacaaagttaagattcatggtatcctgtcaaacacccaccgacaggccgcaagagtgaatttgtccttcgacttccccttttacgggcattttctgcgtgagatcacagtggcaaccggaggctttatatataccggagaggtcgtgcaccggatgctgacagctacccagtatatcgcaccactcatggcaaacttcgatcctagtgtttcccgaaattccacagtgcggtatttcgacaatgggacagcccttgtggtccaatgggatcatgtgcacttgcaggacaactacaacctggggagtttcacatttcaggccaccttactcatggacggccgtatcatttttgggtacaaggaaatccctgtgttggtgacccagattagctcaaccaaccacccagtcaaggtcggcctctctgacgctttcgtggtggtacacagaatccaacagataccgaacgttcgtaggcgcacaatttatgagtatcatcgcgtggaactgcagatgagcaagattaccaatatttctgctgtggagatgacccctcttcctacctgtttgcagtttaacaggtgtggcccttgtgttagctcacagataggcttcaattgcagctggtgtagtaaattgcagcggtgtagctctgggtttgatagacaccgccaagactgggtggatagcggttgccctgaggagtcaaaagagaaaatgtgcgaaaataccgagcctgtggagaccagtagtcgcacaaccaccactgtgggcgctacgaccactcaattccgtgttctgacgacgaccaggagagctgttacaagtcaatttcccacttccctgccgacagaagacgacacaaaaatcgctctgcacctgaaggacaatggtgcgtcaacagatgatagcgctgccgaaaagaagggcggtacactgcacgccggattgataatcggcatcctcattctcgtgctcatcgtagccaccgctatcctcgtaacagtgtacatgtatcaccatccaaccagcgccgcatctatcttcttcatcgaaaggaggccatctcggtggcccgcaatgaagttcagacggggatcaggacatccggcttacgccgaagtggagcctgtcggtgagaaggagggctttatcgtctccgagcagtgttag

SEQ ID NO: 235270 - DNA, 1548 bp, synthetic construct
  misc_feature 1..1548: note = Description of Artificial Sequence: Synthetic coding sequence
  source 1..1548: mol_type = other DNA
atgctgttgtgtcacttcttcacagatcaattccagttcgcagatggtaaaccaggtgaccagatcctcgactggcagtatggcgtcacccaggcctttccacacaccgaggaggaggtcgaggtagactcccacgcttattcccatagatggaagagaaacctcgattttctgaaggcggtggacaccaatagagctagtgttggacaggacagtccagagcccagaagttttactgatctcctgctcgacgacgggcaggacaacaatacacagatcgaagaagacaccgatcataactattatatatcacgaatatacgggccaagcgactcagcttcccgggacctgtgggtaaacatcgaccagatggaaaaagataaagtaaagatacacggcatccttagcaatacacaccgccaggccgcacgggtgaacctgtcctttgactttccattttacggccactttttgagggagataaccgtcgccacagggggatttatctacacaggcgaagtggtccacagaatgctgactgctacacagtacattgcgcctctgatggccaattttgatccatcagtgagtcggaactccaccgtccgctactttgacaacggtacagccctggtggtgcagtgggaccacgtccacttacaggataactacaacctaggttccttcacatttcaggccacactgcttatggatggtagaatcatcttcggctataaggagatccccgtactcgtcacccagataagtagtacaaaccacccggtcaaggttggcctgagtgatgcctttgtcgttgttcatcggatccagcagatcccaaacgtccggaggcgaacaatttacgaataccatagggtggagctgcagatgagcaagatcaccaatatatccgctgtcgagatgacacccttgccgacgtgtctgcagtttaaccgatgcgggccttgtgtatcaagccagattgggtttaattgcagctggtgttctaagctgcagcgatgttccagcggttttgaccgtcacaggcaggactgggtggactccggctgccccgaggaatccaaggagaaaatgtgcgagaacacagaacctgtcgagaccagctcgagaaccaccacaacggttggcgctactacaacacagttcagagtactcactaccacccggagagctgtaaccagccaatttcctacatccctccccacagaggacgacacgaagatcgcgttgcatcttaaggataacggagcctcgacagacgactccgcagctgaaaagaagggtggcactctgcatgccggactgatcattgggatattaatcctggtccttatcgtggccacggcaattctggtgacagtttatatgtaccaccaccccacgagtgctgccagcatctttttcatcgagcgtagacctagtagatggccagccatgaagttccgcagaggctccggccatcctgcctatgcggaagttgagccagttggcgaaaaagagggctttattgtttccgaacagtgttag

SEQ ID NO: 235271 - DNA, 1581 bp, synthetic construct
  misc_feature 1..1581: note = Description of Artificial Sequence: Synthetic coding sequence
  source 1..1581: mol_type = other DNA
atgaggtgcgctctagcgttgtcggctttgcttctcctcttatccaccccacccctgctgccgtcatcccctagtcctagccctagcccttcacagaacgctacgcagaccactactgattcaagtaacaagacagccccaactcccgcaagttctgtgaccattatggccacggataccgcccaacagagcaccgtcccaacttctaaggcgaacgagattttggctagtgtgaaagctaccactctgggcgtgagctccgattcccccggtaccaccaccctggcccagcaggttagcggccctgtgaatactacagtcgcccgaggaggaggatcagggaaccctactaccaccatagagtcccccaagtctacgaaaagcgcggatacgactactgtggccacttctaccgccacagctaagcccaatacaacgagctcccagaatggagccgaggacaccactaacagtggcggaaaatcttctcattcagtgacaacggacctgacatctaccaaagccgaacacctgacaactccgcaccctaccagtcccttgtcacctcgccagcctactagcactcaccccgtcgctaccccgacttccagcggccacgaccacctgatgaagatcagctcttcctccagtacagtggccatccctggctatacctttaccagccctggcatgactacaactctgccttcttctgtcatcagccagcgaacccagcagacaagctcccagatgccggcatcttccaccgccccaagtagccaggagacggtgcaacccacgagtcccgctacagcattgcgcacccctacactgcccgagaccatgagctcctctccaactgccgcatctacaacccaccgctatcctaagacaccgtctcctaccgttgctcatgaatccaattgggcgaaatgcgaggacctggagacgcagactcaaagtgagaaacagcttgtgctgaatttaaccggcaacacactttgcgcaggaggagcgagcgatgaaaaactcatttcgctgatctgccgggctgtgaaggcaacatttaatcctgcccaggataagtgtggaatcaggctcgcctctgtgcccggtagccaaaccgtggtggtcaaagaaattaccatacacaccaagcttcccgctaaggacgtctatgagcgcttgaaagataagtgggatgaactgaaggaagcgggagtctcagacatgaaactgggcgaccaaggccctcccgaagaggcggaggatcgattttctatgcctctaattatcacaatcgtatgcatggcgtccttcctgcttctagtggcggcattatacggctgttgccatcaacggctaagtcagagaaaagaccagcagcgactgaccgaggagttgcagactgtggaaaatggctaccatgacaaccccactctggaggtgatggaaactagctctgagatgcaagaaaagaaagtggtgagcttgaatggcgagctgggagactcctggatagtgccgttggataacttgacaaaagatgacctagatgaggaagaggacacccatctctag

SEQ ID NO: 235272 - DNA, 1677 bp, synthetic construct
  misc_feature 1..1677: note = Description of Artificial Sequence: Synthetic coding sequence
  source 1..1677: mol_type = other DNA
atgagatgtgcgctggcactgtccgctctgcttctcctgctttcaactccacccctgttaccttcctcaccgagtccatccccaagtccttcgcagaacgcaactcagaccaccactgattccagtaacaagaccgccccaacgcccgcatcatctgtgactatcatggccacggacaccgcccaacagtccactgtccctacttccaaggcaaacgaaatcctggctagcgtcaaggccacaacgctcggagtctcttctgatagcccaggcactacaaccctcgctcaacaggtcagcggccctgtcaataccacagtggccagggggggtggatcaggtaaccctactaccacaattgagagccccaaatcaacaaaatctgccgacaccaccactgtcgcaacttccactgcaacggcaaagcccaacacaacatcatctcagaacggcgcagaggatacaactaatagtggtggaaaatcttcccactctgtgaccactgatttgacatccaccaaggccgagcacctgacaaccccccatccaacatcacccctgtctccgagacagcctactagcacgcaccctgtagcgaccccaactagtagcggacacgatcatctgatgaaaatttccagctcatcttctaccgtggccattcctggctacacatttaccagtccagggatgaccactacattgttagaaacagtttttcaccacgtgtctcaggccggacttgaactcctgacctctggggatctgcccactctggccagtcagtcagcgggaatcacagcatccagcgtaattagtcaaagaacccagcagacgagctctcagatgccagcttctagcactgcgccttccagccaggagaccgtccagccaaccagccctgccaccgccctgagaacacctaccttgcccgagacaatgagttcttcacctaccgctgcatcaacaacacaccggtatccaaaaaccccctcaccaactgtcgcgcacgaatccaattgggcaaagtgtgaagatctggagactcagactcaaagtgaaaagcagttagtcctcaacctgactggcaacaccctttgtgccggaggagcttcagatgaaaaacttatcagtctgatctgccgggcagtgaaggccacttttaaccccgcacaggacaagtgtggcattcgactggcctccgtccctgggtcccagaccgtcgtggtgaaggagattacgatccacactaaactgcctgcaaaggacgtgtacgagcgcctcaaagacaaatgggatgaactcaaagaagccggagtgagcgatatgaagcttggagaccaggggccacctgaagaggccgaggaccgcttctccatgccattgatcatcacaatagtctgcatggctagtttcctgctgttggtggccgctctgtatggctgctgtcatcaacggctcagccagcgtaaggaccaacaacgcctcaccgaagagctccagaccgtagagaacgggtaccacgataacccgacccttgaagtgatggagacgagttctgagatgcaggagaagaaggtggtgtcactaaatggcgaactcggagacagctggatcgtcccactcgacaacctgacgaaggatgacctagatgaagaagaggatacccacctctag

SEQ ID NO: 235273 - DNA, 1581 bp, synthetic construct
  misc_feature 1..1581: note = Description of Artificial Sequence: Synthetic coding sequence
  source 1..1581: mol_type = other DNA
atgaggtgcgccctcgcactgtcggctttacttctgctgctgtcaacacctcccttgctcccatcttcaccaagtcctagtccaagccctagccaaaatgcaacgcagacaaccacagatagttccaacaagaccgcaccaacccctgcttcaagcgttaccatcatggccactgacaccgcccagcagagcaccgtcccaactagcaaagctaacgagatcctggcctccgttaaagcaactacactcggggtctcaagcgattcaccaggcacaaccacactggcccagcaggtgtcaggccctgtgaatacaacggttgcgagagggggtgggtccggcaaccctaccactacgatagagagccctaaaagcacaaaatctgccgacacaaccaccgtcgccacttccaccgccacggcaaagcctaataccacatcctcccagaatggggctgaagatacgaccaattcaggaggcaaatcctctcatagtgtcaccaccgacttgactagcactaaagctgaacatctgactaccccacaccccaccagccccctgagccctcggcagcctacctctacgcaccctgtggcaacccccacgagctcaggtcatgaccacctgatgaagatctctagtagctcttcaactgtcgcaatcccaggttacaccttcacctccccaggcatgaccaccaccctgccatcatccgtgatcagccaacgaacccagcagacttcatcgcagatgcccgctagttctaccgccccaagtagtcaggaaaccgttcagcctacatctcccgctacagctttgcgtacacctacactgcctgagaccatgtcttcgagccccacagcagcctccaccactcatcgatacccaaagactccatcaccaacagttgcacacgagagtaactgggttacccccgctggggtcggaacgcagactagagtggaggaggcgctgcgacaggcgctgactcactccctcttacctgctggaggggcatccgacgagaagctgatatctctgatctgtcgggcagttaaagccaccttcaatcccgcacaggacaaatgtggaattcgacttgcttctgtcccaggaagtcagaccgtggtggtaaaggagatcacgatccacacgaagttgccggcaaaggacgtatatgagagactgaaagacaagtgggatgagttaaaagaagccggagtatctgacatgaaactgggagaccaggggcctccagaggaagcggaggatcggttctccatgcccttgataattactattgtctgcatggccagcttcctgttactggtggcggcactatacggctgttgccatcagaggctttctcagcggaaggaccagcagcggctgacggaagagctacagacagttgagaacggctaccatgataaccccactctcgaggtcatggagacctcctcagagatgcaagaaaagaaggtggtctccttgaacggcgaattaggggactcctggatcgtcccacttgataacttgaccaaggacgatctagacgaagaggaggacactcacctctag

SEQ ID NO: 235274 - DNA, 1683 bp, synthetic construct
  misc_feature 1..1683: note = Description of Artificial Sequence: Synthetic coding sequence
  source 1..1683: mol_type = other DNA
atgcgatgcgctttagcactcagtgccctcctcctcctgctgtcaacccccccactcctgccgtccagcccgtccccatcgccatccccttctcagaacgaaacggccacccaaaccactacggactcctcaaacaagaccgccccaactcccgcttcttcagtaaccattatggcaactgatactgcccagcagagcacggtccctactagcaaggctaacgaaatccttgcaagtgtaaaggccaccacacttggcgtgtcgagcgactcacctggcactacaactcttgcacaacaagtgtcgggccctgttaacacgaccgttgcacggggaggcggaagcgggaatcctaccaccacaatcgagagcccaaagtctacgaagtctgctgacaccaccaccgtggcgacctctaccgccacagccaaacccaacacaaccagttcacaaaacggtgccgaagacacaacaaacagcggaggcaagtcaagccacagcgtgacaacagatctgacctcaacaaaagccgagcatctgaccacaccccaccccacctctccactctcaccaaggcagccaacctctacacatcccgtggcaactccgacatcttcaggacacgatcatctgatgaagatatccagctctagttctactgtggctattccgggatataccttcacatctccaggcatgacaactacgctgctggaaaccgtttttcaccacgtttcgcaggctgggcttgaattactgacatctggggacttacccaccttagcctcacaatctgcaggtattaccgcatcttctgttatatcgcaaaggactcagcagacaagctcccaaatgccagcttcatccaccgcaccgtcctcacaagagacggtgcagccaacctcgcccgctactgcgctgcgaactcccactttacctgaaaccatgtccagttcaccaactgctgcatccacaacgcacagatatcctaaaacaccgagccctaccgtggcccacgagtctaattgggctaaatgcgaggacctcgaaactcaaactcagtctgaaaagcagctggttctgaacttaactggcaatactttatgtgccggaggcgcaagcgacgagaagttgattagtctaatctgccgcgctgtgaaggctactttcaaccccgctcaggacaagtgtggcatccggttggcgagcgttcctgggtcccaaaccgtggtggtaaaggagatcaccattcacactaagctgccggctaaagacgtttatgagaggctcaaggacaagtgggatgagctgaaagaggccggagtgtccgacatgaagctcggtgatcaggggcctcccgaagaagctgaggatcgtttcagcatgcccctgatcattaccattgtttgcatggcgagctttctgctgctggttgcagccctgtatgggtgctgccaccagcgcctttctcagcggaaagatcagcagaggttgaccgaagagttacagaccgtagaaaacggctaccacgacaatcccaccctggaggtgatggagacgtcctcagagatgcaggaaaagaaagtcgtctctctcaatggcgagctgggcgactcgtggattgtgccactggacaatctgacgaaagacgacctggacgaggaagaggatactcacctttag

SEQ ID NO: 235275 - DNA, 1551 bp, synthetic construct
  misc_feature 1..1551: note = Description of Artificial Sequence: Synthetic coding sequence
  source 1..1551: mol_type = other DNA
atgaggtgcgcactggcactctctgccctgcttctgttgctttcaacttccccatctccatctcagaacgccactcagactactacagattcatcgaataagaccgctcctactcctgcgtcctctgtgaccatcatggccaccgacaccgcccagcagtcaacagtccccacctcaaaggctaacgaaattttggcctctgtcaaagccacgactctgggtgttagttcagattcccctggcaccaccactctggctcaacaggtcagcggtccagtgaacactaccgtcgccagggggggaggatccggcaatccaacaaccactatcgaatcgcctaaatccacaaagtcagcagacactacaacagtggcgaccagcactgccacagccaaaccaaataccacatcttcccagaatggcgctgaggatacaaccaattcggggggtaaaagctctcacagtgtaactacggacctcacaagtaccaaggctgaacaccttaccaccccccatcctaccagccctctgtctcctcggcagcccaccagcacacacccagttgcaacaccgacaagttcaggccacgaccacctcatgaagatcagttcaagttccagcacagtcgcaataccaggctacaccttcaccagtccgggaatgactacgacactgccttcttccgtgatttcccagcgtacacagcagacctcctcacagatgcccgctagcagtaccgcccctagcagccaggaaaccgttcaaccaacttctcccgcaacagctttgcgcacgccaacactgcccgaaaccatgtccagttcaccgacagctgcttctacaactcacagatatcccaagacacccagtccaacagtcgcccacgagtctaactgggccaaatgtgaggatctagaaacccagactcagtccgagaagcaacttgtgctaaatctaacagggaacaccttatgcgcgggaggcgcttcggacgagaaactgatatcattgatttgcagagccgtgaaagcaaccttcaatcctgcccaggataagtgtgggattcgactggcaagtgtgcccggaagccagacggtggtcgtgaaggagatcaccattcacaccaaactgccagcaaaagacgtgtacgaacgcctaaaggacaaatgggacgagctgaaggaggccggagtgtccgacatgaaacttggggaccaagggcctccggaagaggctgaggaccgctttagtatgccccttatcatcaccatcgtctgcatggcatccttcctcttgctggtggcagccctgtatggatgctgtcaccagcggttgtcccagcgaaaggatcagcagagactgactgaggagttacagacggtcgaaaatggttaccatgataaccccaccctcgaggtgatggagacatccagtgagatgcaagaaaagaaggtcgttagtctaaacggcgagctgggcgatagctggatagttcctctcgacaatctcaccaaggacgatcttgacgaagaagaggacacacacctctag

SEQ ID NO: 235276 - DNA, 1986 bp, synthetic construct
  misc_feature 1..1986: note = Description of Artificial Sequence: Synthetic coding sequence
  source 1..1986: mol_type = other DNA
atggaaggggctagagcaaggggtgcccaacttagactcggcgagcgggtccgcccagtgggccgtcggtccgccccaggtcggtcccggtttcggcagccatggcgccctggagcctcagattctgccccacccgcaggcacgatggcacaatcccgggtattgctgcttctgctgctgctcccaccacagttacatctaggcccagttttagctgtgagggcacccggattcggcaggtccggcggacactctttgagcccggaagaaaatgaatttgctgaagaagagcccgtcctggtcctctcccctgaggaacctgggcctggccctgccgcagtgagttgccccagagactgcgcttgcagtcaagagggcgtggttgattgcgggggaatcgaccttcgtgagtttcccggagatcttcctgagcatacaaatcatctgtctcttcaaaacaaccagctggaaaaaatctaccctgaggagctttcaagacttcaccgcctggaaaccttgaatctccaaaataatcgactcaccagccgcggactgccggagaaagccttcgaacatctcacgaatctaaactacctgtacttggcgaataataagctcacactggcacccagatttctgcctaatgctttaattagtgtagacttcgcagctaactatctgaccaagatctacggtctcaccttcgggcagaagccaaatcttcgcagtgtgtacttgcataacaacaagctggcagatgccggattgcccgacaatatgtttaatgggagcagtaacgtagaggtactcattcttagctccaatttcctgcgtcacgtgcctaagcatctgccacctgcgctgtacaaactgcatcttaagaacaacaagcttgagaaaatccccccaggcgcattctctgaactctcaagcctgcgagagctttacctgcagaataattaccttacagacgaaggcttggacaatgaaacgttctggaaattatctagtctcgagtacctggacctgtcatctaacaatttgtccagagtgcctgccggacttcctcgatctctcgtgcttttacacctggaaaaaaacgcaatccgcagcgtcgatgccaatgtactgacccccatccgcagcctggaatatctgttgctccactctaaccagttgcgtgagcagggtatccatccactggcctttcaaggtcttaaaagactacacacagtgcatctctacaataacgccctcgagagagtcccctccggcctcccaagaagggttcggacattgatgatattacacaatcagatcaccggaatcgggagagaagacttcgccaccacttattttcttgaggaactaaacctttcctataaccgtatcaccagcccacaggtccatcgcgacgccttccggaagttgcggttgctgaggtcgctggacctctctgggaacagactccacaccctccctccgggtctgcccagaaatgtacacgtgctgaaggtgaagcgaaacgagctcgccgctcttgctcggggagcactggtcggcatggcccagctcagggaactctatcttacttcaaatcgcctgaggtcacgagcactcggcccaagggcgtgggtggatctggcacaccttcaactcctggacatcgctggaaaccagttaactgaaattccggagggactgcccgaatctctagagtacctctacctgcaaaacaacaaaatctctgcagtgcccgcaaacgccttcgatagcacgcccaacctgaaggggatctttctgcggttcaataaactcgcagttggcagcgtagtggattccgctttccggcgactgaaacacctccaggtgttagacatcgaaggcaacctcgaatttggcgacatctcgaaagaccgcggaagactgggaaaagaaaaggaggaggaggaagaagaagaggaagaggaggaggaaactaggtag

SEQ ID NO: 235277 - DNA, 1929 bp, synthetic construct
  misc_feature 1..1929: note = Description of Artificial Sequence: Synthetic coding sequence
  source 1..1929: mol_type = other DNA
atggaaggcgaagaagccgagcagccagcatggtttcgacaaccttggcgacccggtgcttcagattcagcacctccagccggaactatggcacaatcacgcgtgctcctgctcctcctgctcctgcctccacagctgcacctggggcctgttttggctgtgagagccccagggtttggaaggagcggcggacactctctcagcccagaggaaaatgagtttgcagaagaggagcctgtgctcgtgctttctcctgaagagcccggtccagggccagcggcagtcagttgtccacgggattgcgcctgttcccaggagggcgttgttgactgtggcggtatagatttgagagagttccccggtgaccttccagaacacactaaccatctttcattacaaaataaccagctcgaaaaaatctatcccgaggaactgagccgtttgcataggctagagactctcaatctgcagaacaatcgcttgacctcccggggactacctgagaaagcttttgaacatctgaccaatttaaattatctctatctagccaacaataaattgactttagctccccgattcctcccaaatgccctgatatctgtggatttcgccgcaaactacctcacgaaaatctatggtttgactttcggtcaaaaaccaaacctgaggtctgtgtacctccataataataaactggcagatgctgggctgccagacaatatgttcaatggcagctctaacgtagaggtgctgatcctttccagtaatttcctcagacacgttccaaagcatctcccaccagctctgtacaaactgcacttgaagaacaacaagcttgagaagatcccacccggagcttttagcgaactgagttccctgagggagctgtatctgcagaataattacttgaccgacgagggattagacaacgagacattctggaagctgtccagcctggaatatctggacctcagttcaaataacttgtctcgtgtcccagcgggactccctagaagtttggttttactgcatcttgagaaaaacgctatccgctcagtggatgccaacgtgcttacccctatcagaagtcttgagtatcttctgctgcactcaaatcagctgagagagcagggtatacatccccttgcttttcaaggcctcaaaagactgcatacggtccacctgtacaacaacgccttggagcgagtgccctctggcctaccacgtcgggtgaggactctgatgatactgcacaaccagatcacggggatcgggagagaggattttgccactacatacttcctcgaagaactcaatctgagttacaaccggatcacctccccccaagtccacagggacgcttttcgtaagcttaggctgctgaggtcactagacctttctggcaatagacttcataccctcccccctgggctgcctaggaacgtgcacgttctgaaggtcaagaggaacgagctcgcagccctggcacgtggggcactagtgggtatggctcagctccgggagttatatctaaccagcaaccgactcagaagccgggcactgggccctagagcgtgggtagatcttgcacatctccaactcctggatattgcaggcaatcagctgacggagatccccgaaggactcccagaaagcttagagtatctgtatctgcagaacaataaaatctcagccgtgccagcaaacgctttcgattccacacctaacttaaagggaatttttctgcggttcaacaagctggcggtcggcagtgttgttgattctgctttccgcagattaaagcacttacaggtgcttgacatcgagggaaacctggagttcggagatatcagtaaagatcggggtaggcttgggaaagagaaagaggaggaagaggaggaggaagaggaagaagaggagacaagatag

SEQ ID NO: 235278 - DNA, 1560 bp, synthetic construct
  misc_feature 1..1560: note = Description of Artificial Sequence: Synthetic coding sequence
  source 1..1560: mol_type = other DNA
atggaaggtgcacgcgctcgcggagctcagctgaggctgggcgaacgagtgaggcctgtgggaaggcgttcagcacctggaaggtcacgcttcagacagccgtggagaccgggagccagcgacagtgcgccacccgctggcacaatggcgcagagtagagtgctcctcttgctgctgctcctgccccctcaactacacctggggccagtgctcgccgtccgggctccaggattcggcagatcggggggacactccctgtcacccgaggagaatgagttcgctgaagaagagccagtgctcgtactgtccccagaagaacccggacccggtcccgcagcagtgagttgcccgcgtgattgtgcctgtagtcaagaaggcgtcgttgactgcggaggcatagatcttcgcgagtttccaggggacctacccgagcacacgaatcacctgtcactgcagaacaataaactcgagaagattccgccaggtgccttcagcgagctctcttctctcagggagctctatctccagaacaactacctgacagatgagggactcgataacgaaacattttggaaattatcctcgttggagtacctagatttaagctccaataacctatcccgagtgccggcaggactgccacggtcactagtgctcctgcatttagagaaaaatgccattcgctctgtcgatgccaacgtcctcacccctattaggtccctggaatacctgctgttgcatagcaatcaactgcgagagcagggcatccacccgctagcttttcagggattgaagcgtctacacactgtgcatctgtacaacaacgctctagagagggtgccatccggtctgcccagacgggtgcgaactctgatgattctgcacaaccagatcactggaattggtcgtgaagacttcgcaacgacctattttctggaagaattgaatctgagctacaatagaatcacctccccacaggtccatagggatgccttccgtaagcttaggctgcttcgctctctggatctttccggcaacaggctccatacgctgccacctggtcttccaagaaacgtgcacgtcctgaaagttaaaaggaacgagctcgcagcattagctaggggagctttggttggtatggcacagctcagggaactgtatcttacatcaaacaggctgcggagtcgagcccttggccctcgagcctgggttgatctggctcatctccagttgctggacattgctgggaaccagctgactgaaatccctgaaggcctgcctgaaagcctggaatacctgtacctgcagaataacaagatctctgctgtgccagcaaatgccttcgatagcactcctaatctcaagggcatcttcctgagattcaataagctggcagttggatcagtagtggactccgcgttccgccgtctcaagcatctccaggtactggacatcgagggtaatctcgagtttggcgacatctcgaaagatcgcggacgcctaggtaaggagaaagaggaagaagaggaggaggaggaagaagaggaggagacacgatag

SEQ ID NO: 235279 - DNA, 1095 bp, synthetic construct
  misc_feature 1..1095: note = Description of Artificial Sequence: Synthetic coding sequence
  source 1..1095: mol_type = other DNA
atggctcgcgcaatggctgccgcttggcctctccttctggtggcactgcttgtgctgagttggccccctccgggaaccggagacgtcgtcgtgcaggccccaacacaggttccaggctttctcggggactccgtgacactcccttgttaccttcaggtccctaacatggaggtcacacacgtctcccagcttacgtgggcccgacacggcgaatccgggtcaatggctgtctttcaccagacacagggcccttcgtactcagagtctaagagactcgagttcgtcgctgcacggctgggcgctgagctgcgaaacgcatctctgcggatgttcgggctgcgggtcgaagacgagggaaattatacgtgcttgttcgtgactttccctcagggatctcggtccgtcgacatctggctgagagtcttagccaaacctcagaacaccgctgaagtacagaaggtacaattgacaggagaaccagtaccaatggctcgatgcgtatcgaccggaggaagaccccctgctcagatcacctggcactccgatctgggcggtatgcccaacacatcacaggtccccggttttctgagtggcaccgtgacagtcaccagtctgtggattctggtgccgagcagccaggttgacggaaaaaatgtgacctgcaaggtggagcatgaaagcttcgaaaaaccacaattactgacagttaaccttaccgtgtactaccctccagaagtaagtatttctgggtacgacaataactggtacctgggacagaatgaagccactctgacatgtgacgccagatcaaacccagagcctaccgggtacaactggtccaccactatgggtccactgcctcctttcgccgtggcacagggcgctcagttacttatcaggcctgttgacaagcctattaacaccaccctaatatgtaacgtgacgaatgctctgggtgccagacaagctgaactgactgttcaggtgaaaggcaccgaacacgcctctgcttcagctaatggccatgtcagctactctgcggtctctagagaaaatagttcttcccaggatccccaaaccgaggggactcgctag

SEQ ID NO: 235280 - DNA, 1119 bp, synthetic construct
  misc_feature 1..1119: note = Description of Artificial Sequence: Synthetic coding sequence
  source 1..1119: mol_type = other DNA
atggcacgagctatggcggctgcatggcctttgctcctagtcgccctcctagtgctcagttggccaccaccaggcactggagacgtagtggtgcaagcgcctacacaggtacctggattcctcggcgactccgtcacgctcccatgctacctgcaagtgccaaatatggaggtgacccacgtcagccagcttacttgggcaaggcacggcgagagcggcagcatggcagtgtttcaccaaacccagggaccaagttatagtgagtcgaaacgcctggaatttgtggctgctcgattgggggctgaattgaggaatgctagcctgagaatgtttgggctgcgtgttgaggacgagggaaactacacatgcctgtttgtgacctttccccagggcagtcgttctgtagatatttggctccgcgtgctggccaaaccccaaaacacagcagaggttcaaaaggtgcaactgacaggggaacccgttcctatggccagatgcgtgtctactgggggtagacctcctgcacagattacatggcacagtgacctaggaggaatgccaaacacatcacaggtccctggctttttatcagggacggtgacagtcacctccctctggatcctggtaccttcctcccaggtggatggtaagaatgtgacctgcaaagtggaacacgagagtttcgagaagccacaactgctgactgtcaaccttactgtttactaccctcctgaggtgagtatctcaggctacgataacaattggtatctcggccagaatgaggccaccctcacatgcgacgccagaagcaaccccgaaccaaccggatataactggtctactactatggggccactgcccccatttgccgtcgcacagggcgcacagctactgatccgccctgtagacaaacctataaatactactctgatttgcaatgtgacaaatgccctgggggcaaggcaggctgaactgacagttcaagtgaaagagggaccgccatccgagcactccgggaccgagcacgccagtgcatctgccaacggtcatgtgagttactcagcagtctcaagagaaaactcgagctctcaggatcctcagaccgagggcactcggtag

SEQ ID NO: 235281 - DNA, 1179 bp, synthetic construct
  misc_feature 1..1179: note = Description of Artificial Sequence: Synthetic coding sequence
  source 1..1179: mol_type = other DNA
atggcccgtgccatggccgctgcatggccactgctcctcgttgctctccttgtgctgtcgtggccacctccagggacaggagacgtagtagttcaggctcccacgcaagtgcccggattcctaggcgatagtgtgacgctgccctgttatctgcaagtacccaatatggaagtgactcacgtgtcgcagctgacttgggccagacatggagagtctggctccatggctgtgttccaccagacccaaggtccaagttacagtgaaagcaagcggctggagtttgtagccgctaggttgggtgctgaactgcgcaacgcctccctcagaatgtttggactgcgtgtggaggacgaaggaaactacacatgtttgttcgtgaccttcccacaaggctccagatcagtggacatctggttgcgggtactcgccaagccccagaatacagctgaggtgcaaaaagttcagttaaccggggagcctgttcccatggctcgctgcgtgagcactggcggacggccaccagcccagatcacctggcattcagatttgggtggaatgccaaatacttcccaggtaccgggatttctgagcggcacagtgactgtgactagcctgtggatcctcgtgccatcttcccaggttgacgggaagaatgtcacctgcaaggtggagcatgagagtttcgagaaaccccaactcctcacagtgaacctaaccgtctactatccccctgaggtgtccataagtgggtatgacaacaactggtatctcgggcaaaatgaggcgaccctgacctgtgatgccagaagcaaccctgaaccaaccggctacaactggagcactaccatgggacccctccctccttttgccgtcgcccagggcgctcagctgctgattcggccagttgacaagcccatcaataccacgctcatttgtaatgtaacaaatgctttgggcgctcgccaggcagagttgacagttcaggtcaaggaggggccaccatctgaacacagtggcattagcaggaatgcaattatttttttggtgctgggcatcttggtctttttaatcctcctgggtattggaatttatttttactggtccaagtgttccagggaagtcctgtggcactgtcacctgtgcccctcctccgagcatcaccagtcatgtagaaattag

SEQ ID NO: 235282 - DNA, 1254 bp, synthetic construct
  misc_feature 1..1254: note = Description of Artificial Sequence: Synthetic coding sequence
  source 1..1254: mol_type = other DNA
atggctagagcgatggctgcggcttggccactcctgctggttgccttactggtgctgtcgtggcccccaccagggaccggagacgtggtggtgcaggctccaacccaagtccctggatttctcggggactcagtgaccttgccttgctacctgcaggtcccaaatatggaggtaactcacgtctcccagctaacgtgggctcggcacggtgaaagcgggagcatggcggttttccatcagacccaagggccaagttattctgagtccaagcgactggagtttgtagccgcaaggctcggagccgaactgcgaaatgccagtcttcgcatgttcggactgagggtagaggacgaggggaattacacttgtttgtttgtgaccttcccacagggaagccggtccgtcgatatatggcttagagtcctggccaaaccccagaacactgccgaggtacaaaaagtccagctgacaggggagccagtccctatggccaggtgcgttagtacaggagggaggccccctgcacagattacctggcacagcgacttgggcggaatgcccaatactagtcaggtgcccggattcttgtcgggcaccgtcactgtcaccagcctatggattctagtgcctagcagccaagtggatggtaagaatgttacttgtaaggtcgaacacgagagcttcgagaagcctcagctgcttacagtaaacttaactgtgtattacccacccgaggtttccatttccgggtatgacaacaactggtatttgggccaaaacgaggcgaccctgacttgtgatgccaggtcaaatcctgaaccaaccggttataactggtccacaacaatgggcccactgcctcccttcgctgtcgcccagggcgctcagctcttgatccggccagttgataagcccattaacacgactctaatctgtaatgttacgaacgcactgggggctaggcaggccgagcttacggtgcaggtgaaagaaggtccgccttctgaacatagtggaatatctaggaacgcaattatttttctcgtgctcggcatcctggtctttctcatcctcctgggtattggaatctatttctactggtccaagtgttctcgtgaggtgctgtggcattgccacctttgtccaagcagcactgagcacgcctcagcatcagccaacggccacgtgtcttactctgccgtgagccgggaaaatagctcttcgcaagatccccaaacagaagggacccgttag

SEQ ID NO: 235283 - DNA, 1554 bp, synthetic construct
  misc_feature 1..1554: note = Description of Artificial Sequence: Synthetic coding sequence
  source 1..1554: mol_type = other DNA
atggcccgaatgggcttagccggtgctgccggacggtggtgggggttggccctcggtcttacagcgttctttctccctggcgtgcattctcaggtggttcaggtaaacgacagtatgtatgggttcatcgggacagatgtggtcctgcactgctcctttgcgaatcccctgccaagcgtgaaaattacccaggtaacctggcaaaagagcactaacggctctaaacaaaatgtcgccatctacaatcccagcatgggtgtcagtgttcttgccccttacagggaaagggttgagttccttcggccttcttttacggatggcactattagactgagccgacttgaactggaggatgaaggcgtctacatctgtgagttcgccacttttcccacgggcaatcgtgagtcccagctcaatttgactgtcatggccaagccgactaactggatagaaggtactcaggccgtattaagagcaaagaagggccaggatgacaaagttctcgtggccacatgtacatcggctaatggcaagcctccttccgttgtatcttgggagacgcggctcaaaggcgaggcggagtatcaggagattcggaaccccaacggaacagtgacagtgatcagcagatacaggctcgtgccttcccgagaagctcatcaacagtccctcgcatgcatcgttaattatcacatggatagatttaaagagtcacttacactcaatgttcagtacgaaccagaggtgacaatcgaaggcttcgacggcaattggtatttgcagagaatggacgttaaactcacctgtaaagccgacgcaaatccacccgctactgaatatcattggaccacgctcaacgggagcctgcctaagggcgtggaagctcagaatcgtactctattcttcaaagggccaatcaactatagccttgccggaacctacatctgcgaggcgactaaccccatcggaacgcgatctggccaggtcgaagtaaatatcaccgaattcccatacacaccgtccccgccagagcacggcaggagagccggaccggtgcctacagccatcattgggggtgtcgctggctctatcctgctggtgttgatcgtggtaggtggtatcgtggtggcactaaggcggagacgacacactttcaagggcgactactccactaaaaagcacgtgtacggaaacggctacagcaaagctggtattccccagcatcatcctcctatggcgcagaaccttcagtatccagatgatagcgatgacgaaaagaaggccggacccctggggggttccagttacgaggaagaggaggaagaggaggagggtggcggaggaggtgaacgaaaagttggcggaccacatccaaagtatgatgaggacgcaaaacggccatacttcaccgtggacgaagcagaggctaggcaggacggatacggggatagaacactgggataccagtatgacccagaacaattagacctagccgagaacatggtcagccagaacgacggttcattcatatcgaagaaagaatggtacgtctag

SEQ ID NO: 235284 - DNA, 1059 bp, synthetic construct
  misc_feature 1..1059: note = Description of Artificial Sequence: Synthetic coding sequence
  source 1..1059: mol_type = other DNA
atggcgagaatgggcctggccggagccgcaggacgctggtggggcctggcgctcggattgacggcattctttctacctggggtccactctcaagtggttcaggtgaacgactccatgtatggctttatagggaccgatgtcgtgttgcattgtagttttgcaaatcccctcccgtctgtcaaaattacacaggtgacctggcagaaatccactaatggatctaagcagaacgtggcaatatacaacccttcgatgggagtatcggtgctagcaccctatcgtgaaagagtcgagttcctgcgtccctccttcacagatggcacaattcggcttagccgcctggagttagaagacgaaggtgtatatatttgcgaatttgccactttcccgacagggaacagggagtcacagttgaacttaacagtgatggcgaaaccaactaattggattgagggcacccaggctgtgttgcgggcaaaaaaaggccaagatgacaaagtgttggtcgctacctgcacttcagccaacggaaagccgccttccgtcgtttcgtgggagactcgactcaagggggaggcagaataccaggagattcgcaatcccaacggcaccgttaccgttatctcaaggtaccgattagtgccttctagggaggcacaccaacagagcctagcttgcatcgtcaattaccatatggaccgtttcaaagagtcacttacacttaatgtccagtatgagcctgaagtaaccatcgaagggttcgatgggaactggtacttacagagaatggatgtcaaactaacttgcaaagctgatgccaatccccctgccacagaatatcactggaccaccctgaacggctcgctccctaagggagtggaggctcagaaccgcaccctctttttcaaaggacctatcaattactcccttgcgggaacttacatctgtgaggccaccaaccctatcgggacacggtctggtcaggtagaggtgaacatcaccgccttttgccagctgatttacccgggaaaaggacgcacacgcgcaagaatgttttag

SEQ ID NO: 235285 - DNA, 1377 bp, synthetic construct
  misc_feature 1..1377: note = Description of Artificial Sequence: Synthetic coding sequence
  source 1..1377: mol_type = other DNA
atggcaaggatgggcttggccggtgccgctggcagatggtggggacttgccctgggactgaccgcattttttctgcccggagtacactcacaggtggtccaggtgaatgacagcatgtacggctttatcggaaccgatgttgtgctacattgttcttttgcgaacccccttccatcagtgaagatcactcaggtcacatggcagaagtccacaaatggatcaaagcagaacgtagctatatacaatccgtccatgggcgtgagcgtgctggccccttatagagagcgcgtggaattcttgaggccttcatttacagacgggaccattaggctatctagactcgaacttgaggacgagggagtgtacatctgcgagtttgctacgttcccaactggaaaccgagagtcgcagctaaatttaactgtaatggcgaaaccaacaaactggatagaaggcacccaggccgttttgagagccaagaaaggccaggacgataaagtcctcgtggcgacgtgcacttcggctaacgggaaacctcccagcgtcgtgtcctgggaaactagattgaagggggaagctgagtatcaagagatccgaaatccaaacggaacagttactgttatctcacgctataggctggtgccaagtagagaggcccaccagcagagcttagcttgtattgtgaattatcacatggatcgttttaaagagtcactaacattaaacgtgcagtacgaacctgaggtgacgatcgaaggttttgatggcaattggtacttgcagcggatggatgtcaaattgacatgcaaggctgacgctaatcctcccgcaactgaatatcattggacaaccctgaatggctctttacccaaaggggtggaagcacaaaaccggaccctgttcttcaaagggcctataaactactcccttgccggaacttatatctgtgaagcaaccaatcctattggaacccgcagcggccaggtcgaggtaaatattacagaaaagcccaggcctcaacgtggtctgggctccgcagcccgactgttggcgggaacagttgccgtgttccttattctcgtggcggtactgaccgtgttctttctttacaaccgccaacagaagtcccctccagaaaccgacggcgctggtaccgaccagccattgagccaaaaacccgaaccaagcccctccaggcagagttcccttgtgcccgaggacatccaggtagtgcacctggacccgggaagacaacagcagcaggaggaggaagatcttcagaaattgtccctgcaacccccttactacgatctgggagtatctcccagctaccatcccagcgttcgaaccactgagcccaggggcgaatgtccctag

SEQ ID NO: 235286 - DNA, 1617 bp, synthetic construct
  misc_feature 1..1617: note = Description of Artificial Sequence: Synthetic coding sequence
  source 1..1617: mol_type = other DNA
atggctagggccgctgcgttactgccaagcagatcaccacccactccactgctgtggcccttgctactcttgttgctgcttgagaccggcgcacaggatgtcagggtgcaggtgctcccagaagtccgcggacagctaggcggtacggtggagctaccatgtcacttgctgccacccgtgccagggctgtatatcagcctggtgacatggcagagacctgatgccccagccaatcaccagaacgtggcagccttccaccctaagatggggccttccttcccctcccccaagcctggatctgaaagactctcctttgtgtctgcaaaacagtccacgggccaggatacagaggccgagctgcaggacgctacgcttgccttgcacgggttaacagttgaggatgaaggaaattacacgtgcgagttcgctacatttccgaagggcagtgtaagggggatgacctggctgcgcgtaatcgcgaagcctaagaatcaagccgaagctcaaaaagtgacattctcacaggacccgacgaccgtggccctgtgcatctctaaagagggccgaccaccagccagaattagctggctttcttccctggattgggaggcaaaagagacacaggtgtctggcacattggcgggtacagtcactgtgacatctagattcacactggtcccctctggaagagccgacggggtgactgtcacgtgtaaagtggagcacgaatccttcgaggaacctgcattaatccccgtgacactgtccgtacggtacccccctgaggtctctataagcgggtacgatgacaactggtatttgggcagaaccgacgctaccctgagctgtgacgtgagatctaaccctgaacctactggttatgattggtccacaactagcggtacatttcccacgtcagccgtcgcacaaggcagccaactagtgatccacgcggtggactccttgttcaacacgactttcgtatgcactgtaactaacgccgttggcatgggaagggccgaacaagttatctttgtacgtgaaacgccaaatacagccggagctggagccactggagggatcatcgggggtatcatagctgccattatcgcaaccgccgttgccgctacagggatcttgatatgccgccagcagcgcaaagaacaaactctgcaaggtgcggaggaggacgaggatctcgagggacctccatcctacaagccacccacacccaaagctaagctggaggcccaggagatgccaagccagctctttacactgggggcttctgagcatagtccactgaaaacaccatatttcgacgctggagcgagctgcactgagcaggagatgccacgttaccacgagttgcccacgctggaagagcgaagcggccctctccatcctggtgccacctcgcttggctcgccaatcccagttccaccaggcccacctgcagtagaggatgtttccctagacctggaggacgaagagggggaggaggaggaggagtacctcgacaagatcaatccaatatatgacgcgctgagctatagttccccgtcagactcctatcaaggtaaaggatttgtcatgagcagggccatgtacgtctag

SEQ ID NO: 235287 - DNA, 1440 bp, synthetic construct
  misc_feature 1..1440: note = Description of Artificial Sequence: Synthetic coding sequence
  source 1..1440: mol_type = other DNA
atggcacgagccgctgctctgctcccttcccgaagtcccccaacgcccttactttggcccctgctgttgctgttacttctcgagacaggcgcacaggacgtgagggtgcaggtcctgcctgaggtcagaggacagttaggtgggactgtggagctgccctgtcatctgctgccaccagtgccaggcctctacataagcctggtcacttggcagcgtcctgacgcacccgctaatcaccagaacgtggccgcattccaccctaagatggggcctagctttccttctcctaaacctggttccgagcgcctgtcatttgtctctgcaaaacagtccacgggccaggacacagaggctgaactgcaggatgccactctggcactgcacgggttaaccgttgaagacgaaggtaattacacctgtgagtttgcgacttttcctaaaggatccgttcgcggtatgacatggctcagggtaattgcaaagccgaaaaaccaggcggaggcccaaaaggtgacgttttcacaggacccgactacagtagctctgtgcatatccaaagagggtagaccccctgcacgtataagctggctctccagtcttgactgggaggccaaagagacccaggtaagcggaactttagccggtacggtaaccgtaacaagccggtttacactggttccaagcggcagagcggatggtgtgacagttacctgtaaagtggaacatgaaagctttgaagaaccggctttgatccctgtgaccctgtctgtcaggtacccgccagaggtgagtatttcaggctacgacgacaattggtatctcggaaggactgacgcaacattatcctgcgatgtcaggagtaaccccgaacccactggctatgactggtccaccacgtctgggacttttccaacttccgccgtcgcccaaggcagtcagctggtaatccacgctgtggactcacttttcaacaccacttttgtctgcaccgttactaacgccgtgggaatgggcagggctgagcaggtgatattcgttcgcgagaccccacgtgcctctcctcgagacgtgggccctttggtttggggggcagtcggtggcacactgttggttctgctgctcctggcagggggttccctggcttttatcttattgcgtgtcaggcggcgaaggaagtcacctgggggtgcaggtggcggtgcctctggagacggtggcttctatgaccctaaggctcaagtcctcggcaatggagatcctgtcttttggactcctgtcgttccgggacctatggaacccgacgggaaagatgaagaggaggaggaagaagaagaaaaggctgagaaggggctcatgctgcctccccctcccgcattggaagatgacatggaatctcaactagatggctctctgatcagtcgaagggctgtttacgtgtag

SEQ ID NO: 235288 - DNA, 1101 bp, synthetic construct
  misc_feature 1..1101: note = Description of Artificial Sequence: Synthetic coding sequence
  source 1..1101: mol_type = other DNA
atggcaagaacactgcggccatccccactgtgtccgggtggaggcaaggctcaactgagtagcgcctcactgctgggagccggattacttctgcaacctcctacaccgcctcctttactgctgctcctatttccgttactgttgttctcgaggctatgcggcgctttggccggtccaatcatcgtagagccccacgttaccgccgtgtgggggaagaacgtcagcctgaagtgcttaattgaggtgaatgaaactataactcagatatcctgggaaaaaattcacggtaagtccagccagactgtcgcagtccaccacccgcagtatggattttccgtacagggcgaataccagggcagagtgttgtttaagaattactcacttaatgacgccacaattactctgcacaacatcggtttttctgattccgggaagtacatttgtaaagccgtcacattccccctgggaaacgcccagagctccacaaccgtgaccgtgttggtcgaaccgactgtgagcctgattaagggccctgactctctgattgatggcggtaatgagacggtagctgcaatctgcatcgcagccacgggcaagccagttgctcacattgactgggagggtgacttaggcgagatggaaagcacgactacttcattcccaaacgaaactgcgaccattatatcccaatataagctgtttccaacacgttttgctagggggagaaggatcacttgtgtagtcaagcatcccgctctcgagaaggatatccgatatagtttcatactggatatacagtacgctccagaggtctccgttacagggtatgatgggaattggttcgtaggacggaagggcgtgaatctgaagtgtaatgcagatgctaatccccctccgtttaagagtgtgtggtctaggctggacggacagtggccggacggacttctcgcttctgataacacactccattttgtgcatcccttgaccttcaattattcaggggtttatatttgtaaggtgactaattctctgggtcaacgctcggaccagaaagtgatctacataagtgcctacaactctgtcgcctcccttaactgctag

SEQ ID NO: 235289 - DNA, 1650 bp, synthetic construct
  misc_feature 1..1650: note = Description of Artificial Sequence: Synthetic coding sequence
  source 1..1650: mol_type = other DNA
atggctcgcaccctgcggcctagccctctatgccctgggggaggtaaagcccagctcagctctgccagtcttttgggcgctggcttgttgttacagccgccaacccctccaccgctgctcttactcctgttccccctgctcctgttctcaaggctgtgtggggcactggcaggaccaatcatcgtggagccacacgtgactgccgtgtgggggaagaacgtgtcactgaagtgtcttatcgaagttaatgaaacaattactcaaatatcctgggaaaaaatccacggaaaatcttctcaaaccgtggcagttcatcacccccagtacggcttttcagtgcagggcgagtatcaggggagggtgctgtttaagaattacagcctcaacgacgccacaatcacgctgcacaatatcggtttctcagacagcggtaaatacatatgcaaagccgtcaccttcccactgggtaacgcgcaaagctccacaacagtgacggtcttggtcgaacccactgtgtctctcattaaagggcctgatagcctcatcgatggaggcaatgaaaccgtcgccgctatctgcatcgcggctaccgggaagcctgtggcacacattgactgggagggagacctgggcgagatggagtcaactactacaagcttccctaatgaaaccgcgacaattatcagccagtacaaactctttccgacccgcttcgcaaggggcaggagaatcacctgcgtggtaaaacacccagctcttgaaaaggacatcagatacagctttattttagatatccagtacgccccagaagtgtccgtgaccggttacgacggtaactggttcgtggggaggaagggagtcaatctgaagtgtaacgccgacgcgaacccccctcccttcaagtctgtctggtccaggcttgacggacagtggccagatgggctactggcctccgacaacaccttgcacttcgtgcaccctttaactttcaattacagcggcgtatatatatgtaaggtgaccaactctctcggccaacgctctgaccagaaggtgatctatattagcgacccgcctacaacgaccactcttcagccaacaatccagtggcacccatccaccgcggatatcgaggacctagctaccgagccaaaaaaactgcccttcccattgagcacgcttgcaactataaaggatgatacgatcgccacaatcattgcctctgtagttggcggagcgctcttcatcgtgctcgtgagtgttctcgcaggtattttttgctatcgcaggcggcgaaccttcagaggcgattattttgccaaaaattacattccaccttctgacatgcaaaaagaatctcagatcgatgttcttcaacaggatgaacttgattcttaccctgactctgtgaaaaaagaaaataagaaccccgtgaataatctcataagaaaggactacctggaagagccagagaaaacccaatggaacaatgtggagaatctgaataggtttgagcgtcccatggactattacgaggatttaaagatgggaatgaagtttgtttctgacgagcattatgacgagaatgaggacgatttggtttctcacgtggacggaagcgtgattagtcggagagaatggtacgtatag

SEQ ID NO: 235290 - DNA, 1464 bp, synthetic construct
  misc_feature 1..1464: note = Description of Artificial Sequence: Synthetic coding sequence
  source 1..1464: mol_type = other DNA
atggcagaaggctggcgttggtgttttgtgagaaggacgcccggactgttaagaggacccctgcttcctcgtagcttttcaggcaatccgagagccctcgcagggcctatcatcgtggaaccccacgtaactgctgtttgggggaagaacgtgtctcttaagtgtctgatcgaggttaacgaaacaatcactcagatatcttgggagaaaatccacgggaagagctcgcagacagttgccgtgcaccacccgcaatacggattttctgtccaaggtgagtatcagggcagggttctgtttaaaaattattccctcaacgatgcaactataacgctgcacaatataggtttttcagacagcggaaagtatatctgcaaagctgtaacttttccccttggcaatgcacaatccagcactacagtcactgtgcttgttgaacctacggtaagccttatcaagggacctgactcgctgattgatgggggaaacgagacagtagccgctatttgtatcgctgcaaccggaaaaccggtggcccacattgactgggaaggcgacctcggcgaaatggaaagcactacaacatcattccccaacgaaaccgcaacaatcatctcccagtataagttgtttcccacccgattcgctagggggagaaggattacgtgcgtggtgaaacaccccgctctcgagaaggatattagatactccttcatcttggatattcagtatgccccagaggtgtccgtgacagggtatgacggaaattggtttgtaggcaggaagggggtgaacctcaaatgtaatgcagacgctaatccaccaccgtttaaatcagtctggagccgactggacggacaatggccagatggcttgttagcatccgacaacacactgcattttgtgcaccctcttacctttaattattctggagtttatatttgtaaggtaaccaattcactaggccagaggtctgatcagaaagtgatttatattagcgatgtgccgttcaaacagacaagtagcatcgctgttgccggagcagtgatcggagcggtcctagctcttttcattatcgcaatttttgtgaccgttctgctgactccaagaaagaagcgcccaagttacttggacaaagtgattgacttgcctccaacccataagcctcctcctttgtacgaagagagatccccaccacttccccagaaagacttgtttcagcctgagcacctgccccttcagactcagtttaaggagcgggaagtgggcaatttacagcacagcaacggcctgaacagccggtctttcgattacgaagacgagaacccagtgggcgaggacggcatccaacagatgtacccgctctataatcagatgtgctatcaggacagatcacctggcaaacatcaccagaacaacgacccaaagcgagtgtacatcgaccctcgcgagcactacgtgtag

SEQ ID NO: 235291 - DNA, 1533 bp, synthetic construct
  misc_feature 1..1533: note = Description of Artificial Sequence: Synthetic coding sequence
  source 1..1533: mol_type = other DNA
atgcctctcagcctgggcgctgagatgtgggggccagaggcttggcttctgctccttttgctgctggcctcatttacagggaggtgtcctgccggtgaactcgaaacctctgacgttgtgaccgtcgtgctgggacaagatgctaagctgccatgtttttacagaggcgactcaggcgagcaagtgggacaagtggcctgggcccgtgtcgatgccggagaaggcgcacaggagctggccctcttgcactccaaatatggtctccacgtcagtccagcctatgagggccgtgtggaacagccaccacccccacgcaaccctcttgacggaagtgtgctcctcagaaacgccgtgcaggccgatgagggtgagtacgagtgtcgcgtcagcacgtttccagcaggttctttccaggccaggctccgtctacgcgtcctcgtgccccctctgccaagtttgaaccctgggccagccctggaagaaggccaaggactgactctcgcagcctcctgcactgccgagggtagtcctgctcccagcgtgacctgggacactgaggtcaaaggcaccaccagcagcagaagcttcaagcactccaggagcgcagctgttacctcagaattccacttagtcccaagcaggtccatgaatggccaaccgctgacatgtgtggtgtcacatccgggactgctgcaggaccagcggattactcatatactgcatgtgtcattcctggccgaggcatcggtgcgcggtctagaggaccaaaatctgtggcatatcggccgagagggggctatgctgaaatgtctttcggaggggcagccaccgccatcctataactggaccagactcgacggcccattaccctctggcgttcgggtggatggcgatactcttgggttcccccctcttactaccgagcactcgggcatttatgtgtgtcacgttagcaacgaattcagctccagggactctcaggttactgtagatgtgctagatccacaggaggactctgggaaacaggtcgaccttgtttctgcatctgtagtggtggtcggggtgatcgccgctctgttgttttgcctgctggtcgtcgtggtggtgctgatgtctaggtaccataggcggaaggcacagcagatgactcagaaatatgaggaagagctgacattaactcgcgagaatagtattcggagacttcacagccaccacacggacccaaggtctcagcccgaggaatctgtgggtctgcgggcagagggccatccagattcactgaaggacaactcatcctgcagcgttatgagcgaggaacctgaaggacgctcctactctactctcaccacagtaagagagatcgaaacgcagacagaattgctctctcccggatccgggagggccgaagaggaggaagaccaggacgaagggattaagcaggccatgaaccactttgtccaagagaatggtacacttagggcaaaacccaccggaaatggtatctatattaacggcagagggcacctggtgtag

SEQ ID NO: 235292 - DNA, 660 bp, synthetic construct
  misc_feature 1..660: note = Description of Artificial Sequence: Synthetic coding sequence
  source 1..660: mol_type = other DNA
atgcttaagtgcttatcagaaggacaacccccaccctcctacaattggacaaggctcgacgggcctttaccttcgggagtgagggtggacggggatacactcggattccctccactgaccacagagcacagcggaatctatgtgtgtcacgtttccaatgagttcagctcaagggactcgcaggtgacagtggacgttctggacccacaggaggacagcggcaagcaggtggatctggtctctgcatccgtggtggtggtgggtgtgatcgccgctctgctgttctgccttctggtggtggtcgtcgtgctgatgtctaggtatcaccggagaaaagcacagcagatgacccagaagtatgaggaagaactgacactgacgagggagaactctattaggagactgcacagccatcacacagatcctaggagccagtcggaggagccagagggcagatcttactccactttgactaccgtgcgcgagattgagacccaaaccgagttgctctcccctggatcaggtcgcgctgaggaggaggaagaccaggacgaggggattaagcaggcaatgaatcactttgtgcaggagaacgggacactccgggcaaagcctacggggaatgggatctacatcaatgggagagggcacctggtgtag

SEQ ID NO: 235293 - DNA, 2058 bp, synthetic construct
  misc_feature 1..2058: note = Description of Artificial Sequence: Synthetic coding sequence
  source 1..2058: mol_type = other DNA
atggagctgcttaggaccatcacataccaacccgctgcttctacaaagatgtgtgagcaggcccttggaaaaggctgcggagccgacagtaaaaagaagaggccccctcaacctccagaagaatctcagccaccccagtcccaggcccaggtcccccctgcagcgccacaccaccaccatcatcattctcatagtggcccagaaatcagcaggattatagttgacccaactacggggaaacgttattgcaggggcaaagtcctgggaaagggcggatttgcaaagtgctacgaaatgacagacctcaccaataataaagtttacgccgcaaagataattcctcatagtcgggtcgccaaacctcaccagcgtgagaagattgacaaggagattgagctccaccggattttacaccacaagcatgtggtacagttctaccactacttcgaggacaaagaaaatatatatatcctactcgaatattgttcccggagaagcatggcccatatcctaaaagccagaaaagtgttaactgaaccagaagtcaggtattatttacggcagattgtatccgggctcaaatacctgcacgagcaggagatccttcatagggatctgaagttgggcaacttttttatcaacgaggctatggagctcaaggttggcgatttcggccttgctgcacggctagagcctctggagcaccggcgacgcaccatttgcgggacacccaactacctctctccagaggttcttaacaaacagggccacggatgtgagtccgatatttgggctcttggttgcgtgatgtatacaatgctcctgggaagacctccgttcgaaacaactaatctgaaggagacatatcggtgtattagagaagcgaggtacacaatgccaagctccctactcgctcccgcaaagcacctcattgcaagtatgctgtcaaagaatcctgaggatcgcccttctctggatgatattattcgtcacgactttttcctacaaggatttacaccagatcgcttgagttcctcttgttgtcacacagtgccagactttcatttgagttcaccagccaagaacttttttaagaaagccgcagcggctcttttcggcggtaaaaaggacaaggccaggtatatcgacactcataatcgggttagtaaggaagatgaggatatctataagctgcgccacgatttgaaaaagacctcaattactcagcaaccctctaagcaccggactgatgaggaactgcagccccctacaactactgtggcaaggtctggcactccagcggtggaaaacaagcaacagattggcgacgctattcggatgatagttcgcggaacactgggatcctgctcaagcagctccgagtgtctagaggactcgaccatgggatcagttgcggacacagtggcacgcgtgttgcgtggatgcttggagaacatgccggaggcggattgtattcccaaggaacagctcagcactagttttcaatgggtgactaagtgggttgactatagcaataagtatggcttcgggtatcagctttcagaccatacagtaggtgtgttgttcaataacggagcacacatgtcactgctccctgataagaaaacggtccactactacgccgaactcggacagtgttccgtatttcccgctacagacgccccagaacagttcatctcccaggtgacagtgctgaaatatttcagccattacatggaagagaacttaatggacggcggagaccttccgtctgtgacagatatcagacggccacgcctgtacttattgcagtggttaaagtctgataaagctctgatgatgctgtttaacgacggaacattccaagttaacttctaccatgatcacactaagatcattatatgctcccagaatgaggaatacctgttgacctacattaatgaggatcggatctcaacaactttcaggcttacaaccctactcatgagtgggtgcagctccgagctaaaaaatagaatggaatatgcgctgaatatgctgctgcagcgctgtaactag

SEQ ID NO: 235294 - DNA, 1164 bp, synthetic construct
  misc_feature 1..1164: note = Description of Artificial Sequence: Synthetic coding sequence
  source 1..1164: mol_type = other DNA
atggaattactgagaacaattacgtaccaacctgcagcctccactaagatgtgcgagcaggcactggggaaagggtgcggcgcagatagtaagaaaaagcggccacctcaaccccctgaggaaagccagcccccacagtcccaggcgcaggtccctccagagattagtcggattattgtggatcctaccaccgggaagcggtattgtcgcggaaaggttcttgggaaggggggatttgccaaatgttacgaaatgacggatctgacgaacaacaaagtatatgcagccaaaatcattcctcacagtagggtggcgaaacctcaccaacgggagaagatagacaaggagatagaattgcaccgtatactgcatcacaagcatgtcgtgcagttctatcactacttcgaggacaaggagaacatctacatcctcctcgagtattgttcaaggcgcagtatggcccacatacttaaggcacgcaaggtgttgaccgaaccagaagttagatattacctacgacagatcgtatccggcttaaagtacctgcacgagcaggaaatcctccatcgcgaccttaaattgggaaatttctttataaatgaagctatggagttgaaggtaggggatttcggcctggccgctcggctcgaaccactcgagcaccgcaggagaacgatctgtggcacgcctaattacttatcaccagaggtgcttaacaaacaggggcacggatgtgaatccgacatttgggctttgggttgcgttatgtataccatgttactcggcagacccccattcgaaacgaccaatttgaaggaaacctatcgctgtatcagggaggccaggtacactatgccaagctcccttctggcaccagccaaacatctaattgcttcaatgctctccaagaaccccgaggacagaccgagtctcgatgatattattaggcatgattttttctgtagggcttcactgcgaaccgattgcctgttagccgttgtgattcagttccagatatcaacttatcaggctcagctgcggatcagtcttcggaaacagttacttctcttcctggtggctaaaaagacgaagcaagatatcctgactcacattatagagtgcctgaagaagatgaagacctccacatccctgggcatgatttag

SEQ ID NO: 235295 - DNA, 1140 bp, synthetic construct
  misc_feature 1..1140: note = Description of Artificial Sequence: Synthetic coding sequence
  source 1..1140: mol_type = other DNA
atggagttgctgcgcacaataacttaccagcccgcagcatccaccaagatgtgtgagcaagctctgggaaagggctgtggagccgactcaaagaagaagagacccccacagcctcccgaagagagtcaaccccctcaatcccaagcccaagttccccctgcagccccacaccaccatcaccatcacagccattccggcccagagatcagtaggatcatcgtggatcccacaactggcaaacggtattgtcggggaaaggtgttgggtaaaggagggtttgcgaaatgttatgagatgactgatttgacgaacaataaggtgtatgccgcaaaaatcattccccatagccgcgtggctaagcctcaccaacgcgagaaaattgacaaagaaatcgaattgcaccgcatcctccatcacaagcacgttgtgcaattctaccattactttgaggataaagagaatatatacatattgctcgagtattgcagcagaagatctatggcccatatcctaaaagccagaaaagttcttacagagccggaagtgcggtactacctgaggcagatcgtttccggccttaaatacctgcatgagcaggagatcctccatagagatctcaagttaggcaatttttttattaacgaagcaatggagcttaaggtcggtgacttcggcctggccgcaaggcttgagcctctggaacaccgccgacggactatctgcggaacacctaactatttgagcccggaagtgctcaacaagcaagggcacggctgcgagagtgatatctgggccctcgggtgcgtcatgtatacaatgctgctgggccgaccccctttcgaaactactaatctgaaggagacttatagatgcataagggaagcgaggtacacgatgcctagcagtctgcttgcaccagcaaagcatctgatcgcatccatgctgagtaagaaccccgaggaccgcccttctctcgatgatatcattcgacatgatttctttctgcagggctttaccccagatagactgtcctcctcatgctgccacaccgtgccggactttcatctcagctcccctgcaaaaaatttttttaaaagggccgctgaacacattataagtgtgggtcaccaaatggggtag

SEQ ID NO: 235296 - DNA, 1476 bp, synthetic construct
  misc_feature 1..1476: note = Description of Artificial Sequence: Synthetic coding sequence
  source 1..1476: mol_type = other DNA
gtagatctgttaagagctggagaagtgcccaaaccatttcctactcattacaaggatctgtgggacaataaacacgtcaagatgccctgtagtgaacagaacctctaccctgtcgaagacgaaaacggggagcgtacagccggttctcggtgggaactgatccagacagcactcttaaataaattcacccggccacaaaaccttaaggacgcaattttgaagtacaacgtggcctactctaagaaatgggattttacagctcttatcgacttctgggacaaagtgctggaggaagccgaggcacaacatctgtatcagtctattctccctgacatggtcaagatcgcgctatgtctcccaaatatctgcactcaacctatcccccttctgaagcagaagatgaatcactccattacaatgagccaagagcagattgcaagtctactagccaacgcttttttctgcacattccccaggcgcaacgcgaaaatgaagtctgaatattcgagctatccggacattaatttcaaccgacttttcgaagggcgatcaagccgcaaacccgaaaaactgaaaactctcttctgctacttcagacgagtcaccgaaaaaaagcctacagggttggtcacttttactcgacagagtctggaggatttccccgagtgggaaagatgtgaaaaaccactcaccaggctgcacgtcacctatgagggcactattgaagagaacgggcaaggcatgttgcaggtcgactttgcgaaccgcttcgttggcggaggtgtaactagcgccggtcttgttcaagaggaaatacgcttcctcatcaaccccgaattgatcatctctagactcttcactgaggttcttgaccacaatgagtgtcttataatcaccggtacggagcaatactcagagtatacgggttacgccgagacttaccggtggtcacgatcccacgaggatgggagtgagagagatgactggcagcggaggtgcactgaaatcgtggcgattgatgctttgcacttcagacggtatttggaccagttcgtccctgaaaagatgaggagagaactaaacaaagcttattgtggtttcttgagaccaggcgtgtccagcgagaacctgagcgctgtggcaacaggaaattggggatgcggagctttcggcggagacgctcggcttaaagccctaatacagatcctggcagctgctgccgctgagagggatgtggtttatttcacctttggcgattccgagttgatgcgggacatctattcaatgcacatcttcctcacagagcgtaagctcacagtgggcgatgtttataaactgctcctgcggtactacaacgaggagtgccgtaactgttccactcctggtcccgacatcaaactctatccctttatttatcacgccgtggagagctgtgctgagacagcagatcattcaggtcaacggacggggacctag

SEQ ID NO: 235297 - DNA, 579 bp, synthetic construct
  misc_feature 1..579: note = Description of Artificial Sequence: Synthetic coding sequence
  source 1..579: mol_type = other DNA
tgaaccgagcagtattctgaatacacagggtatgctgagacatacaggtggagcaggagccacgaggatgggtcagaacgagatgactggcaacgacgttgcacggagatcgtagctattgatgcactccattttaggcggtacctcgaccagtttgtaccagagaagatgcgaagggaattgaacaaggcttattgcgggttcttaaggcctggagtctcgagcgagaatctgagcgccgtggctacgggcaattggggctgtggcgcttttgggggagatgccagattaaaagcacttatccagattctcgccgcagcagccgcagaaagagatgttgtgtactttacctttggggacagcgagctcatgcgtgatatctatagcatgcatatcttcttgactgagcgcaaactgaccgtcggagatgtctacaagctgttgctgcggtactacaacgaagaatgccgtaactgcagcacccccggtccagacataaagctttatcccttcatttaccatgccgtggagtcttgcgcagagaccgctgaccactccggccagagaactggcacttag

SEQ ID NO: 235298 - DNA, 468 bp, synthetic construct
  misc_feature 1..468: note = Description of Artificial Sequence: Synthetic coding sequence
  source 1..468: mol_type = other DNA
atggcagagtccagcgataaactgtatagggtggaatatgctaaaagtgggagagcctcatgtaaaaaatgttctgagtccattccaaaggattctctgagaatggctataatggtgcaatcccctatgtttgatggcaaggtgccacattggtatcattttagctgcttctggaaggttggacacagcatccgacaccccgacgtggaggttgacggcttctcagaactgagatgggacgaccaacagaaagtgaaaaagactgctgaggctggaggagtgactggggtgtacattctgggccagcacggccactctgcccctacattaaagctgcccggtgggccaagattgcgggagcagtctaaacctccgcctgcatgtcctctcccccacgtccaaattaaaagaatggtaccaatgcttttccaacaacacttgctggactctgcaagcagcgtggcgtag

SEQ ID NO: 235299 - DNA, 327 bp, synthetic construct
  misc_feature 1..327: note = Description of Artificial Sequence: Synthetic coding sequence
  source 1..327: mol_type = other DNA
atggccgagtcgtctgacaaactgtacagggtggaatacgctaagagcggcagagcttcctgcaagaagtgtagcgagtcaattccaaaggattctctcagaatggcgatcatggtgcagagcccaatgttcgacgggaaagtgccacactggtatcacttttcgtgcttctggaaagttgggcacagcatccggcaccctgacgtcgaggtggacggtttctcggaactcagatgggatgatcagcagaaagtgaaaaaaaccgctgaggccggaggcgtaaccgagcctcctatcccctgcggtattgaagtgatgggacgctag

SEQ ID NO: 235300 - DNA, 327 bp, synthetic construct
  misc_feature 1..327: note = Description of Artificial Sequence: Synthetic coding sequence
  source 1..327: mol_type = other DNA
atggctgagtcatccgacaagctttatagggtggagtacgcaaagtcggggcgtgcaagctgtaagaagtgctccgagtcaatcccaaaggatagcttgcgcatggcgattatggtccagtctcctatgtttgatggaaaagttccccattggtaccacttctcctgcttctggaaagtcggacactccatccgccaccccgatgtcgaagtcgacggcttcagcgagcttaggtgggatgatcagcagaaagtgaagaaaacagcagaagccggaggagttactgagcccccaatcccctgcggaattgaagtgatggggcgatag

SEQ ID NO: 235301 - DNA, 3045 bp, synthetic construct
  misc_feature 1..3045: note = Description of Artificial Sequence: Synthetic coding sequence
  source 1..3045: mol_type = other DNA
atggcggagagctctgataagctgtacagagtcgagtacgccaaatccgggagagcctcctgtaaaaagtgtagtgaatctatacctaaggacagcttgagaatggccattatggtgcaatccccaatgttcgatggtaaggtgccccactggtaccatttctcttgcttttggaaggtcggacattcaatcaggcatcccgatgtggaggtcgatggcttttcggagctgcgctgggacgatcagcagaaagtgaaaaagacagccgaggccggaggagttactggtaaggggcaggacggaatcggaagcaaagccgaaaagacgctgggagattttgccgcagaatatgcgaagagcaaccgttccacttgcaaagggtgcatggagaaaatagaaaaaggccaagtccggttgagcaaaaagatggtggacccagagaagccgcagctgggcatgatagatcggtggtaccacccaggatgcttcgtgaagaatagagaggaactcggattccgccctgagtatagtgcatcacagcttaagggattcagtttactggccacggaggataaggaggccctgaagaaacagttacccggtgtcaagtcagagggtaaaaggaagggcgatgaggtggatggcgttgacgaagtggcaaaaaagaagagtaagaaggaaaaggacaaagatagcaagctggaaaaggctctgaaggcacagaatgacctgatctggaacattaaggacgagcttaagaaagtgtgcagcacgaatgacctcaaggaactccttatcttcaataagcaacaggttccctcgggcgagtctgcgattctcgacagagtagccgacggaatggtgttcggggctctcctcccctgcgaagagtgctcagggcagttggtgtttaaaagcgacgcgtattattgtactggtgatgtgacagcctggacaaaatgtatggtcaagactcagacaccaaataggaaggagtgggtcactccgaaagagttcagggagatctcatacttgaaaaaactgaaggtcaaaaaacaagacaggattttcccgcctgagacctctgcctccgtggccgctactcctccaccgtccaccgcctccgctccggctgctgtcaacagttccgcatcagcagacaaaccccttagcaatatgaagatacttacattgggcaaactcagtcgcaataaagacgaggtgaaggctatgatcgaaaaactcggcggaaaactcactggtaccgcaaataaggcttccctgtgcatctccaccaagaaggaggtggaaaaaatgaacaaaaaaatggaagaggtgaaagaagcaaacatacgcgtggtcagcgaagacttcctgcaggacgtttcagcctcaactaaaagcctgcaggagctgttcctggctcacattctgagcccttggggggcagaggtaaaagccgaacccgtcgaggtggtggcgcctcgaggcaagtctggcgctgctctctccaagaagtcgaaggggcaggttaaggaggaagggatcaataagtccgagaagcgcatgaagctgaccctgaaagggggagccgcagtggatccagacagcggcctggaacattccgcccatgtcttggagaaaggcggaaaggtgtttagtgccaccctgggtttagtggatattgtgaaaggcactaattcatactacaagctgcagttgctggaggacgacaaggagaaccggtactggattttcaggtcttggggcagggtagggactgtgataggttccaacaaactggaacagatgcccagtaaagaagacgccatagaacactttatgaagctctacgaggaaaaaactgggaacgcctggcatagtaaaaactttactaaatacccaaagaagttctatccgctcgagattgactatggccaggatgaggaagccgtcaagaagcttactgttaacccgggaactaagtccaaactgcctaaacccgtccaagacctgatcaaaatgatatttgacgtggagtcaatgaaaaaagcgatggtagagtatgagatcgatctgcaaaagatgccactggggaaattaagtaagaggcaaattcaggcggcttattcgatcctgtccgaggtgcagcaggccgtaagccagggcagctctgattcacagattctcgacctgtctaacagattctatactctcattccacacgattttggaatgaagaagcctcccctcctaaataacgcagattccgttcaggccaaagttgagatgcttgacaacctcctcgatattgaagttgcctactctctgctgcggggagggagcgacgatagttcaaaggaccctatcgatgtcaactatgaaaagctgaaaaccgacattaaggttgtggatagagacagcgaagaggcggagattatcagaaaatatgtgaagaacacacacgcaacaacacataacgcatacgacctggaggtgattgacatatttaagattgaacgcgaaggcgagtgtcagcggtacaaacccttcaaacaattgcataataggagactgctttggcacggaagtcgcacaaccaacttcgcaggaatactgtcccaaggactgcggatcgcccctccagaggcccctgtgacaggttatatgttcgggaaaggcatctacttcgcagatatggtgagtaaatccgcgaactactgtcacacatcccaaggcgaccctatcggcctcatccttctgggtgaggtcgcgctgggtaatatgtatgagctcaaacacgccagtcatatcagtaagctgccaaaaggtaagcatagcgtaaaaggacttggaaagaccacccccgacccctcggccaacattagcttagatggcgttgatgtccctctgggcactggtatctcctctggtgtgaacgatacctccctgctctacaacgaatatattgtctacgacatcgcccaagtgaacctcaaatacctcctgaaacttaagtttaactttaagacatctttatggtag

SEQ ID NO: 235302 - DNA, 753 bp, synthetic construct
  misc_feature 1..753: note = Description of Artificial Sequence: Synthetic coding sequence
  source 1..753: mol_type = other DNA
atggcagaatcaagcgacaagttgtatcgagtcgaatatgctaaatctggcagagcaagctgcaaaaagtgttccgagtcaatacccaaagattccctgcgcatggctatcatggtccagtcgccgatgttcgatggcaaagtgccccattggtatcacttctcttgcttttggaaagttggacactccatcaggcaccccgacgtggaggtggatggcttttcagagctgcgctgggacgaccagcagaaggtgaaaaagacagccgaggccggaggcgtgactggcaaaggccaagacggcattggcagcaaggctgagaaaaccctaggagatttcgcggcagaatacgccaaaagcaataggagcacctgcaagggctgcatggagaagattgagaagggccaggtgagattatctaaaaagatggtcgatcccgaaaaaccccaactcggtatgattgatcgttggtaccaccctgggtgttttgtgaaaaatcgagaggaactcggcttcaggccagaatactcagcttctcagcttaagggctttagtttgttggctacagaggataaggaagctctgaaaaagcagctccccggagtcaaaagtgagggcaaaaggaagggggacgaagtggacggggttgacgaagtcgccaagaaaaaatccaagaaggagaaagataagaagaaaaagaaaaagaagaaaaaggaaagaaaaaaaaagaaaaaaaaacgcaagaaaaagtag

SEQ ID NO: 235303 - DNA, 2133 bp, synthetic construct
  misc_feature 1..2133: note = Description of Artificial Sequence: Synthetic coding sequence
  source 1..2133: mol_type = other DNA
atggatttctcaatggtggccggagccgcagcatataacgaaaagtccgaaaccggggctctgggggagaactattcctggcagatccccattaaccacaatgatttcaagatcttgaagaataatgagaggcaactatgcgaggtgcttcagaacaagttcggatgtattagtaccctcgtgtctcccgtgcaagagggcaattctaagtctctgcaggtctttcgtaagatgcttacacccagaattgaactgtctgtttggaaggacgacctcaccacccacgcagtcgacgccgtggtaaatgccgcaaacgaggacctgcttcacggtggcggactggccctcgccctggttaaagcaggcggattcgagatccaggaggagtctaagcagttcgtggcacggtatggtaaagtgtctgctggagagatagcggtgaccggagccggaagactgccatgtaaacagatcatccacgctgtgggccctcgttggatggaatgggacaagcagggatgcaccggtaagttgcaacgtgccattgtgtctatattgaactatgttatctacaaaaacactcatattaagactgtagccattcctgccctgagttcaggcattttccaattccctctcaacttgtgcaccaagacgattgtagaaacaatccgggtgtctctgcaaggtaaaccgatgatgtcaaacctaaaagaaatacacttggtctccaatgaggaccctaccgtcgctgcttttaaggcagcctccgagttcattttgggcaaatcagagctgggccaggaaacaactccctctttcaatgctatggtggtgaacaacctcacgctgcaaatagttcagggtcatattgaatggcagactgccgacgtgatcgtgaactcagtcaaccctcatgacatcactgtagggcctgtggctaaatcgatcttgcaacaggctggggtcgagatgaagtccgagtttctggccaccaaagcaaaacagtttcaacgctctcagcttgtccttgtcacaaagggattcaatctcttttgcaaatacatctaccatgtcctatggcatagtgaatttccaaagccccagatcctgaagcacgccatgaaggaatgtcttgagaaatgcattgagcagaatattactagtatttccttccccgctcttggtaccggcaatatggagatcaaaaaagagaccgctgcggagatcctttttgatgaagtgctgacgtttgcgaaagaccacgtaaagcatcagctgaccgttaagttcgtgatttttccaactgatctggaaatttacaaagcgttttcctcagaaatggcaaaaagatctaagatgctgagccttaataactatagcgtccctcagagcactcgcgaagagaagcgggagaacggtcttgaggctagaagccctgcgatcaacctgatggggttcaatgtagaagaaatgtacgaggctcacgcatggattcaaaggattctaagcctccaaaatcaccatattattgaaaacaatcatattctgtacctcggaaggaaggagcacgatatccttagccagctgcaaaaaacatcttccgtttcgattaccgaaatcatctctccgggaaggactgagctcgagatcgaaggagcacgggctgatttaatcgaagtcgtgatgaatatcgaagatatgttatgcaaggtgcaggaggagatggctaggaaaaaagaacggggtttgtggaggtcgttgggccaatggacaattcaacagcagaagacccaggacgagatgaaggagaatataatttttctgaagtgtcctgtgccgccaactcaggagctcctggaccaaaagaaacagttcgagaagtgcggattgcaggtgctgaaggtggaaaagatcgacaatgaggtattgatggctgcattccaacgaaagaagaaaatgatggaggagaagctacatcgtcagcccgtgtcgcaccggctgttccagcaggtcccctatcagttctgcaatgtggtatgcagagtgggatttcaaaggatgtacagcacaccctgtggaagatgccagtgtttgatcattggagccaccctgtggaacctagtgagttag

SEQ ID NO: 235304 - DNA, 2460 bp, synthetic construct
  misc_feature 1..2460: note = Description of Artificial Sequence: Synthetic coding sequence
  source 1..2460: mol_type = other DNA
atggacttttccatggttgccggtgctgccgcttacaatgaaaagtctgagacgggtgcacttggcgagaactactcttggcagatccccatcaaccacaacgacttcaagatcttgaaaaataacgaaaggcagctctgcgaggtgctgcagaataagttcggctgcatttccacactggtctcccctgtccaggaagggaatagcaaaagccttcaggtctttcgaaagatgctaactcctagaattgaactctccgtctggaaggacgaccttactacgcacgctgtggacgccgtggttaatgcagctaacgaggaccttttgcacggcggtggacttgctctcgctttggtgaaggcaggcggattcgaaattcaggaagaatccaagcagtttgtcgcccgatatgggaaggtgagcgccggtgagatagcagtgaccggcgctggtcggctcccctgcaagcagatcatccatgcagtcggcccaagatggatggagtgggacaaacagggctgtaccgggaagctgcagcgagcaatcgttagcatcctgaactatgtgatttacaagaacacacacattaaaacagtagccatccctgcactgagtagtggcatctttcagtttcccctaaacctctgcactaaaaccatcgtggaaacgatcagggttagtctgcagggcaagcctatgatgagcaacctcaaagagatccaccttgtaagtaatgaggatccgaccgtggcagccttcaaagctgcgtccgagtttattcttggcaaatccgaacttggtcaagaaactactccctcgttcaacgccatggtggtaaataacctgacactgcagatagtccagggccacattgaatggcagaccgcggacgtgattgtaaactctgttaatcctcatgatattacagtggggccagtcgcaaagagcattctacaacaggcaggtgtcgaaatgaagtcagaatttcttgcaacaaaagctaagcagttccagaggtctcagttagtcctggtcacaaagggctttaacttattctgtaagtatatttaccatgtactgtggcattctgaattccccaagccgcagatcctgaagcacgctatgaaagagtgtcttgaaaaatgtatagaacaaaacataacctccattagttttccggcactaggtacaggaaacatggagattaaaaaggaaactgcggcagaaattttgttcgatgaggtcttgacctttgccaaagatcacgtgaaacatcaactgaccgttaagtttgtcatattccctaccgatctagaaatctacaaggcattttcgtctgagatggctaagagaagcaagatgctgtcactgaacaactatagtgtccctcagtctacgagagaggagaagcgagagaacggcctggaggctcgtagccctgccatcaacttaatgggtttcaacgttgaagagatgtatgaggcacatgcttggatccaaaggattctgtctctgcagaatcaccatatcatcgaaaataaccatatactgtacctcgggaggaaagagcatgacattctgagtcagttacaaaaaaccagttctgtctctatcaccgagatcattagccccggaaggaccgagctggagatcgaaggggcaagagccgacctaatagaggtagtgatgaatatcgaggatatgctgtgcaaagtgcaggaggaaatggctcggaaaaaggagcgaggattatggcggtcccttgggcaatggaccatccagcagcagaaaacccaagatgagatgaaggagaatattatattcctcaaatgccccgttccgccaacacaggaactactcgaccagaagaagcaattcgaaaagtgcgggttacaagtgctcaaggtggaaaagatcgataacgaggtgcttatggcggcatttcaacgaaagaagaagatgatggaggaaaagctgcatcggcagcctgtctcccaccgattattccagcaggttccttatcagttctgtaatgtggtgtgtcgggtcggcttccagaggatgtactcaactccctgtgaccccaagtacggcgcaggcatatattttacaaagaacctcaaaaacctggcagaaaaggccaaaaaaatctctgcagccgacaaactaatttacgtctttgaggccgaagttcttacaggtttcttctgccagggacaccctctgaacatcgtgcctccccctctgtctcccggagctatagatggccacgactcagtcgtcgataacgtcagcagccccgagacattcgtgattttctcaggcatgcaggccatacctcagtatctgtggacctgcacacaggaatacgtacagtcccaggactactctagcggccctatgcggccatttgcccaacacccatggagggggttcgcgtctggatctcccgtagattag

SEQ ID NO: 235305 - DNA, 2106 bp, synthetic construct
  misc_feature 1..2106: note = Description of Artificial Sequence: Synthetic coding sequence
  source 1..2106: mol_type = other DNA
atggcccaagctggcgttgttggggaagttacacaagttttatgtgcagccggaggagcccttgagttgcccgaactgcgacggaggctgcggatgggactgtcagctgatgcccttgaaagactgctgaggcagcggggacgcttcgttgttgcggtccgcgctggtggcgcagcagcggcacctgagagggtcgtcttggccgcatcacctttaaggctatgtcgcgctcaccaggggtctaaacctggatgtgttggtttgtgtgctcaactgcacctgtgccggttcatggtgtacggcgcatgtaaattccttcgcgcaggcaaaaactgccgtaattcacacagcctgaccacggagcataatctcagtgtcttacgcactcacggggtggaccatctgagctacaacgaattgtgccagctgctgtttcagaatgacccatggctactccccgagatctgtcagcactacaataaaggcgatggacctcacggaagctgcgcattccagaagcaatgtattaagttacatatttgtcagtacttcctccagggggagtgtaagttcggcacttcatgcaagagatcacatgactttagcaactctgagaatctggagaagctggagaaactcggaatgtcctcagacctggtgagtagactgccaactatctaccggaacgcacacgatattaaaaataagtcttccgcccctagtcgagttccgcctctattcgtcccacaagggacctccgagcgcaaagactcatctggatctgtttcccccaatactctgtcccaagaggaaggcgaccaaatctgtctataccacatccgaaagtcatgttcatttcaagataagtgccatcgagtgcactttcacctgccatatcgctggcagtttctggacaggggcaaatgggaggatctagacaacatggagctcatagaggaagcctactgtaacccaaagatcgagcgaatcctgtgcagtgagagcgcatctacattccactcgcattgcctgaactttaatgcgatgacgtatggggcaacacaggcacggcgtctgagcacagcttcctcagtcaccaagccccctcatttcatcctgacaaccgactggatttggtactggagtgatgaatttggctcttggcaagagtacggccgtcaagggaccgtccatcctgtgacgacggtctcaagcagtgacgtcgagaaagcatatctcgcatactgtactcccggaagtgacgggcaggcagccaccttgaaattccaagccggaaagcacaactacgaattggattttaaggccttcgtacagaagaacctcgtctatgggacaaccaaaaaagtatgcaggagaccaaagtacgtgtcgccccaggacgtaaccaccatgcagacatgcaataccaaattccctgggccaaaatctatcccagactactgggatagttcggctcttcccgacccaggctttcagaagatcacacttagttccagctctgaggagtatcagaaggtctggaacctgtttaataggacgctcccattttactttgtacaaaaaattgaaagagtgcagaatctggccctgtgggaagtgtaccagtggcagaaaggtcagatgcagaagcagaatggtggaaaggccgtagatgaacgtcagctctttcatggaacatcagcgatcttcgtggatgctatatgccagcagaacttcgattggcgggtgtgcggagtacacgggacaagctacggaaaagggtcctacttcgctagagatgctgcgtatagccaccattactctaaatcagatacccaaacacatacgatgtttctcgccagggttctggtcggcgagttcgttcgtggcaacgccagctttgttcgacctcctgccaaggaaggatggtctaacgctttctatgattcttgtgtgaactctgtctcggacccctctatatttgtgattttcgagaaacatcaggtgtatcccgagtatgtgatccagtataccacatctagtaaacctagcgtgaccccctctatattattagcacttgggtcactcttttcaagccgacagtag

SEQ ID NO: 235306 - DNA, 393 bp, synthetic construct
  misc_feature 1..393: note = Description of Artificial Sequence: Synthetic coding sequence
  source 1..393: mol_type = other DNA
atgtttttggccagggtgctcgttggggaattcgtgagaggaaacgccagcttcgtgaggcctcctgccaaggagggatggtctaatgctttttacgattcttgcgtgaattctgttagtgatccctccatatttgtaattttcgaaaagaccagatccacacagagcatgagttcctctacaccacctcctccctccccccgatcacatcctccctcatgctggccttgggcaccctgcagcgccgctgactcggaaaggactggtgtcttccaggccttccacttgctgtgcctcgagatggcaatatgggccttcccgtttctcttcaaacagaagctgttaatgaactgttcgcttaatattgatctttccatgaagctgtgttcttag

SEQ ID NO: 235307 - DNA, 849 bp, synthetic construct
  misc_feature 1..849: note = Description of Artificial Sequence: Synthetic coding sequence
  source 1..849: mol_type = other DNA
atgtcaaaactggctagctttctagggttcagcaagcagtccccccaaaaaaaaaaccatctagtgcttgaaaagaaaaccgaatccgccacattccgagtctgtggcgaaaatgtgacatgcgtcgaatacgccatcagctggttacaggatctcatcgagaaggaacagtgcccatacacatctgaggacgagtgcattaaagactttgatgagaaagagtatcaggaactgaatgagctccagaagaagctcaacataaatattagtctggatcataaacggcctctaatcaaggtgctgggaattagtagagacgtaatgcaagctcgagatgaaattgaggccatgattaagagagttcggttagcaaaagagcaggagtcaagagcggattgcatatcagagttcatcgagtggcagtacaacgacaacaacacctctcactgctttaataagatgaccaatcttaagctcgaggacgcgagacgcgagaaaaagaagacagtcgatgttaaaatcaatcacaggcactatacagtgaacctgaatacctataccgcaactgatactaagggccactccctctcagttcaacgcctgacaaaaagcaaagtcgacatccctgcacactggagcgatatgaaacagcagaatttctgcgtagttgagctcctccctagtgatccagaatataacactgtcgctagcaaatttaaccagacttgttcccactttcggattgagaaggtcaacgttatgataagagcgtgctcaccgtcctattgggaagcagaagtagagggcttacacgaaccaaggagcttgactccagtttgggttacgtag

SEQ ID NO: 235308 - DNA, 2394 bp, synthetic construct
  misc_feature 1..2394: note = Description of Artificial Sequence: Synthetic coding sequence
  source 1..2394: mol_type = other DNA
atgtatctgcggaggctgcttcggccactgcagatgctcctggtgaaagaaggggtgcaaaatgccaagactgacgtcgttgtgaattccgtgccattggatctcgtattatcccggggtccgttatcaaaatctctgctcgaaaaggctggccctgagctacaggaggaactcgatacagtgggccaaggcgtcgcagtcagtatgggcactgtcttgaaaacaagtagttggaatcttgactgccgctacgttctgcacgtggtggctcccgaatggagaaatggaagcacaagctcgctaaaaatcatggaagatatcatccgagaatgcatggaaataacagaatccctgtccttaaagagcattgcctttcccgcaataggtaccggtaacttgggtttccccaaaaatatctttgccgaattaatcatctcggaggtgttcaagttttcctccaagaatcagcttaagaccctgcaagaggtccatttccttctgcatccctcagaccacgaaaacatacaagccttctctgacgagttcgccaggcgcgcaaatggcaacctggtttcagacaagatcccaaaggcaaaggacactcagggtttctacggcacagtttcgtccccagattcgggagtctacgaaatgaaaattggcagcattatatttcaggtggcttcaggcgacatcactaaagaagaggctgatgtgattgtgaacagtacttcaaattcattcaatttgaaggcaggagtgagcaaggctatcctcgagtgcgctggtcagaacgttgaacgagagtgttcccaacaggcacaacagaggaaaaacgactatattatcaccggtggcggtttcttgcgctgcaaaaatattatccacgtgataggaggaaatgatgtcaaaagcagcgtgtcctccgtgttgcaagaatgcgaaaaaaaaaattatagttcaatctgcctccctgcaattggcactggtaatgcgaagcaacaccccgataaggtagctgaagctatcattgacgcgatcgaagatttcgttcagaaaggaagcgcccagagcgtgaaaaaggtgaaggtcgttatattcctgccccaggtcctagacgtattctacgctaacatgaaaaaaagagaaggcacacaattgtcttcgcagcagtccgtgatgtccaaactagcatccttcctgggtttctccaagcagtcccctcagaaaaaaaaccatctcgttttagaaaaaaagaccgaaagtgccaccttcagagtctgtggcgagaatgtgacatgtgtcgagtacgccataagctggctccaggacctgatcgaaaaggaacagtgcccgtacaccagtgaggatgagtgtatcaaggactttgacgaaaaggaataccaagagctcaacgagttgcaaaaaaagctgaacataaacatatcgctggaccacaaaagaccgctgatcaaggtgttgggtatatccagggatgtcatgcaggccagagacgagattgaggccatgatcaagcgggtgcgactggccaaagagcaggaaagcagggccgattgtatcagcgaattcatagagtggcagtataacgataacaatacatcccattgttttaacaagatgaccaaccttaaacttgaggacgccagacgagagaagaagaagacggtagacgtgaaaatcaatcaccgccactacaccgtcaatctcaacacatacaccgccaccgataccaaagggcactctctaagtgttcagcgactaactaagtcaaaagtggatatccctgcacactggtccgacatgaagcagcagaacttttgcgtggtggaattgctgcctagcgatccagagtataacacagtggcctccaagtttaatcagacttgctctcactttcgaattgagaaaatcgaaagaatccagaaccccgatctgtggaatagttatcaggccaagaaaaagaccatggatgcgaaaaatggtcaaacaatgaacgagaagcagcttttccacggcacagacgcagggtccgtgccgcacgttaatcggaacgggttcaatagatcatacgcgggaaaaaatgctgtggcatacggcaaggggacgtacttcgcggtgaacgcaaattactccgccaatgatacttactctaggcccgatgcaaatgggagaaagcacgtgtattacgtccgcgtgcttaccggtatttacactcacgggaatcactcattgattgtgcctccttctaagaacccacaaaaccctactgacctgtatgataccgttaccgacaacgtacaccaccccagtctcttcgtggccttttacgactaccaagcctacccagaatacctgatcactttcaggaaatag

SEQ ID NO: 235309 - DNA, 5162 bp, synthetic construct
  misc_feature 1..5162: note = Description of Artificial Sequence: Synthetic coding sequence
  source 1..5162: mol_type = other DNA
atggcagtcccaggaagctttccactcctcgtagaaggcagctggggtcccgatcctccaaagaacctaaatactaaattgcagatgtacttccaaagtcccaaaaggtctggaggcggagaatgtgaggttcgtcaggacccaagatcacccagccgattccttgtgttcttctatcccgaggatgtgcgacagaaggttcttgagcggaaaaatcacgaactcgtgtggcagggtaaagggaccttcaagcttacggtccagcttcccgcaactcctgacgagatcgaccatgtttttgaagaggaactgctgaccaaggaatctaaaaccaaggaggacgtcaaagagcctgatactataagattcgtggatgactgcacaaaacaccactctatcaaacaactgcagctcagtccgcgtctcttggaggtgaccaatacgattagagttgaaaacctgcccccaggggctgacgactactcactgaagctatttttcgaaaacccctacaatggaggcggtcgcgtcgcaaatgtcgagtattttccggaagagtcctccgcgctgatagaattcttcgataggaaggtgcttgatacgattatggctacaaaactggactttaataagatgcctctctcggtcttcccatactacgcttcgctcgggacagctttgtacggaaaggagaagccactcatcaaactgcctgcccctttcgaagagagccttgatctgcccctgtggaaattcctgcagaagaagaatcatcttattgaagagataaatgacgagatgcgtagatgccattgtgagcttacttggagtcagctctcaggaaaggtgaccatcaggcccgctgcaaccctggtgaacgaggggaggccgcgtataaagacctggcaggctgataccagcaccactctctcttctattcgaagtaaatataaggttaatcccattaaagtagaccctacaatgtgggatacaatcaaaaatgatgtcaaggatgatcggattttaatcgagttcgacaccctaaaagaaatggttattttggctggcaagtcagaggatgtgcagtccattgaggtgcaagtcagagaactcattgagtctacaacccagaaaatcaagcgggaggagcaatcgctgaaagagaagatgatcatttccccaggccgatatttcttactgtgccacagctccctcctggaccacctcctgactgagtgccctgagatcgaaatttgttacgaccgcgtaacacagcatttgtgcctgaaaggaccgagcgctgacgtgtacaaagctaagtgtgaaatccaggaaaaggtatatacaatggcccagaagaacatccaggtgtcccctgaaatattccagttcctgcagcaggtaaattggaaggaatttagtaagtgcctgttcattgctcagaagattctcgctctctacgagcttgagggaaccactgttctcctgactagttgcagtagtgaagcgctgctagaggccgaaaagcagatgttatcggccctcaattacaagagaatcgaggttgagaataaggaagtactgcacgggaagaagtggaaaggcctgacccacaatctgctgaagaaacagaacagttctcctaacactgtgattatcaacgagctgaccagcgaaactaccgccgaagtaatcatcaccggttgcgtgaaagaggtcaacgagacctacaagctcctgtttaacttcgtggagcagaatatgaagatagagcgactggtggaagtcaagccatccttggtgatcgactaccttaagactgagaagaagttgttctggccaaaaatcaagaaggtcaatgtgcaggtgtcctttaatcctgagaacaagcaaaaggggatcctgttaactggctccaagacagaggtcctaaaggcagttgacatcgtaaagcaggtgtgggactctgtctgtgtcaagtctgtccacaccgacaaaccaggagctaagcaattctttcaggacaaagccagattctaccagagtgaaatcaagcgtctgtttggatgctatatagaactgcaagaaaacgaagtaatgaaagaaggtgggtcccccgctggacaaaagtgtttttcccggacagtgttggcccctggtgtagtgctgatcgtgcaacagggggacctggcgagactcccagtagatgtggttgtgaacgccagtaacgaggatttgaagcattatgggggactggcggctgcgctttcgaaggccgcaggccctgagctccaggcagactgcgatcaaatagtgaaaagagaggggagactgctgcccggaaatgctactatctccaaggctggtaaacttccctaccatcatgtgatccacgcagtgggccctcgatggagcggatacgaagccccaagatgtgtctacctgctccgcagggcagttcagctgagcctttgtctggccgagaagtacaagtatcgctccattgcaatccccgcaatcagctcgggcgtgtttggatttcctctgggccgttgtgtcgagacaatcgtgagcgcaatcaaggagaacttccaatttaagaaggacggacactgcctgaaggagatatacttggtggatgtctccgaaaagacagttgaggcctttgccgaggctgttaaaacggtcttcaaagcaacattgcccgataccgccgcaccgcctggactgccccctgctgccgcaggcccagggaagacttcgtgggaaaaggggtcccttgtctcccctggaggattacaaatgcttcttgttaaggagggcgtacaaaacgccaagaccgatgtagtagtgaacagcgtcccgctcgacctggtcttgtctcgcggtccgctgtccaagtcacttctagaaaaagccggaccagagctccaagaagaactcgatacagtaggacaaggggtcgccgtgtctatggggaccgtgctgaaaacttcgtcatggaatctggactgccgatatgtgctacacgttgtggcccctgagtggcgcaacggcagcacatctagcctgaagatcatggaggacattatccgggaatgtatggagataacagagtctctctcgctcaaatctatcgcgtttcctgctattggtactggaaatttgggctttcctaaaaacatctttgcagagcttattatcagtgaggtgtttaaattcagcagtaagaaccagttaaagaccttacaggaagtccacttcctcctccatccatccgaccacgagaatatccaggcgttttccgacgaattcgccaggcgcgcaaatggcaacctcgtgagcgataagatcccaaaggctaaagacacccagggattctatggcaccgtgtcctctccggactctggcgtctacgagatgaagatcggaagtattatattccaagtggccagcggcgacatcactaaagaggaagcggacgtgatcgtgaattctacctccaatagcttcaacctgaaagtgggggtctctaaagctattctggaatgcgccggacagaacgtagagcgagaatgctctcagcaagctcagcaaagaaagaatgattacatcatcacgggcggtggcttcctcaggtgtaagaacattatccacgtcattggtggcaacgacgtgaaaagttccgtgagctccgtgttgcaggagtgtgaaaaaaagaattattcctccatatgtttaccagctatcggcacagggaacgcgaagcagcatcctgacaaggtagccgaggctataattgacgcaatcgaggactttgtacagaaggggtccgcccaaagtgttaagaaagtgaaagtggtcatcttcctgccacaggtgttagacgttttctatgcaaatatgaagaagcgcgagggcacgcagctctcctcacaacagtccgtaatgtccaaattagcatcattcctcggtttttctaagcagagccctcagaaaaaaaatcacctagtgctggagaaaaagactgagtcagcaaccttccgtgtttgtggcgagaacgtgacatgcgtcgagtacgccatttcatggctccaggacttaatcgagaaagagcagtgcccttacacttccgaagacgaatgtataaaggatttcgacgagaaagaataccaggaactaaacgaattgcagaagaagctgaatattaatatctccctagaccacaagagacctcttataaaagttttgggaatcagtcgggatgttatgcaggccagggatgagattgaagcaatgatcaagcgcgtgcgcctggccaaagaacaagagagcagagccgactgtatcagtgagttcatagagtggcagtataacgataataacacctcccactgttttaataaaatgacaaatcttaaactcgaggatgcccgaagagaaaagaaaaagactgtggacgttaagattaaccacagacattatactgtcaatctgaacacgtacaccgcaaccgacaccaaaggccacagcctgagtgtccaacgactgactaagtctaaagtggatatacctgcccattggtctgatatgaagcaacaaaacttttgtgtggttgagctactgccttccgaccccgaatacaataccgtggcctctaagtttaatcagacctgcagccactttcgaatcgagaagattgagagaattcagaatcccgatttgtggaattcatatcaggcgaaaaagaaaacaatggatgccaagaacggtcagactatgaatgaaaaacagctttttcatggaaccgatgctggctcggtgccccatgtcaatagaaacggcttcaataggtcttacgcaggcaagaacgcagtggcctacggaaaaggtacctatttcgcagtgaatgctaactattccgctaacgatacttattcccgacctgacgccaacggacggaaacacgtgtattacgttagggtgcttaccgggatctacactcacggtaatcatagcctgattgtgccccctagcaaaaatccccagaaccccaccgatctgtatgacactgtgacggacaacgtgcaccacccatctctgtttgtcgccttctatgactatcaggcctatcccgaatacctcatcacattcaggaagta

SEQ ID NO: 235310 - DNA, 5405 bp, synthetic construct
  misc_feature 1..5405: note = Description of Artificial Sequence: Synthetic coding sequence
  source 1..5405: mol_type = other DNA
atggccgtgcctggatccttccctttactggtagagggctcatggggccctgatccgcctaagaacctgaacaccaaattgcaaatgtatttccagagtcctaaacggtccgggggtggggagtgcgaggttaggcaggaccccaggagtccgtccagatttctcgtgtttttttaccccgaggatgtccgtcagaaagtactcgagcgtaagaatcacgagctagtatggcaaggcaaaggcacattcaagctgacagtccagctccccgcaacacctgacgagatcgaccacgtatttgaagaagaactgttgactaaggagtcaaagacaaaggaggacgtgaaagaacctgacgtttcagaagagctcgacaccaaacttccactcgatggcggattagacaagatggaagacattccggaagaatgtgaaaatatatccagcttggtcgctttcgaaaacctcaaagctaatgtgacagatattatgcttattctactggtggagaatatctccggactttccaatgacgactttcaggtcgaaatcatccgagattttgatgttgccgtggtaactttccaaaaacatattgacaccataagattcgtcgacgattgcacaaagcaccattcgatcaaacagctgcagctcagccctcgcctgctggaagtaaccaatactatccgcgtggaaaatttaccccctggcgctgacgattattcactgaagctgtttttcgagaacccgtacaatggcggagggagggttgcaaatgtggagtatttcccagaagagtccagcgcactcattgagttttttgacaggaaggtattggacaccatcatggctacaaaactggacttcaacaagatgccactctcagtctttccttattacgcctctctcggaacagccctgtacggaaaagaaaagccattgatcaagctgcccgcacctttcgaggagtcgctcgacttaccactgtggaagttcttgcagaagaaaaatcacttgattgaggagatcaatgacgagatgaggcgctgccactgcgaactgacgtggtctcagttgtcaggcaaggtgactattcgcccagccgcaactctggtgaatgaaggaagaccacgcataaaaacctggcaagccgatacatcaacaacgttgagttctatcaggtctaagtacaaagtcaacccgatcaaagtggacccaaccatgtgggatactatcaaaaacgacgtgaaggacgataggatcctgatcgagttcgacacattgaaagaaatggtgatcctcgccggtaagagcgaagatgtgcaatctattgaggttcaggttagggagttaatcgaaagtaccacccaaaaaatcaagagagaagagcagtcgctgaaggagaagatgataatctcgccaggtcgctactttctactctgccattcctctttgctggaccatctattgactgaatgccccgaaatcgagatttgttacgatcgagtgactcagcatctatgtttgaagggaccctctgcggatgtgtacaaggccaagtgcgagatacaagagaaagtgtataccatggcccaaaaaaacatccaggtgtcaccggagatctttcaattcctacagcaggtgaactggaaggagttctccaagtgtctcttcattgcccaaaagatcttggctctctatgagctcgagggaaccaccgtgctactgacatcctgctcgtccgaggcccttctagaggctgagaaacagatgctgagtgccctgaactacaaaagaattgaagtcgaaaataaagaggttctccatggcaagaaatggaaaggactcactcataacctacttaaaaaacaaaattcaagccccaacactgttatcatcaacgaattgacctccgagacgaccgctgaagtgattataaccggatgtgtgaaagaggttaatgagacctataagctcctgttcaacttcgtggaacagaatatgaagattgagaggctggttgaagtaaaaccttctctggtgatcgattatctgaagactgaaaagaaactcttctggcccaagatcaagaaggtgaacgtccaggtatcattcaatcctgaaaacaagcagaaaggcatactcctaaccggatccaaaactgaggttctgaaggctgtggatatcgtgaagcaggtgtgggattctgtctgtgtgaaatccgtgcacaccgacaagcccggagccaagcagttttttcaagacaaagcccgtttctatcagtctgagatcaagagactgttcggttgttacatcgagctacaggagaacgaagtgatgaaagagggcggttcccctgcaggccagaagtgctttagtagaacagttctggcacccggagtagtcctgatcgtgcagcagggagatctggccaggctgccggtggacgtcgttgttaacgcatccaatgaggacttgaagcactacggcggattagccgctgccttaagtaaggcggcaggccctgagctccaggcagactgcgaccaaatagtaaagcgcgagggacgactacttcctgggaatgccactataagcaaagccggaaaattgccttaccatcacgtcattcacgcagtagggccacggtggtcgggctacgaagctccaaggtgcgtgtacctgctgcgcagagcagttcagttgagcctgtgtttggccgagaagtataagtatcggagtatcgccatcccagcaatcagtagcggagtgtttggctttcccctgggaaggtgcgtggaaactatcgtctccgcaatcaaggaaaacttccagttcaaaaaagatggacactgcctcaaggagatttatctcgtcgacgtctccgaaaagactgttgaagcattcgctgaagcagtgaaaacagtgtttaaggcgacactgccagatacagcagcacctcctggtcttcctccagccgcagcaggcccaggaaagacatcctgggagaaggggtcattggtgtcacccggaggactacagatgctgctagtgaaggaaggggtacagaacgcaaagacagacgtggtcgtgaatagtgtgcccctggacctggtcctgtccaggggccctcttagtaaatcacttctggagaaagctggacctgagcttcaggaagagcttgataccgttgggcagggcgtcgctgtgtcgatgggcactgtgcttaagacctcttcttggaatctggattgtagatacgtgctgcacgtggtcgcccctgaatggaggaacggatccacaagctccctgaagattatggaggacattatccgggagtgcatggagattaccgagagcctttcactcaaaagcatagcttttccggcaattggcacgggtaatctcggattccctaaaaacatttttgctgagctgatcatttctgaagttttcaaattttccagtaagaatcagctgaagacgctgcaggaagtgcacttcctgttacatccctccgaccacgaaaacattcaggctttcagtgatgaattcgcaagaagggcgaatggtaacttagtttccgacaagatccctaaggcaaaagatactcaggggttttatgggacagtatctagtccagatagtggcgtctatgagatgaagattgggagtattatattccaggttgcctcaggcgatattaccaaagaggaggccgacgtcatagtaaactcaacctccaactcctttaatctcaaggccggtgtaagcaaagctattctcgagtgtgctggccagaacgtcgagcgtgaatgcagccaacaggctcagcagagaaagaacgattacattatcacaggcggtggctttttacgatgtaaaaatatcattcatgtaattggagggaatgacgtgaagagcagcgtctccagcgtgctacaagaatgtgagaagaagaactactcgtccatttgtttacccgctatcgggaccggaaatgctaagcagcatcccgacaaggtggccgaagcaattatcgacgcaatagaagacttcgtgcagaagggtagtgcacagagtgtcaagaaagtaaaggtggtcatcttcctgcctcaggtccttgacgtgttctacgccaatatgaaaaagagggaggggactcagctgtcatctcaacaatcagttatgtcaaagcttgcatcctttctcgggttttccaaacaatccccccagaaaaagaaccacctggtactcgagaagaagaccgagtctgccacattcagagtgtgcggcgaaaacgtgacttgtgtcgaatatgccatctcttggctgcaggatctcattgagaaagagcagtgcccctatacgagcgaggacgagtgtattaaggactttgacgagaaggaataccaagagctgaacgaattgcagaagaaactgaatatcaatatcagccttgatcataaacgaccactgatcaaggtactaggcatttcaagagacgttatgcaggcacgggatgagattgaagccatgattaagcgcgtgcgcctggcgaaggagcaggagagccgagccgactgcattagtgaatttatcgagtggcaatacaacgacaacaacacctctcactgtttcaataagatgacaaacctgaagttggaagacgccaggagggagaaaaaaaagaccgtagacgttaaaatcaaccatcgccattacacagtgaatctcaatacttatacagctactgacactaagggtcactccctgtccgtccagcgactcaccaagagcaaagtggacatccccgcacattggtcagatatgaagcaacagaatttttgcgttgtggagcttctgccatcggaccccgagtacaataccgtggcctccaagttcaaccagacctgttctcatttcaggattgaaaagatcgagcgcatacagaatccagatctttggaacagctatcaggcaaaaaaaaagacgatggatgcgaaaaacggccagaccatgaatgagaaacaattattccacggcacggacgctggatcagtgccccacgttaacagaaatgggtttaatcggagttacgccggaaaaaacgctgttgcatatgggaaaggcacctactttgccgtgaacgctaattatagtgctaacgatacgtacagtaggccagacgctaacggacgcaaacatgtttattacgtccgggttctcacaggcatatatacacacggcaatcactccttaatcgttcccccttcaaaaaacccccagaatcctaccgatctgtatgatactgttacggacaatgtgcatcatccctcgttatttgtagcattttacgattaccaggcctaccctgaatacctgataacctttcgaaagta

SEQ ID NO: 235311 - DNA, 585 bp, synthetic construct
  misc_feature 1..585: note = Description of Artificial Sequence: Synthetic coding sequence
  source 1..585: mol_type = other DNA
tgagtcaggaggcgagctgaactcaggatggccgtcccaggctctttcccattactcgtagaaggaagctgggggccagatccccctaaaaacctcaatacaaaactgcagatgtacttccagtcgcctaagcggagtggcggtggtgagtgtgaagtcaggcaggaccctcgatcccccagtcgtttcctggtatttttttaccctgaggatgtccgccaaaaggtgctggaaagaaaaaaccatgagctagtgtggcaaggcaaaggaactttcaagctgacagtgcagctcccggctactcctgacgagattgaccatgtgttcgaggaagaactcttgacaaaggaatccaaaactaaagaggacgttaaggaacctgataccatccgcttcgtcgacgactgtactaaacaccactccatcaaacagttacagctaagcccccgtcttctggaagtgaccaacactatacgggtggaaaacctgcccccaggagctgatgactactcactgaaacttttctttgagaatccttacaatggaggaggaagagttgccaatgttgaatacttcccagaatag

SEQ ID NO: 235312 - DNA, 1335 bp, synthetic construct
  misc_feature 1..1335: note = Description of Artificial Sequence: Synthetic coding sequence
  source 1..1335: mol_type = other DNA
atgctccagagaatagggttgatatttctgcataacattgttgtggttagcaactgcttttattttcaggccttcttggatgaatttacaaactggagccggatcaacccgaataaggctaggattcctatggcaggcgacacccagggcgtggtgggcacagtgtccaagccctgcttcacagcatacgagatgaaaatcggcgctattaccttccaggttgcaaccggcgacatcgcgactgaacaggtggatgttatagtgaatagcacagctcgtacatttaatcgcaagagtggtgtgtccagggccatcctagaaggtgcaggtcaagcagtcgagagcgagtgtgcagtgttggccgctcaaccacacagagactttatcatcacacctggcggatgtctgaaatgtaaaattattattcatgtacctggcggaaaggacgtgaggaagacagtaacttccgtactggaagagtgcgagcagcgtaaatacacgagcgtgtctctgcctgccattgggactggcaacgccggaaaaaatcctataaccgtggcggacaacattattgacgctattgtggattttagcagccagcacagtacaccaagcctaaagaccgttaaggtggttatttttcagcctgaattgctcaacattttttatgactccatgaaaaaacgggatctgtcagcgagcctcaatttccagtccaccttctcaatgaccacctgcaaccttccagaacattggactgatatgaatcaccagctgttttgcatggttcaactggaaccaggccaatctgagtacaacaccatcaaggataaattcaccagaacgtgttctagctatgcaattgaaaaaatcgagcgaatccaaaacgcatttctttggcagtcctaccaggtgaaaaagaggcagatggatatcaaaaacgaccataaaaacaatgaacgcttattgtttcacggaacagacgccgattctgtcccttacgtgaaccagcacgggtttaacagatcttgcgctgggaagaacgcagtgagttacggaaaaggaacatattttgcagtggatgccagctattcagctaaggatacatactctaagcccgacagtaacggacgtaagcatatgtatgtggtcagggtgcttactggagtctttacaaaaggcagagcaggtctagtaaccccacccccaaaaaaccctcacaatccaaccgatctgttcgattcagtcacaaataatacaagatcacctaagctgtttgtggtctttttcgacaatcaggcatacccagaatatctcataaccttcacggcctag

SEQ ID NO: 235313 - DNA, 2037 bp, synthetic construct
  misc_feature 1..2037: note = Description of Artificial Sequence: Synthetic coding sequence
  source 1..2037: mol_type = other DNA
atggccgctcctggcccactgcccgcagctgcacttagccccggagccccaacgccccgtgagcttatgcacggtgtggccggtgtgacgtctcgggcaggacgtgaccgcgaggcgggttccgtgcttcctgccggtaatcggggagctagaaaagcttccaggcgctcatccagccgctctatgagtcgggataataagttctcaaagaaggattgtttatcgatccgcaatgtagtagctagtattcaaaccaaagagggcttgaatcttaaactgatttcaggcgatgtgctctatatatgggctgacgttatagtcaacagtgtccccatgaacctgcagctgggcggaggaccactaagtcgagctttcctccagaaggctggtcctatgctgcagaaagagctggatgaccggcgacgcgagaccgaagagaaagtgggaaacatttttatgaccagcggctgcaatctcgactgcaaggccgtgttgcacgctgttgccccttactggaacaacggtgcagagacctcatggcagatcatggccaacattatcaagaaatgtctcacaacagtggaggtgctatcgtttagctctatcacttttccgatgatcgggaccggatctcttcagttccccaaggccgttttcgctaagctgattttatcagaagtattcgagtattcaagctccacccgacctatcacatctccactacaagaggtgcacttcctggtgtataccaacgacgacgaggggtgtcaggcatttcttgacgagttcactaattggtccagaattaatcctaacaaagctcggatccccatggcaggcgacacacaaggagtggtgggtactgtgtccaaaccctgctttactgcatacgaaatgaaaatcggagcaatcactttccaggtcgcaacaggggacatcgcgaccgaacaggtggacgtgatcgtgaactctaccgccaggacctttaatcgcaaatccggcgtgagtcgagcaatcttggagggagccggacaagccgttgaatctgagtgcgccgtcctggctgcccagcctcacagagatttcatcatcacccctggcggttgcctcaaatgcaagatcatcatccacgttcctggcggtaaagacgtgcgaaaaacagttacatccgtgcttgaggaatgtgaacagaggaaatatacttctgttagcctccctgctatcggtactgggaatgccggtaaaaacccaatcaccgtagcggataacattatcgacgccatcgtggacttctcatcacaacacagtacacctagtctcaagacggttaaggtcgtgatattccagcccgaacttctgaacatcttttacgactctatgaagaaaagagacctttcggcatccctgaacttccagagcacattctccatgacaacatgtaatctccccgagcactggacagacatgaaccaccagctattctgcatggtgcagttggagccgggacagtccgagtacaataccataaaggacaaatttactagaacttgttcatcatatgctatcgagaaaatcgagagaattcaaaacgctttcctgtggcagtcttatcaggtgaagaaacgtcagatggatataaagaacgaccacaaaaacaacgaaagactcctgtttcacggaactgacgcagatagcgtaccatacgttaatcagcacgggtttaataggtcctgtgcaggcaagaacgccgtgtcctacggaaagggtacatacttcgccgtcgacgcctcctactcagctaaagatacatacagcaagccggactctaacggcagaaagcacatgtatgtggtgagggtactgacaggggtgtttacaaaagggagagcaggactggtgaccccccctccaaagaacccgcacaatcccaccgacctttttgactccgtaaccaataatacccgctctccaaagcttttcgtcgtgttcttcgacaaccaggcctacccggaatacctaataaccttcactgcttag

SEQ ID NO: 235314 - DNA, 1278 bp, synthetic construct
  misc_feature 1..1278: note = Description of Artificial Sequence: Synthetic coding sequence
  source 1..1278: mol_type = other DNA
atgaagcatacagccttcctggatgaatttacgaactggagtaggatcaatcccaataaagcacggatccctatggccggagacacgcagggagtggtggggacagtgtccaagccatgcttcactgcctacgagatgaaaatcggggctatcaccttccaggtggcgaccggcgatatcgccacagagcaggtggatgtgattgtgaatagtaccgcgcgtaccttcaatcggaagagtggcgttagccgagctattctcgaaggagcaggccaggccgtcgaatcagagtgtgctgtgctcgcggctcagccacatcgcgactttatcatcacccccggaggttgtttgaagtgtaaaattataattcacgtgcctggcggtaaagacgtccggaagacagtgaccagcgtgctcgaggaatgcgagcaacgaaagtacacatctgtatcgctacccgctattggaaccggcaatgccggaaagaatccgattactgtggcagacaacattatcgacgcaattgtcgacttctcgtcccagcactcaacaccttcccttaaaacagtcaaagtagtcatttttcaaccagagttgctgaacatcttctatgactccatgaagaagagggatttgtctgcttcgctgaacttccagtctaccttttccatgacgacttgcaatctacccgagcactggaccgatatgaaccaccagctcttttgtatggtgcaactcgagcctggccaatccgaatacaacaccattaaggataagtttacaaggacctgttctagctacgctatagaaaaaatcgagaggatccaaaatgcctttctgtggcagtcataccaggtgaaaaagagacagatggatatcaagaatgaccacaagaacaacgaaagactgctgtttcacggaacagatgccgactcagtaccctatgtcaatcagcatgggtttaataggtcatgcgccggaaaaaacgcggtgagctacggtaagggcacctacttcgctgttgatgcttcctattcggccaaagacacgtacagcaagcctgactcgaatgggagaaagcatatgtacgtggtcagggtgctcactggggtgttcactaagggtagggcgggactggtgacaccacctccaaagaatccacacaatcccaccgatctgtttgacagtgttacaaataacaccagaagtcccaaactgttcgtggtattcttcgacaatcaggcatatccagaataccttataaccttcaccgcctag

SEQ ID NO: 235315 - DNA, 2565 bp, synthetic construct
  misc_feature 1..2565: note = Description of Artificial Sequence: Synthetic coding sequence
  source 1..2565: mol_type = other DNA
atggacttttccatggtggccggagccgctgcctataacgaaaaatccggcaggattacatctctttctctactgtttcagaaggtgtttgcccaaatattccctcagtggcgcaagggaaatacggaagaatgtctcccctacaaatgcagcgagaccggagcactaggtgagaactattcctggcagatcccaatcaatcataacgatttcaagattctgaagaacaacgagcggcagctttgtgaagtcctccagaataaatttggctgtatcagtacactggtctcaccagtccaggaagggaactccaaatcacttcaagtgtttcggaagatgctgaccccacggatcgagctgtcagtgtggaaagatgacttgaccacccatgccgtggatgccgtggtcaacgccgcaaacgaggatttacttcacgggggaggactagccttggctctggtcaaagcagggggtttcgagattcaggaagagtccaagcagtttgtcgcgagatacggcaaagtgtcagccggagaaattgcagtgactggggctggcaggctgccctgtaagcagatcatccatgctgtgggcccaaggtggatggagtgggacaagcagggttgcaccggtaaactgcagagagcgattgtgtctatccttaattacgttatctacaaaaacactcacattaaaaccgtcgcaatcccagcactctcaagcggcatttttcagtttcctctgaacctgtgcactaaaaccatagtggaaaccattcgcgtctcccttcaaggtaagcccatgatgagcaatctaaaagaaatccatctcgtgtcaaacgaggatcctacggttgccgcattcaaagcagcttctgaattcattttaggaaagagcgaacttgggcaggaaaccacacccagttttaacgcaatggtggtcaacaacctgacccttcaaattgtccagggccacatcgagtggcagacagccgacgtgatcgtcaatagtgtaaacccacacgatattacggtcggcccagtggctaagtctatcctccagcaggcgggtgttgaaatgaaaagcgagtttctggccacgaaggcgaaacagttccagcgcagccagttagtgttagttaccaagggttttaacttgttctgcaagtacatttaccatgtgctttggcactccgaatttccaaagccgcaaattcttaagcatgcaatgaaagaatgtctggaaaagtgcatcgagcagaatataacatcaataagtttcccggctttaggcaccgggaacatggaaatcaagaaagaaaccgcagcagaaattctgtttgatgaagtactgactttcgcgaaagaccacgtaaaacaccagctaactgtgaaatttgtcattttcccaactgacctcgagatctacaaagctttcagcagcgagatggctaaacggtctaagatgctgtctctgaataattattccgtgcctcagtctactcgcgaggagaaaagggaaaatggactggaggctaggtcccctgctatcaatctcatgggtttcaatgtagaggagatgtatgaagctcacgcttggattcaaaggatcttaagtctgcagaatcaccatatcatcgagaacaaccatatcctataccttggacggaaggaacatgacatactctcacagctccagaaaaccagtagtgttagcattacagaaatcatctccccgggtcgcacagagcttgaaatagaaggggcaagagcagacctgattgaggtggtgatgaacatcgaggatatgctttgcaaagtgcaagaggaaatggctcgcaagaaggagagaggactatggcggtctcttggccaatggaccattcagcagcagaaaacgcaagatgagatgaaagaaaacataatattcctgaagtgtcccgttcctccgacgcaggaactgcttgatcaaaagaaacagttcgagaagtgcggactgcaggtgctcaaggtggaaaagatcgacaatgaggtactgatggctgcgtttcagcgcaagaaaaaaatgatggaggagaaactgcataggcaaccggttagccaccggctgttccagcaggtgccatatcagttctgtaatgtggtgtgtagggtcggcttccagagaatgtattccactccctgcgacccaaaatacggcgctggaatctattttaccaagaacctcaaaaatttagccgagaaagcgaagaagatctccgctgccgacaagttgatttacgtcttcgaggcggaagtgctcaccggtttcttttgtcagggtcacccattaaatatcgtgccaccacccctgtccccaggtgccatcgatggacacgatagtgttgtagacaatgtgagctcccccgaaacctttgtgatcttctcaggaatgcaagccattccacagtatctctggacctgcactcaggagtatgtgcaatcccaggactactccagtggacccatgagacccttcgcccagcacccctggagaggctttgcctctggatcaccagtggactag

SEQ ID NO: 235316 - DNA, 2334 bp, synthetic construct
  misc_feature 1..2334: note = Description of Artificial Sequence: Synthetic coding sequence
  source 1..2334: mol_type = other DNA
atgtccgtttcctgcgtgaagagctctagaatttccttagcagtgtccctcccctggtctctccaattcaggaaagcaaccgccaatctgtgtgtgtttcggaaaatgctcaccccgcgtatcgaactgagcgtttggaaagatgatctgacaacacatgctgtggatgccgtggtcaatgccgcaaacgaggatctgctgcatggtggcggactcgcgctggctctcgtgaaggctggagggtttgagatccaagaagaaagtaagcaattcgtggctcgctatggcaaagtgtctgccggtgagattgctgttacaggggcaggcagattgccatgtaagcaaatcatccacgccgtcggcccacgatggatggagtgggacaaacagggctgtactgggaagctgcagcgggcaatcgttagcatcctgaattatgttatctataaaaatactcatattaaaaccgtcgccatccccgcactgagctccggtatttttcagttccctctgaacctgtgtacaaagacaattgttgagaccatacgagtgtctctccagggcaagcccatgatgagcaatcttaaggaaattcacttggttagtaatgaagaccccacggtggccgctttcaaagcggcaagcgaatttattctggggaagtcagaactgggccaggaaactacgccttcctttaacgccatggtggtgaacaatctgacacttcagattgtgcagggccacatcgagtggcagaccgcggacgtgatcgtgaactcagtcaacccacatgatattacagtcggacccgtggctaagtctattctacagcaggcaggtgtggagatgaagtcggagttccttgctaccaaggctaaacagttccagagatctcagttggtcttagtaacaaaaggctttaatctgttttgtaagtacatctaccacgttctatggcactctgaattccctaaaccccagatcctgaagcacgccatgaaggagtgtctggaaaaatgtattgagcaaaatatcacttccatttcctttccagctctgggaaccgggaacatggagattaagaaggagacggccgctgaaatcctgtttgacgaagtcttgacctttgcaaaggatcacgttaagcaccagctcacagtcaagtttgtgatattccccactgacctagaaatctacaaggcatttagtagtgagatggccaaaaggagcaagatgctgtctttgaacaattattcagtaccacagtccaccagagaggaaaagcgcgagaacggactggaggcccgatctcctgcgatcaatctaatgggttttaacgtggaagaaatgtacgaggcacacgcgtggattcagcgcatcctatccctccaaaatcaccatattatcgaaaataatcacatcctttacctgggcaggaaagaacacgacatcctgtcccagctgcagaaaacctcttctgtctccatcacggaaatcataagccctgggagaaccgagctcgaaatagagggagcaagggccgatttgatagaggtggtgatgaatatcgaggacatgttgtgtaaagtccaggaagagatggctcgcaagaaggaacgaggcctgtggagatctttaggtcagtggaccatccagcagcaaaagacacaggatgagatgaaggagaacattattttccttaagtgccctgttcctcccactcaagagttgctcgatcagaagaaacagttcgaaaagtgcggtctccaggtgcttaaagtggagaaaattgataacgaggtgctcatggctgcctttcagcgtaagaagaagatgatggaggaaaagctccatcgacagcctgtgagccacaggctgtttcagcaggtaccttatcagttttgtaatgtcgtttgtcgagtgggctttcagagaatgtatagcactccctgcgaccctaagtatggagctggtatctatttcaccaagaacctgaagaacttggctgagaaagccaagaaaatcagcgctgctgacaaattaatctatgtgtttgaggccgaggtactgactgggtttttctgtcaaggccatcctctgaatattgtacctcctccattatctcccggagctatagacggacacgactccgtggttgacaatgtttcctcccccgagacatttgtgatcttttcagggatgcaggctatcccgcaatacttgtggacgtgtactcaggaatacgtccagtcccaggactattcttctgggcctatgcggcctttcgctcagcatccctggagagggttcgcgagtggatcccccgtggattag

SEQ ID NO: 235317 - DNA, 2460 bp, synthetic construct
  misc_feature 1..2460: note = Description of Artificial Sequence: Synthetic coding sequence
  source 1..2460: mol_type = other DNA
atggacttcagcatggtggctggagccgctgcatataacgagaagtctgagactggggctctgggggagaactacagctggcagatcccaattaaccataacgatttcaagattcttaaaaacaacgagcgccaactgtgtgaggtccttcagaacaaatttggctgtatcagtacacttgtgtccccggtacaggagggcaactccaagagcctccaagtatttcgtaagatgctgacaccacggattgaactgagcgtctggaaggacgatctgactacacatgccgtcgacgctgtagtaaacgcagccaacgaagatttgctccacggcggaggattggccctggcacttgtgaaagccggtgggttcgagatccaggaagagagcaaacagttcgtggccaggtacggaaaagtcagcgccggtgaaattgccgtgactggggctggcaggttaccctgtaagcagatcatacatgcggtgggacccagatggatggaatgggataagcagggctgcaccggaaagcttcagcgtgcaattgtctctatattgaattacgtgatttataagaatactcacattaagacagtcgcaattcccgcactcagtagcggaatattccaatttcccctcaatttatgcacaaagaccattgtcgagacaatcagggtctccctgcaggggaagcctatgatgtctaacctgaaagaaatccatttagtttccaacgaagaccccactgtggccgcattcaaggctgcatccgagttcatcctggggaagtcagagctcggtcaggagaccactccctctttcaacgcaatggtcgtgaataatctgacactacaaatcgtgcagggtcacatcgaatggcagacagctgacgtcattgtaaattccgttaacccccatgacatcaccgtgggacctgtagccaaaagcattctgcagcaggccggagtggagatgaaatcggagttcctggctacaaaagcaaaacagttccagaggtctcaactcgtgcttgtgactaaggggtttaatctgttctgcaaatacatctaccacgtgctatggcactccgagtttcctaaaccacagattcttaagcacgccatgaaagaatgcctcgaaaaatgcatcgagcagaacattacttctattagtttccccgctctaggaaccggaaacatggagattaaaaaagagactgccgctgagatcctgtttgacgaggtgttgacttttgctaaagaccacgtgaagcaccagctaaccgttaagtttgtcattttcccgaccgacctggagatctacaaagcttttagttcagagatggccaaacgcagtaaaatgctcagtttaaacaattattcagtgccacagagtacccgggaggagaagcgagagaacgggctggaggccagatcccctgccatcaacctcatggggttcaatgtagaggagatgtacgaagcgcacgcgtggattcagcggatcctaagtctgcagaaccatcatataattgaaaacaatcatattctctacttaggtcggaaggagcacgacattctgtcgcagctccagaagacgtccagcgtgtccatcacagagatcataagtcctgggagaactgagttggaaattgagggggctagagccgatctcatcgaggtggtcatgaatattgaagatatgctctgcaaagtgcaggaagaaatggctaggaaaaaggagagaggtctctggagaagccttggacagtggactattcagcagcagaagacgcaggacgaaatgaaggaaaacatcatatttctcaagtgccccgtcccacccacccaggaactgctcgaccagaagaaacagtttgaaaaatgtggactacaggtgctgaaggtggaaaaaattgataacgaggtcctgatggcagccttccagcggaagaaaaagatgatggaagagaagctgcacagacagccagtaagccaccggctcttccagcaggttccataccagttttgtaatgtggtttgcagggtcgggtttcagagaatgtatagtactccctgtgatcctaaatacggtgcagggatctacttcacgaaaaacctgaagaatctggcagagaaagcaaaaaagatttccgctgcggacaaattgatttacgtattcgaagccgaagttcttacaggatttttttgccagggccaccccttgaacattgtacctccacctctgagtccaggagccatcgatggacatgattcggttgtggataacgtcagctcgcctgaaacctttgtgattttctccggcatgcaggccatcccacagtatctttggacatgcacacaggaatatgttcaaagccaagattattcctctggccctatgcgtccttttgcacagcacccctggcgaggcttcgcatccgggagcccggtggattag

SEQ ID NO: 235318 - DNA, 1440 bp, synthetic construct
  misc_feature 1..1440: note = Description of Artificial Sequence: Synthetic coding sequence
  source 1..1440: mol_type = other DNA
atgtccgatggctttgatcgagctccaggggctggaagaggacgttcacgaggccttgggaggggcggaggaggtcctgaaggcggtggcttccccaacggcgcaggacctgcagaaagagccagacatcagccgccacagccaaaggcgccaggcttcctacagccgcctcctttgagacagccaaggaccactccaccgcctggcgcacagtgcgaagtcccagcatctccccagaggcctagtcgcccaggggcactgccggaacaaaccagacccctgagagccccaccttcaagtcaggacaagattcctcaacagaattcggaatcagcaatggcaaagccacaggtcgtggttgcaccagtcctaatgagcaaactaagcgtcaacgctcccgaattttacccgtcagggtattcgagctcctacacggaaagctacgaggacggttgtgaggattatcccacattgtcagagtacgtgcaggattttctcaatcatctcactgaacagccaggttcctttgagacagaaatcgagcaatttgccgagacactaaacggatgcgtgaccacagacgacgctctccaagagcttgtagaactcatttaccagcaggccacctctatacccaactttagctatatgggcgctcgcctatgcaattatctgtctcaccatctgaccatcagcccccagagcggcaactttaggcaactgttgctgcaacgctgtcgtactgagtatgaggtaaaggaccaggccgctaagggggacgaagtgactcggaaaagattccatgctttcgtgcttttcctgggagaactatacctcaacttggaaatcaagggaaccaacggccaggtgacacgggcagatattctgcaagtgggcctgagggagcttctgaacgctttgttttcgaatccaatggacgataacctgatctgcgccgtcaaactcttaaagctaacaggttctgtcctggaagatgcctggaaggagaaggggaaaatggatatggaggagattatacagcgcattgagaatgtcgtattggacgccaactgcagcagggacgttaaacagatgctgcttaagctggtggaactgcgaagtagcaactgggggcgagtccacgcaacctcaacttatagagaggccactccggaaaatgaccccaactatttcatgaacgagcccaccttttacaccagcgatggtgtgccattcacagccgctgatccagactatcaggaaaagtatcaagaactcctggaacgggaggatttcttcccggattacgaggagaacggcaccgacctctctggcgcaggggatccctacctggacgatatcgatgacgaaatggaccccgagatcgaggaagcctatgagaagttttgcctggaatcagaaagaaagcgtaagcagtag

SEQ ID NO: 235319 - DNA, 1104 bp, synthetic construct
  misc_feature 1..1104: note = Description of Artificial Sequence: Synthetic coding sequence
  source 1..1104: mol_type = other DNA
atggcgaaacctcaggtagttgtcgctccagttctaatgtccaagttaagcgtgaatgcgccagaattctaccctagcggatactcctcatcctataccgagtcctatgaagacggttgtgaggactaccccaccttgtccgaatacgtgcaggattttttgaaccatttgactgagcagcccggttcctttgagaccgagatcgagcagttcgccgagacgctcaatgggtgtgtgaccaccgacgatgctctgcaggaacttgtggaactaatttaccagcaggccacttctatcccgaatttcagttatatgggtgctcggctgtgtaattacctctctcatcacctaactatctccccacagtcaggtaacttcagacagctgctgctacagagatgccgaaccgagtacgaagttaaggaccaggccgcaaagggagatgaagtgactagaaagcgttttcatgcatttgtgcttttcttaggcgagctgtatcttaatctagagattaaaggcacaaacggccaggtgacacgggctgatattctgcaagtgggccttcgagagctccttaacgcactattttcaaatccaatggatgacaatctcatttgcgcggtcaaattgttaaagcttaccggctctgtgctggaggatgcttggaaagagaaggggaagatggacatggaggagatcattcagaggattgagaatgtggttctggacgctaactgctccagagacgtaaagcagatgctccttaagctcgttgagcttcgttcctcgaattggggtcgcgtgcacgctacaagcacctatcgggaggctacccctgagaatgaccctaattactttatgaatgagcctacattctacacttccgacggagttccgtttactgccgctgaccctgactaccaggagaagtaccaggagcttctggagcgagaggacttcttccctgattacgaggaaaatggtacagacctcagtggcgcaggggacccttacctcgacgacatcgatgacgagatggatcctgaaatcgaggaagcatatgagaaattctgcctcgagtccgaaaggaaacggaagcagtag

SEQ ID NO: 235320 - DNA, 1203 bp, synthetic construct
  misc_feature 1..1203: note = Description of Artificial Sequence: Synthetic coding sequence
  source 1..1203: mol_type = other DNA
atgagtgacggctttgaccgtgcccctgagcaaaccaggcctttacgggctccaccatcctcccaggacaagatccctcagcagaacagtgagtccgctatggcaaaaccccaggtcgttgtggcccctgtcttaatgagtaagctgtccgtcaatgcgccagagttttacccttccggatactcgagtagctacacagaaagttatgaggatgggtgcgaggattatcccaccttatcagaatatgtccaggatttccttaaccacctgaccgaacagcctggttcctttgagaccgaaatagagcagtttgcagagacactaaatgggtgcgtgaccaccgatgatgctttgcaggaacttgtcgaactgatctatcagcaagctacttcaatccctaatttctcgtacatgggtgcaaggctgtgtaattacttgtcacaccacctgactatcagccctcagtctgggaattttcgacagctgctgctgcagagatgtagaaccgagtatgaggtcaaagatcaagcagctaaaggcgacgaagtgaccagaaaacgcttccatgcttttgttctttttttaggcgagctctacctcaaccttgagattaagggaacgaacggccaggttactagggcagacattttgcaagtcggattgagggaactgctgaatgctctgttctccaaccctatggacgacaacctgatatgtgcagtgaagctgttgaagctcacaggctccgtgctcgaagacgcgtggaaggaaaaagggaaaatggatatggaggaaatcatccagcggattgaaaacgtggtgctagacgccaattgctcccgggatgtcaagcagatgctgctcaaactggtcgagctgcggtcctctaactggggcagggttcatgccaccagcacgtaccgagaggctacaccggagaacgatccgaattattttatgaatgaacccaccttctacaccagtgacggcgtccctttcacggccgctgatcccgattatcaggaaaaataccaagagctcctggaaagggaggacttcttccccgactatgaggagaacggcactgatttgtcaggggctggggatccctatctggacgacatcgacgacgagatggacccagaaatcgaggaggcctatgaaaagttctgtcttgagtccgaaagaaagcgcaagcagtag

SEQ ID NO: 235321 - DNA, 507 bp, synthetic construct
  misc_feature 1..507: note = Description of Artificial Sequence: Synthetic coding sequence
  source 1..507: mol_type = other DNA
atggccaaaccccaagttgtggtagctccggtgctgatgtcgaaattgtccgtgaatgccccagagttctacccttccggctatagctcctcttatacagagagttacgaggatggctgtgaggactaccctaccctcagcgaatatgttcaggacttccttaatcacctcacggaacagccgggaagcttcgagacggagatcgaacaatttgcagagacactcaatggatgcgtaactacagacgatgcactgcaggaactggtggagctcatttaccaacaggccacgtccatcccgaattttagttatatgggagcgaggttatgtaactatctgtcacaccacttgaccatctctcctcagtcaggcaatttcaggcaattactgctccagagatgtagaaccgaatacgaggtcaaagaccaggccgctaaaggtgatgaggtgaccaggaagcggttccacgcattcgtgctgtttcttggagagttatatctcaattag

SEQ ID NO: 235322 - DNA, 603 bp, synthetic construct
  misc_feature 1..603: note = Description of Artificial Sequence: Synthetic coding sequence
  source 1..603: mol_type = other DNA
atggccaagccgcaggtggtggtggcccctgtgctcatgagcaagcttagtgtgaacgcaccggagttctacccatctggctattcttcctcttacacagaaagctatgaggacgggtgcgaagattaccctactctctcagagtatgtacaggattttctgaaccacctgacggagcagccaggctcgtttgaaaccgaaatagagcagttcgccgaaacgcttaacggatgcgttactacggatgatgccctgcaggagctcgtggagcttatttatcagcaggccaccagtatccccaacttcagctatatgggcgcaaggctttgcaattacctgagtcaccatctgactatatccccccagagtggaaacttcaggcagctgcttcttcagcgatgtcgcactgagtacgaggtgaaagaccaggccgctaaaggagacgaggtcacaaggaaaaggtttcacgccttcgtcctttttcttggggagctgtacctcaatctagagatcaaagggacaaacgggcaggtgactcgagctgatatccttcaggtggggctcagagagctcctcaatgccttgttttccaaccccatgtag

SEQ ID NO: 235323 - DNA, 1056 bp, synthetic construct
  misc_feature 1..1056: note = Description of Artificial Sequence: Synthetic coding sequence
  source 1..1056: mol_type = other DNA
atgtccgatggcttcgaccgggctcccgaacaaacacgccctctgcgagctcccccttcaagtcaggataagattcctcagcaaaacagcgaatcagccatggccaaacctcaagtggtggtggctcctgtgctgatgagtaaactgagtgtcaacgctcctgaattctatccatcagggtacagctcctcctacaccgaaagttacgaggatggatgcgaagattatcccacactcagcgaatatgtgcaagactttctaaaccatctgaccgaacagccaggcagcttcgagaccgaaattgaacagtttgccgagacgctaaacggctgcgtcacgacagacgatgccctccaggagctggtagagctaatctatcaacaagctacctccatcccaaatttttcctatatgggggcacggctgtgcaactacctgtctcaccacctgacaatttctccacagagcgggaacttccgccagcttctgctacagaggtgtcgtactgagtacgaggtgaaggatcaagcagcaaagggagacgaagtgacccgcaagaggttccacgcattcgtcttattccttggggagctatatctcaatctggaaatcaaggggacaaacgggcaggttacccgggctgacattctgcaggttgggctgagagagttgttgaacgcactgttcagcaatccaatggacgacaacctcatctgcgccgtaaagctgctgaagctcactggctctgtactggaggatgcatggaaagagaaggggaagatggatatggaagagatcattcaacgaatcgaaaatgtggtgttggacgctaactgctctagggatgtgaagcaaatgctgcttaagctagtggagctgcggtcgtctaactgggggagggtgcacgccaccagcacatatcgtgaagccacgccagagaacgatcccaactactttatgaacgagccaacattttacacctctgacggggtgccatttactgccgctgatcccgacacttggatgatcttgatgatgcggtggacacagaggtag

SEQ ID NO: 235324 - DNA, 288 bp, synthetic construct
  misc_feature 1..288: note = Description of Artificial Sequence: Synthetic coding sequence
  source 1..288: mol_type = other DNA
atggcgaagccccaggtcgtggtggctccagtcttaatgagcaagctgtccgttaatgctccagagttttacccgtctggctatagcagcagttacaccgaatcctacgaggacggctgtgaggattatcccactttatcggaatacgtacaagacttcttgaaccaccttactgaacaacccggatcattcgagacagagatcgagcagttcgcggagaccttgaacgggtgtgtgacaacagacgacgcactgcaggagctggtggagctgatataccagcagtag

SEQ ID NO: 235325 - DNA, 384 bp, synthetic construct
  misc_feature 1..384: note = Description of Artificial Sequence: Synthetic coding sequence
  source 1..384: mol_type = other DNA
atgaaagatccatcccgatctagcactagtccaagcataatcaatgaagacgtgatcattaatggacacagccatgaggatgacaatccattcgctgaatacatgtggatggagaacgaagaagagttcaatcggcagatcgaggaggaattatgggaggaggaatttattgagcgatgttttcaagagatgttggaagaggaggaagaacatgagtggttcataccagcccgagaccttccccagactatggatcagatccaagaccagtttaacgacttggtgatttccgacggctctagcctggaagatctggtcgtaaaatcaaacctaaacccgaatgcgaaggaatttgtccctggagttaagtatggaaacatatag

SEQ ID NO: 235326 - DNA, 384 bp, synthetic construct
  misc_feature 1..384: note = Description of Artificial Sequence: Synthetic coding sequence
  source 1..384: mol_type = other DNA
atgaaggatccgtcccgctcttccacgtcacccagtatcatcaatgaggacgttatcatcaacggtcacagccacgaggatgataaccctttcgcagagtatatgtggatggagaacgaggaggaatttaacaggcagatagaggaggaactgtgggaggaggaattcatcgagaggtgcttccaagaaatgcttgaagaggaggaggagcacgagtggttcatacctgcgagggacctcccccagaccatggaccagatccaggatcagtttaacgacctcgtcatcagtgacgggtcatccctcgaggacctggtggttaaatccaaccttaacccaaacgcaaaggagttcgtgccaggggtaaaatacgggaacatttag

SEQ ID NO: 235327 - DNA, 282 bp, synthetic construct
  misc_feature 1..282: note = Description of Artificial Sequence: Synthetic coding sequence
  source 1..282: mol_type = other DNA
atgaaggacccaagcaggtcttctacttcacccagtataataaatgaggatgtcatcataaatggccattcccatgaagacgacaacccattcgcggagtatatgtggatggagaacgaggaggagttcaataggcagattgaagaggaactgtgggaggaggagtttattgaacgctgctttcaggaaatgctcgaggaagaggaagagcatgagtggttcatcccagctcgtgatctcccacagactatggaccagattcaggatcagtttaacgattag

SEQ ID NO: 235328 - DNA, 384 bp, synthetic construct
  misc_feature 1..384: note = Description of Artificial Sequence: Synthetic coding sequence
  source 1..384: mol_type = other DNA
atgaaagatccctccaggagttccacctcccccagtattattaacgaggacgtgataataaatggccactcccacgaggacgacaacccttttgctgaatacatgtggatggagaatgaagaagagttcaaccgtcagatcgaagaggaattatgggaggaggagttcattgagcgatgtttccaggaaatgcttgaggaggaagaggagcatgagtggttcattcccgctcgtgacctgccacagaccatggatcagattcaggaccagtttaatgacctcgtaatctcggacggcagtagcctcgaggacctcgtagttaaaagcaatctgaaccccaacgctaaggagtttgtccctggcgtaaagtatggaaatatctag

SEQ ID NO: 235329 - DNA, 372 bp, synthetic construct
  misc_feature 1..372: note = Description of Artificial Sequence: Synthetic coding sequence
  source 1..372: mol_type = other DNA
atgaacggcagtaatatggccaacacgagcccctctgtaaaatccaaggaagaccaagggctgtccgggcacgacgagaaggagaatccattcgccgagtacatgtggatggaaaatgaggaagattttaacaggcaggtagaagaggagctgcaggagcaagacttcctggatcgctgttttcaagagatgctcgacgaagaagatcaggactggtttataccctcccgcgatctgcctcaggcaatgggccaattgcagcaacagctgaatgggctttcagtgtcggaaggacatgacagtgaggacatactgagtaaaagcaatctcaatccggatgctaaggaatttatccccggtgaaaaatactag

SEQ ID NO: 235330 - DNA, 1896 bp, synthetic construct
  misc_feature 1..1896: note = Description of Artificial Sequence: Synthetic coding sequence
  source 1..1896: mol_type = other DNA
atgaaccccagcaccccttcctatcccacagcaagtctctatgtcggtgatctgcaccccgatgtgaccgaggcgatgctttatgagaagttttctcctgccggacccattctgtctatccggatctgtagagatcttatcactagcggttcttctaattacgcctacgttaatttccagcacacaaaggatgcggaacatgctttggatacaatgaatttcgatgtgatcaaaggaaagccggttcgaatcatgtggagccagcgcgatcctagcctgaggaaaagcggagtgggcaacatttttgtgaaaaacttggataaatctattaataacaaggctctctacgacactgtgtcagcattcggtaatatattaagctgtaacgttgtgtgcgacgagaacggctccaaggggtacggatttgttcattttgaaacccatgaagccgctgaacgagctatcaaaaaaatgaatggaatgttgcttaacggtcggaaggtgttcgttggtcaatttaaatctagaaaggaacgagaggccgagctcggggctcgggcaaaggagtttccgaatgtttacattaaaaactttggcgaggacatggacgacgaaagactaaaggacctctttggcaagttcggccctgctctctctgtgaaagtcatgaccgacgaatccgggaaatcaaagggctttggattcgtgtcctttgaacgccatgaggacgcccagaaagcggtagacgaaatgaatggtaaagaacttaacgggaagcagatctatgtcgggagggcacagaaaaaggttgaacgacagaccgagctgaaacggaccttcgagcagatgaaacaagatcgcataacgaggtaccaggtggtgaatctctatgtaaaaaacttggacgacggcatagatgatgagagactaagaaaagcattttcaccctttggtacgattacatccgcgaaagtcatgatggaaggaggaagaagcaagggttttggattcgtctgttttagcagcccagaagaagctacaaaggccgttacagaaatgaacgggcgaatcgtggcaactaagccactctacgtggccctggcccagaggaaggaggagaggcaggcatatttgacgaatgaatacatgcagagaatggcatctgttcgagccgtccctaatcaacgggctccaccatctggatatttcatgacagcggtgcctcagacgcagaatcatgccgcttattaccctccaagtcagatcgccagacttagaccaagcccccgttggactgcacagggggcacggcctcacccattccagaataaacctagcgccattcggccaggagcccctagagtgcccttctccacaatgaggcccgcatcttcacaggttccccgagtaatgagtacccagagggtggccaatactagcactcaaaccgtagggccaaggccagccgctgcagctgccgctgctgccaccccggctgtacggacggtgccaaggtacaagtatgcggctggcgttcgtaacccccagcagcaccggaacgcacaacctcaagtcacaatgcagcagctagctgttcatgtccagggacaggagaccctcaccgccagtaggctagctagtgctccaccacaaaagcagaaacaaatgctgggtgagcggttattccctctgattcaggcgatgcaccctaccctggcgggtaagatcaccggcatgttactggaaattgacaacagcgagttgctgtacatgttagaatctcccgagagcttacgttccaaagtcgatgaggcagtggcagtcctccaggcccaccaggcgaaggaggcaacgcagaaggctgtgaactcggcgaccggggttcctaccgtgtag

SEQ ID NO: 235331 - DNA, 1896 bp, synthetic construct
  misc_feature 1..1896: note = Description of Artificial Sequence: Synthetic coding sequence
  source 1..1896: mol_type = other DNA
atgaacgccgcagcgagctcatatccaatggctagtctgtacgttggagacctacacagtgatgtcactgaggcaatgctttatgagaagttcagtcccgcagggcctgtcctgagcatcagggtctgccgggacatgattaccagacgcagtctcggttacgcctacgtgaactttcagcagcctgcggatgcggaacgcgctctcgacacaatgaatttcgacgtgattaaaggcaagcccattcggataatgtggtctcagagagacccatccctgagaaaatcgggggtaggaaatgttttcattaaaaatctggataagtcaattgataataaggcgctgtatgacacctttagtgcatttgggaacatcttgtcttgcaaggtggtgtgcgatgaaaatggttcaaagggatacgcctttgttcatttcgagacacaagaagccgctgataaggccatagagaaaatgaacggcatgcttctgaatgacagaaaagtctttgtcgggagattcaagagtcgcaaagagagagaagccgagctcggggctaaagcaaaagaatttaccaatgtctacatcaagaatttcggggaagaggtcgatgacgaaagccttaaggaattgttttcccagtttgggaaaaccttatcagtgaaggtgatgcgcgatccaaacggcaagagtaaaggtttcgggttcgtttcctacgagaagcacgaagacgcaaataaagcagttgaagagatgaacgggaaggaaatctctggaaaaattatattcgtggggagagctcagaaaaaggtcgagaggcaggctgaacttaaaagaaagttcgagcagctgaagcaggagcgaattagtcgttaccagggtgttaatctctatatcaaaaatcttgatgacacaattgacgatgaaaagctgagaaaagagttcagtccattcggctctatcactagcgccaaggtaatgctcgaagatggaagaagcaagggttttgggtttgtctgttttagcagcccagaagaggcgactaaggcagtaacagaaatgaacggtcgaattgttggctccaagcctctttatgtcgccttagcccagcgaaaggaggagcggaaggcgcacttgacaaaccaatatatgcagagggtcgctgggatgagagctcttccagctaatgctatcctaaaccagtttcaacccgctgctggcggttatttcgtaccggcagtgccacaggcacagggtcggcctccctactatactcctaaccagctcgcacagatgagaccaaacccgaggtggcagcagggcggacgccctcaagggtttcagggcatgccaagcgccatcagacagtctggacccagacccactctcagacatctggcccctacaggtaatgcgcctgccagccggggactgcccaccaccacccagcgggttggggtacctacagctgtacaaaatctggcacctcgtgcggctgttgctgctgccgctccacgtgccgtcgcgccatataaatatgcttcctccgtacggtctccacacccggctattcagccactacaagccccacagcctgctgtccacgtgcagggtcaggagccattgacagcgagtatgttggctgcagcgcctccacaggagcaaaagcagatgttgggagagcgcttgttcccccttatacaaacaatgcacagcaacctagccggaaaaatcaccggcatgctgctggaaattgataactctgagcttctccatatgctcgagagtccggagagcctgcggtcaaaggtagacgaagctgtcgcagtgctacaggcccaccacgctaaaaaagaggcagcccaaaaggtcggagcagtggccgcagccacttcatag

SEQ ID NO: 235332 - DNA, 1935 bp, synthetic construct
  misc_feature 1..1935: note = Description of Artificial Sequence: Synthetic coding sequence
  source 1..1935: mol_type = other DNA
atgaacgctgctgcatcctcataccctatggcatcactgtacgtcggcgacttacacagtgatgttactgaggctatgctgtacgaaaagttctctccagcaggaccggtgttaagcatcagagtctgcagggatatgataactagaagaagcctgggatatgcctacgtgaacttccaacaaccagcggatgcagagcgagcccttgatactatgaactttgatgtgatcaagggaaaaccaattcgtattatgtggagccagcgcgatccttcactgaggaaatcaggggtggggaacgtgtttataaagaacctcgacaagtccatcgataacaaagcgctgtatgatacttttagtgcctttggcaacatccttagttgtaaggtggtctgtgacgagaacggtagcaagggctacgcattcgtccacttcgagactcaggaggccgctgataaggccattgagaagatgaatgggatgctactcaacgacaggaaggtatttgtgggtagatttaaatcaagaaaagaacgggaggccgagctgggcgctaaggccaaggagttcacgaatgtctatattaagaactttggggaggaagtagacgacgagagtctcaaagaacttttctcccagttcgggaaaacactatctgtgaaggtaatgcgagatcccaacggcaaaagcaagggatttggtttcgttagctacgagaagcacgaagacgccaataaagctgtggaggaaatgaatgggaaagaaatcagcgggaagatcatattcgtgggtcgagcccagaagaaggtcgagcgccaggcggaactcaagcggaagttcgaacaactgaagcaggagagaatttctcggtatcagggagtaaatctgtatataaagaatttggacgacaccatcgacgacgagaaattacgtaaagaattttctccctttgggagtatcactagtgccaaggttatgttagaggatggccgttccaagggatttggcttcgtgtgcttctcctcacccgaggaggctacaaaggctgtgaccgagatgaacggcagaatagtcggatccaaaccattgtacgttgcccttgcccagcgtaaagaagagcggaaggcccacctcactaaccagtacatgcagcgtgtggccggtatgcgggctctccccgctaacgccatcctgaaccagtttcagcctgccgctggtgggtactttgtccctgctgtgccacaggctcagggtaggccaccatactacactcctaaccagttggcgcagatgcgcccaaatccccgttggcagcaaggcggtcgcccacagggatttcagggcatgccgtcagccatacggcagtcaggccctaggcccacactccggcatctagcaccgaccggctctgagtgccctgacagactggccatggattttggaggcgctggagccgctcagcagggacttaccgacagttgtcagagcggcggagtgcccaccgcagtccagaacctggccccaagggcagccgtggccgcagctgcgcctcgcgcagtagctccttataagtatgctagcagcgtgcgctcgccccaccccgcaatacaaccactacaggccccacaacccgcagtgcacgtacagggacaggaacccctcacggcgtcgatgctggctgccgctccccctcaggagcaaaagcaaatgcttggcgagagactgtttccactgattcagacaatgcatagtaacttggccggaaagattacaggcatgcttctcgagattgacaactcggaactgctgcatatgcttgagtccccggagtcgcttcggtcaaaggtggacgaggctgtggcggtcctccaggcccaccatgcgaagaaggaggccgctcagaaggtgggtgccgtggcagccgcaacatcatag

SEQ ID NO: 235333 - DNA, 1983 bp, synthetic construct
  misc_feature 1..1983: note = Description of Artificial Sequence: Synthetic coding sequence
  source 1..1983: mol_type = other DNA
atgaatgctgccgcttcttcctaccctatggcttctttatacgtcggagaccttcattcggacgtcaccgaggctatgctgtacgaaaaattttcaccagctggaccggtcttgtctattagagtgtgcagggatatgattaccaggagatccctgggttatgcctacgtgaactttcagcaacccgcagatgccgagcgggcactggacaccatgaatttcgacgttataaagggtaaaccgatccggattatgtggtcccagagagatccctccctgcgaaagagtggcgtcggcaacgtctttatcaagaatctggacaaatctattgataataaggctctctacgatacattcagcgcgtttggaaatatcctgtcctgcaaagtggtctgtgacgaaaacggatcaaaaggatacgcatttgtgcacttcgagacacaagaagcggctgacaaggctatcgagaagatgaacggaatgctgctgaatgatcggaaagtttttgtgggcagattcaagtcgcgaaaggagcgtgaagctgaactaggagcgaaggccaaagagtttaccaatgtgtatatcaagaactttggagaggaagtggacgacgagagtctcaaggagctgttttcccagttcgggaagaccctgtccgttaaagtaatgcgggatcctaacgggaaatcgaagggctttggctttgtgagctacgagaagcacgaagatgcaaacaaggccgtagaggagatgaatggtaaggagatcagtggaaagataatcttcgtcggcagggcgcaaaaaaaggtggagcggcaggctgagctgaagagaaagttcgaacagctcaagcaggagcggatcagtcggtaccagggcgtcaatctgtacatcaaaaacttggatgacactatcgacgacgagaaactgcggaaagaattcagtccttttggatcgatcaccagtgcaaaagtgatgctggaggatgggcgatccaagggctttggcttcgtttgttttagcagcccagaagaagctaccaaggccgtgaccgagatgaacggccgtatagtgggaagtaaaccactgtatgttgctcttgcacagagaaaggaggagaggaaagcccatctgacaaaccagtacatgcaaagagtggccggaatgagggccctacccgcaaatgcaattctcaaccagttccagcctgccgcaggtggttatttcgtgccggctgttccacaggctcagggtaggccgccttattacacaccaaatcagcttgcccagatgcggcctaatccccgatggcagcagggaggcaggccccaggggtttcagggtatgccatcagcgatacgacagtccggccctcgccctactctgcgccatctcgccccaaccggcaatgcacccgcatctcgtggactgcctaccacaactcagcgagttggtagtgagtgtcccgaccggttggccatggattttgggggtgccggagcggcacagcaggggcttacagattcctgccagagcggcggagtgcctacagcggtccaaaacctggccccaagggccgctgtggctgccgcagctccacgggcagttgccccttataaatatgccagctctgtgaggtctccacacccagccatacaacctcttcaagcccctcagccagcagtgcatgtgcaaggccaggaacccctgaccgcttctatgttagccgctgctccaccacaggagcagaaacagatgttgggggagcgcctgtttcccctgatccaaacaatgcattccaatcttgccggtaaaattacgggcatgctgctggaaattgacaactccgaactgctgcacatgcttgagtcaccagagtccttgaggagtaaggtcgatgaggccgtcgctgtgttacaggctcaccatgccaagaaggaggcagctcagaaagtaggcgctgtggctgccgctactagctag

SEQ ID NO: 235334 - DNA, 390 bp, synthetic construct
  misc_feature 1..390: note = Description of Artificial Sequence: Synthetic coding sequence
  source 1..390: mol_type = other DNA
atgaacgctgccgcttcttcttaccccatggcttcactgtatgtgggggatctgcacagcgatgtgacagaggctatgctgtacgaaaagttctcgcctgccggtcctgtgctgtccatccgtgtttgtcgcgacatgatcacacgacgatcgttgggatatgcatatgttaactttcagcaacccgctgatgccgaaagggccttggacaccatgaattttgatgtaatcaaaggtaaaccgatccgaattatgtggagccaaagagacccatctttgaggaagagtggggtcggcaatgtcttcattaagaatcttgataagtctatcgacaataaggctctctatgataccttttccgcctttggaaatattctctcttgcaaatag

SEQ ID NO: 235335 - DNA, 207 bp, synthetic construct
  misc_feature 1..207: note = Description of Artificial Sequence: Synthetic coding sequence
  source 1..207: mol_type = other DNA
taactcatccagacgatgcatagtaatttggccggaaagataactggcatgctgttggagatcgacaacagcgagctgctgcacatgcttgagtcccccgaatccctgcgaagtaaggtcgacgaggctgtcgccgtcttgcaagcacaccatgcaaagaaggaggccgctcagaaagttggagcggtcgctgctgctacttcatag

SEQ ID NO: 235336 - DNA, 120 bp, synthetic construct
  misc_feature 1..120: note = Description of Artificial Sequence: Synthetic coding sequence
  source 1..120: mol_type = other DNA
atgaacgccgcagcctcaagttaccctatggctagcttatacgtgggagatctacattctgacgtgaccgaggctatgctgtatgaaaagttctcgcctgctgggccagtactctcttag

SEQ ID NO: 235337 - DNA, 1149 bp, synthetic construct
  misc_feature 1..1149: note = Description of Artificial Sequence: Synthetic coding sequence
  source 1..1149: mol_type = other DNA
atgggaagcggcgaacctaacccagccggtaagaagaaaaagtacctcaaagcagccctatacgtgggcgatctcgatccagatgtcacggaggatatgttgtacaagaagtttcgccctgccggaccactgaggttcacacgcatatgtcgggatcccgtgacccgaagtcctctgggatatggatatgttaatttcagattccccgcagatgccgaatgggcgctcaataccatgaatttcgacctcatcaatggtaagccattcagactgatgtggtctcagccagacgacagattgcgcaagtcgggggtcggaaatatttttattaaaaacttagacaaaagtatagacaaccgggcactgttctatttgttcagcgcgtttggcaatatcctgtcctgcaaagttgtatgtgatgacaatggatctaaagggtatgcctacgttcactttgactccctggccgctgccaatcgcgctatctggcacatgaacggggtgagactgaacaaccggcaggtgtatgtaggtaggttcaaatttccggaggagcgagccgctgaagtacggaccagggaccgagctaccttcacaaacgtgttcgtgaagaacatcggcgatgacatagacgatgaaaaactcaaggaactcttttgtgagtacgggcctacagaatctgtaaaggtcattcgagacgcttcagggaagagcaaaggcttcggattcgtccgctacgagactcatgaagctgcgcaaaaagcagttctggaccttcatggtaaatcaatcgatgggaaggtcctgtacgtggggagggcccagaagaagatcgagaggctcgcggagttaaggcggagattcgagcgactccgccttaaggagaagagtcgccctcccggtgtgcccatctacattaaaaacctggacgagacaatcaacgacgagaagctcaaagaggaattttcctccttcggttccatctcaagagcgaaagtaatgatggaggtgggtcagggaaaaggtttcggtgtcgtgtgtttctcctccttcgaggaggccactaaggccgttgacgagatgaacgggagaattgtaggcagtaagccgctgcacgtgacactaggacaggcaaggcgacgctgctag

SEQ ID NO: 235338 - DNA, 657 bp, synthetic construct
  misc_feature 1..657: note = Description of Artificial Sequence: Synthetic coding sequence
  source 1..657: mol_type = other DNA
atgaatggagtgcggctgaataaccgacaggtgtacgtgggccgattcaagtttcccgaggaacgggcagccgaagtgcggacacgcgatcgagccacatttaccaatgtttttgtgaaaaacattggggacgatatcgacgatgagaagcttaaggaacttttttgcgagtacggccctaccgaaagcgttaaggtcattcgcgacgccagtggcaagtcaaagggcttcggattcgtgcggtacgagactcacgaagccgctcagaaggcggttctggacctgcatgggaagagcattgacgggaaggtcctgtacgtgggacgcgcacagaagaaaattgagcgtcttgctgagttaagaagacgtttcgagcggctgcgcctgaaagagaagagtaggccacccggtgttccaatctatatcaagaacctggatgagacaatcaacgatgaaaagttgaaagaggaattttcctccttcggatccatttcgcgggcaaaagtgatgatggaagttggccagggtaagggattcggagtggtctgcttttcgagcttcgaggaggctacaaaggctgtcgatgaaatgaatggaaggatcgtaggttctaagcccctgcacgtgactctgggacaggctagaaggaggtgctag

SEQ ID NO: 235339 - DNA, 1053 bp, synthetic construct
  misc_feature 1..1053: note = Description of Artificial Sequence: Synthetic coding sequence
  source 1..1053: mol_type = other DNA
atgctatacaagaagtttagacctgctggccctctccggtttacccgtatctgcagggacccggtgactaggtccccgctcggctacggctatgtcaatttccgattcccagcagatgcagagtgggcactgaatacaatgaattttgatctgattaacggcaaaccctttaggttaatgtggagccagccagacgatagactgaggaaatcaggggtaggtaatatcttcattaaaaatctggataagagcatcgacaacagggccctgttttacctgttttcagcttttggtaatatccttagctgcaaggttgtctgtgacgataacggttcgaagggctacgcatacgtgcattttgatagtttggccgctgcaaatagggccatctggcacatgaatggggtacgcctgaataacaggcaagtgtacgtcggaagattcaagtttcccgaagagcgggctgccgaggtgcggactcgcgatcgcgctaccttcaccaatgtattcgttaaaaatataggtgacgacatcgatgatgagaagctgaaggaactgttctgcgagtacggccctaccgagtcagtgaaagttattcgcgatgcaagcggcaagtccaaggggttcggttttgtacgttatgagacccatgaggccgcacagaaagcagtgctcgaccttcatggaaaaagtatagacggcaaggtactgtacgtaggcagagcacagaaaaagattgaacggctggccgagctcaggcgcagattcgagcggttgaggctgaaagagaaaagtagacctcctggcgtgcccatctacattaaaaatctggatgaaactataaatgacgagaagctgaaggaagaatttagttctttcggatctataagccgtgctaaggtcatgatggaagtcgggcagggcaaaggatttggggtcgtgtgttttagcagctttgaggaggccacaaaagctgtggacgaaatgaacggacgtatcgtcggttccaaaccccttcacgtgactttgggccaggccaggcgacggtgctag

SEQ ID NO: 235340 - DNA, 957 bp, synthetic construct
  misc_feature 1..957: note = Description of Artificial Sequence: Synthetic coding sequence
  source 1..957: mol_type = other DNA
atgcccaaacggggaaagaagggagctgttgcagaggacggcgatgagcttcgcactgagcctgaggctaaaaagtcaaagactgcagcaaagaaaaatgataaggaagccgcaggcgaggggccagctctctatgaggaccctcccgatcagaagacatcgccatcgggtaaaccggctacacttaagatttgctcttggaatgtagatgggttgagagcgtggattaagaagaaggggctggactgggtgaaggaggaggcacctgacatcctgtgcctacaggaaaccaaatgtagtgagaataagcttcccgctgagctccaggaactgcctggactgtcacaccagtactggagcgcaccctctgacaaggagggatactctggcgtgggcttattaagcagacagtgtccgctgaaggtgtcgtatggaataggggatgaagagcacgaccaggaaggtcgcgtgatcgtggctgaattcgattccttcgtgcttgtgaccgcatacgtccccaacgccggtcgaggtcttgtacgattggaatatcgtcagcgctgggatgaggcttttcgtaagtttcttaagggcctcgctagcagaaagcccttagtgctctgtggcgatttaaacgtggcacacgaggagatcgacctgcgtaaccccaaagggaacaagaaaaacgccggattcacaccacaagagcggcagggcttcggcgaactgttgcaggcagtgccattggcagatagttttcggcatctttatccaaacaccccttacgcatataccttttggacttacatgatgaatgccaggagtaagaacgtcgggtggcgcctggattattttctgctttcccattccctactgcccgctctgtgtgactccaaaatccgcagtaaagcactaggctctgaccactgcccaatcactctctaccttgctctgtag

SEQ ID NO: 235341 - DNA, 891 bp, synthetic construct
  misc_feature 1..891: note = Description of Artificial Sequence: Synthetic coding sequence
  source 1..891: mol_type = other DNA
atggcagctgccgcagcagccgcagcagcggctggggcagcgggaggcaggggatctggcccaggcaggaggcgtcatctggtgccaggcgctggaggagaggcaggagagggagcccctgggggtgccggagactacggcaatggattagagagcgaggagctggagccagaagagttactgctggaacctgagccagagccagagcctgaagaggaacctccccgacctagagcccctcctggcgcacctggcccaggacctgggagcggtgccccagggagtcaagaggaagaagaagagccgggtctagtggagggggatccaggcgatggcgctattgaggaccccgagctagaagcgattaaggccagagtgagagagatggaggaagaggccgagaaactgaaagagctgcaaaatgaggttgaaaagcagatgaatatgagcccccctccaggaaacgcaggccctgtgatcatgtccatcgaagagaagatggaagctgatgccagaagcatatatgtagggaacgtggactatggggcaaccgctgaagaacttgaggctcacttccatggttgtgggtccgtaaacagggtgacaattctttgcgataaatttagtggccacccgaaggggttcgcctacattgagttctccgataaagagtccgtgcggactagtctggctctggacgagagccttttccggggacgtcagatcaaagttatccccaagcgtactaaccggcctgggatttccaccacagatcgcggttttcctcgggctcggtatagagccaggactactaattacaattctagccgatcaagattctattcgggctttaactcaagacctcgtggccgtgtgtatcgttcggggtag

SEQ ID NO: 235342 - DNA, 1557 bp, synthetic construct
  misc_feature 1..1557: note = Description of Artificial Sequence: Synthetic coding sequence
  source 1..1557: mol_type = other DNA
atgtcatgtgtgaagctgtggccctctggcgctcctgctcccctagtcagtatcgaagaactggagaatcaggaactcgtgggtaagggaggattcggaactgtatttagggcccagcaccgaaaatggggctatgacgtcgctgttaaaatcgttaattctaaggcgatctctagagaagtgaaggcaatggcctccttagacaacgaattcgtcctcaggctggaaggcgttattgaaaaagtgaattgggatcaggaccctaaacctgccctcgtgaccaagttcatggagaatgggtcgctgtcgggcctgctgcagtctcagtgtccaagaccttggcctctgctttgtagacttctgaaagaggtggtgttgggcatgttctacctccacgaccagaaccctgttcttctccatcgcgatctcaagcccagcaatgttctgctggatcccgaactgcacgtgaagctcgccgactttggactgagtaccttccaggggggatcccagagcggtaccgggtctggtgagcccggaggaaccctggggtatctggcccctgagctcttcgtcaatgtgaatcggaaagcaagtactgccagcgacgtctacagctttggcattctcatgtgggccgtgttagctggcagagaagtggaactgcccacagaacctagtctggtgtatgaggccgtgtgtaaccggcaaaaccgcccaagtctggcagagctcccccaggcaggcccagaaacaccagggctggaaggcctgaaggaactgatgcagctctgttggagctctgaacccaaagatcgtccatccttccaggaatgcctgcctaagaccgatgaagtctttcaaatggttgagaacaatatgaatgcagctgtgtccacagtgaaagatttcctgtctcagcttagaagtagcaaccggcgattttctatacccgagagcgggcaaggaggcaccgaaatggatggtttccgtcgtacaatcgagaaccagcactcccgcaacgacgtcatggtctccgaatggctcaacaaactaaaccttgaggaacccccttcctctgtcccgaagaaatgcccatcactgactaaacggagccgggcacaggaagaacaggtaccgcaggcctggaccgccggaacgtcttcagactccatggcgcaacctccacagacccccgaaacgtccacgttccggaaccagatgccttctccgacctcaacaggcacaccctctccaggtccgagagggaaccagggagcagagaggcaaggcatgaactggagctgcaggacccctgaaccaaatcccgtcacgggccgaccgctggtgaacatctataattgttcgggcgtgcaggtaggcgacaacaactatttgacaatgcagcagacgaccgccttaccgacatgggggctggccccaagcggaaagggacgcggactgcaacatccccctccagtagggtcccaggaggggccaaaggatcctgaggcgtggtcacgcccacagggatggtacaaccactctgggaagtag

SEQ ID NO: 235343 - DNA, 2223 bp, synthetic construct
  misc_feature 1..2223: note = Description of Artificial Sequence: Synthetic coding sequence
  source 1..2223: mol_type = other DNA
atgctcggacgccgaggaagtgactgggcagttccagcaccagagaccatgccattcccagttaccacccaggggtcacagcagactcagcctcctcagaagcattacggaatcaccagcccaatcagtctggcagctcctaaagagactgactgcgttctgacacagaagttgatcgagacattgaaacctttcggcgtttttgaagaagaagaggaactgcagcgtagaattcttatcctcggcaagttaaataatctggtgaaagaatggattcgagagatcagtgaatctaagaacctgccacagagcgtcatagaaaatgtgggcggaaaaatttttacctttgggtcttaccggctgggtgtgcacacaaaaggcgcagatatcgacgcactgtgcgtcgcacctaggcatgtcgatcggagcgattttttcacgtccttctacgacaaattgaagctacaggaggaggttaaagatctcagagccgtcgaagaagccttcgttccggtgatcaagctgtgttttgacggcattgagatagatatactcttcgcccgtcttgccctgcagactattcctgaagacctggacctgagagatgattccttgctcaaaaacctggacataagatgcattaggtccctcaacggctgccgcgttacagacgagattttacatctcgtccctaacattgacaactttcggctgaccctccgtgcaataaagctgtgggctaagaggcacaacatttacagcaacatcctaggctttctgggcggtgtatcttgggccatgctggtagccaggacgtgccagctgtaccccaacgcaatcgcctcaaccctggtgcataagttctttctagttttcagtaaatgggagtggcctaacccagtcctcttgaaacagcctgaggagtgtaaccttaatttgccggtgtgggatcccagggtcaatccctcagatcgctaccacctaatgccaataattaccccggcttatcctcagcagaattcaacatataatgtgagcgtatccacccggatggtgatggtcgaggagttcaagcagggattggctatcacagacgaaattctgctgagcaaggctgaatggtccaagctgttcgaggctcctaacttctttcagaagtacaagcactacatcgtcttgctcgccagcgcaccgactgagaaacaacgcctggagtgggtgggacttgtcgaatcgaagattcgaatccttgtgggaagcctggagaagaacgagtttattacactggcccacgtaaacccccagtccttccctgcaccaaaggagaatccggataaggaagagttccgaacaatgtgggtgatcgggctcgttttcaaaaaaacagaaaactcggagaatttgtctgtagacctaacctacgatatccagtctttcacagacactgtgtaccggcaggcaatcaattcgaagatgttcgaggttgacatgaaaattgctgcgatgcacgtgaagcgtaaacagctgcatcaactcctaccgaaccatgttttgcagaaaaaaaagaaacactccaccgaaggcgtcaaactcactgccctaaacgactcctccctcgatctcagcatggactccgataactctatgagcgtaccttctcccacatctgccacaaaaacatccccacttaatagcagcgggtcatcgcagggcagaaacagtcctgccccagcggtgacggctgccagtgtgaccaacatccaagccactgaagtcagcgtgcctcaggtcaattcctcagagagtagcggtggtaccagctccgagagcatcccacaaaccgctactcagcccgcaatatccccccctcccaagccaacagttagtagagtggtatctagcacaaggctggtcaacccgccaccccgaagctcaggtaatgccgcaacctcaggcaatgcagcgacaaaaatcccaaccccaattgtcggcgtgaagagaacctcctccccacacaaagaagaatcacccaagaaaaccaagacggaggaagagcagctggacactgagacctccacgacccaaagcgagaccatacaaacagcggcttccctgctcgccagccagaagacctcttccactgatctctcagacatccccgctctgccagctaatccaatccctgtgataaagaacagtattaagctcagattgaatcgttag

SEQ ID NO: 235344 - DNA, 858 bp, synthetic construct
  misc_feature 1..858: note = Description of Artificial Sequence: Synthetic coding sequence
  source 1..858: mol_type = other DNA
atgccgtttcctgtcacaacacagggaagtcaacagacacagcccccacagaagcactatggtatcacgagcccaattagtttagccgctcccaaggaaacagactgcgttctgacgcagaagctgattgagaccctcaagcccttcggcgtttttgaggaggaggaagaactgcagcggaggattctcatcttggggaagttgaacaacctggtaaaagagtggatccgcgaaatctccgaaagcaaaaacctgccccagtctgtgatcgaaaatgttggaggaaaaatttttacttttggcagctaccgacttggagtgcataccaagggggcagatattgatgccctgtgcgttgcacctcgacacgtggatcgttctgacttcttcaccagtttctacgacaaactgaaactgcaggaagaggtcaaggacctcagagccgtggaggaagccttcgtccccgtcatcaaactgtgcttcgacggaatcgaaatagacatcctcttcgccaggttagccctgcagacgattcctgaggacctggacttgcgggacgacagcctgctgaaaaatctggacatcaggtgtatcagatctctgaatggctgcagagttacggacgagattctgcacttagttccaaacattgacaactttcgattgaccctgcgtgcgataaagctctgggcgaagcggcacaatatttatagcaatatccttggattcttgggcggagtatcgtgggctatgctggtcgcacgcacttgtcagctatatcctaacgcaatcgctagcacccttgttcataaattttttttggttttcagcaagtggtacgtgttcaggctctactag

SEQ ID NO: 235345 - DNA, 1911 bp, synthetic construct
  misc_feature 1..1911: note = Description of Artificial Sequence: Synthetic coding sequence
  source 1..1911: mol_type = other DNA
atgccttttcccgtgacaacacaaggtcccccacagcctgcacctccgcctaacaggtacggcgtctccagtcctattagtctcgcagtcccaaaagagacggattgtctgctcactcaaagactgatcgagactctgcgtccctttggagtgttcgaggaagaggaggagttgcagaggcgaatactcgtgctggagaagctgaataatttagttaaagaatggatccgcgaaatcagcgagagcaaatctcttccccaatccgtcatagaaaatgttgggggaaaaatctttacgttcgggagctatcgactgggggtgcacactaagggagccgacatagacgccctgtgcgtggcaccctctcacgtcgatagatccgacttttttactagcttctacgccaaactgaagctgcaggaggaggttaaagacctcagagctgttgaggaagcgttcgtgccggtgattaagctgtgtttcgatggtattgaaatcgacatcttgtttgctcggttggcattacaaaccatccctgaggacctggatctgcgcgatgattctttgctgaaaaacctggatattcggtgcataagatccctgaatggctgcagagtgaccgatgagatcctacaccttgttcctaatatcgacaacttccgactgaccctgcgggctatcaaactttgggcgaagtgccacaacatctacagcaatattctgggatttctaggcggtgtgtcctgggctatgcttgtcgcccgtacttgtcagttgtatcccaatgctgtggccagtaccctggttagaaagttttttctcgtcttctccgagtgggagtggcctaatcctgttttacttaaagagcccgaggaacgtaatttaaatctgccggtttgggacccaagagtgaatccttctgatcgctaccacctgatgccaatcattacaccagcttacccacagcagaatagcacttacaatgtgagtattagtacacggatggtaatgatcgaagagtttaagcagggcctggccatcacccatgagatcctcctgagtaaagccgagtggtctaagctgtttgaggcgccatccttttttcagaaatataaacattatattgttctactagcaagcgctagcacggaaaaacagcatttagagtgggtcggactggtagagagtaagatccggatactagtgggttccttagaaaagaacgagttcatcaccctcgcccatgtgaacccgcagtccttcccagcgccaaaggaaaacccagacatggaagagtttaggaccatgtgggtcattggcctaggactgaaaaaaccggataattccgaaatcctgtccattgacctgacttacgatatacaatctttcactgacaccgtgtatcgccaagcagtgaactctaagatgttcgaaatgggcatgaaaatcactgccatgcatctcaggaggaaagaattgcaccaactgttgcctcaccacgtgttacaggacaagaaagcccacagcaccgagggcagacgtctgactgacctgaatgattcaagcttcgatctttcggcaggttgcgagaactcaatgtcagtgcctagctccacttctacaatgaagactgggccactcatttccagctcgcaaggacgtaactcacccgctctggctgtgatgactgcctccgtagctaatatccaggccaccgagttcagccttcagcaggtgaataccaacgagagcagtggggttgctcttaacgagtcaatcccccatgcggtatcccaacccgcaatttcaccttctcctaaagctatggtcgccagagttgtgtcctcgacatgcctgatatcccatcctgatctgcaggagacgcagcagcaaacgtacctcatactatag

SEQ ID NO: 235346 - DNA, 1737 bp, synthetic construct
  misc_feature 1..1737: note = Description of Artificial Sequence: Synthetic coding sequence
  source 1..1737: mol_type = other DNA
atggacttcctactgtttcagttcggtttatgtacctttaaatacgactacacggatagcaaatatatcacaaaatccttcaacttctacgtatttcccaagcccttcaataggagcagtcccgacgttaaattcgtatgccagtcttccagtattgatttcctggcctcccaaggttttgactttaacaaagtcttcaggaatgggatcccctatctgaaccaagaagaggaacgccagctacgggagcagtatgatgaaaaacggtcccaggccaacggggctggcgcactttcgtatgtaagcccaaatacttcaaagtgcccggtgacaatccccgaggaccagaagaaatttatagaccaggttgttgagaaaatcgaggatttacttcagtcagaggagaacaagaacctggaccttgaaccttgtacggggttccaacgaaagttaatttaccagaccctgagttggaaatatcctaaggggatccacgtggagacattagagacggaaaagaaagagcgttacattgtgatctctaaagtggacgaagaggagcggaagcgacgagagcagcagaagcatgctaaggaacaggaggagctcaatgatgcggtgggcttttctagagtgattcatgctattgctaattctggtaagctagtaataggacacaatatgctgctggacgtgatgcatactgttcatcagttctactgtccactgccagcagatcttagtgagtttaaagaaatgactacctgtgtgtttccaagactgctggatactaagctgatggccagcacgcagcccttcaaagacatcattaataacactagtcttgccgagttagagaagcgacttaaagagactcccttcaacccacccaaagtagaaagcgccgaaggctttcccagctatgacacagcttcagagcagttgcatgaagcgggatatgatgcttacattaccgggttatgttttatttccatggcaaattacctcggcagcttcttatcaccaccaaaaatacatgtctccgctaggagcaagctgatcgagcccttcttcaataaactctttctgatgcgagtgatggatataccctatctgaacttggaaggtccagacttgcagcctaagcgcgatcatgtgcttcatgtaactttccccaaggagtggaagaccagtgacctgtaccaactgttctccgcgttcggaaacatccagattagctggatagacgatacgtccgccttcgtcagtctttcgcaaccagaacaagtcaaaatcgcagtaaataccagtaagtatgctgaatcctatcgaattcagacttatgctgagtatatgggaagaaaacaggaagagaagcagattaaacggaaatggaccgaagatagctggaaggaggctgacagtaagcgcttgaaccctcagtgcatcccctacaccctgcagaatcattactatcgtaataacagctttacggcccctagcacagtgggaaagcgtaatttgagtccgagtcaggaagaggccggtcttgaggatggcgtgtcaggggagatcagtgacaccgagctggaacagaccgactcatgtgccgagcccctgtccgaagggagaaagaaggccaaaaagttgaaaaggatgaaaaaggagctgtcaccagcgggttctatttccaaaaactcacccgcaactctgtttgaggtgccagacacctggtag

SEQ ID NO: 235347 - DNA, 1782 bp, synthetic construct
  misc_feature 1..1782: note = Description of Artificial Sequence: Synthetic coding sequence
  source 1..1782: mol_type = other DNA
atggagataatccgctcgaactttaaaagcaatcttcacaaagtgtatcaagctatcgaggaagcagactttttcgccattgatggtgaattctcaggcatctcggatggtcccagcgtgtccgcgttgaccaacggattcgatactcccgaggagcggagtagccccgacgtgaagtttgtgtgccagtccagttccatcgactttctagcctcccagggtttcgacttcaataaggtcttcaggaacggcataccctacctgaaccaggaggaagagaggcaattgcgggagcagtatgatgaaaaacgaagccaggcaaacggtgctggagccctgagctatgtgtctccaaacaccagcaagtgtcccgtcacaatccctgaagatcagaaaaagtttattgaccaagtggtggaaaagattgaagatctgctccaatcggaagagaacaaaaatctggatctggaaccctgcacaggattccagcgcaagctaatctaccaaacgctctcatggaagtaccctaaaggcattcatgtggagaccttggagaccgagaaaaaagaacgatacatcgttatctctaaggtcgacgaagaggagcgtaagcggcgagagcagcaaaaacatgcaaaggagcaagaggaactaaatgatgcggtgggcttctcccgggtgatccacgctatcgcaaactcaggaaaactagtgatcgggcacaatatgctgcttgatgtgatgcacaccgtgcaccaattctactgcccactgcctgcagatttgtctgaattcaaagagatgaccacctgtgtctttccccgactgcttgacacaaagctgatggcgtcgacacagccttttaaagacatcattaacaataccagtttagccgaactggaaaaaaggctgaaggaaacacccttcaaccccccaaaggtggagtctgcagaaggattcccatcctacgacaccgcatcggagcagttacacgaggctggatatgatgcttatatcacaggcttgtgcttcatctctatggctaactatctgggcagctttctgagcccaccaaagattcatgtaagcgcccgaagcaaactgattgagcccttcttcaacaaactctttttgatgagagtcatggatatcccttacctgaaccttgaaggaccagatcttcagccaaagagggaccatgtgctgcacgtgacttttccgaaggagtggaaaacatctgacctctaccagttgtttagcgcattcgggaatattcaaataagctggattgatgatactagcgccttcgtgagtctcagccaaccagaacaagtgaaaattgccgtgaatacttcaaaatacgcagaatcctaccggatccaaacttacgcagagtatatgggaaggaagcaggaagaaaaacagatcaaaagaaagtggacagaagactcctggaaagaagctgatagtaagcggctcaacccacagtgtatcccttataccctgcagaatcattattacaggaataattctttcactgcccctagtaccgtgggaaaacgaaacctatcgccctctcaggaagaggctggattagaggacggtgtgagtggggaaattagcgacactgagttagaacagaccgatagctgcgcagagccgctgagcgaaggaagaaaaaaggcaaaaaaactgaagcgaatgaagaaggaattatcccctgcaggctccatttcgaaaaacagcccggcaaccctgttcgaggttcctgatacttggtag

SEQ ID NO: 235348 - DNA, 1920 bp, synthetic construct
  misc_feature 1..1920: note = Description of Artificial Sequence: Synthetic coding sequence
  source 1..1920: mol_type = other DNA
atggaaatcattcggagtaattttaaaagtaatcttcacaaagtttaccaggcgattgaagaggcagatttctttgccatcgacggagaattcagtggcatctcagatgggcctagcgtgagcgccctcacaaatggtttcgacacgcccgaagagaggtaccaaaagctgaaaaagcactcaatggattttttgctttttcaattcggtctatgtacgtttaaatatgattataccgacagcaaatatattaccaaatcttttaatttctatgtgttccctaagcctttcaacaggtcttcccctgatgtgaagtttgtgtgccagtcttcgtctattgacttcctggcctctcaggggttcgactttaataaggtcttccgcaacggcatcccttacctcaatcaagaggaagagcgccagttgcgggagcagtacgacgaaaaaaggagccaggctaatggcgctggcgctctgagttatgtgtcacccaatacgtccaaatgccccgtaacaatccctgaagatcaaaaaaagttcatagatcaggttgtcgaaaagatcgaggatctcctccaaagtgaggagaacaagaatctggacctcgagccttgcactggtttccagagaaaactgatttatcagactcttagctggaaatatccgaaagggatccatgttgagaccctcgagaccgaaaagaaggaaaggtatatcgtcatcagtaaagttgatgaagaagagcgcaaaaggcgcgagcagcagaagcacgccaaggaacaagaggaattgaacgatgcagtcggcttttcacgagtgatacacgccattgccaattctggcaagctagttatcggccacaacatgctgctggacgttatgcacactgtccatcagttctactgtcctttgcccgcagacctgtcagaattcaaggagatgaccacctgcgttttccctcgactgttggacaccaagcttatggctagcacacagccttttaaagacatcattaacaacactagcctggcggaactagagaagaggctcaaagaaacaccgtttaatcccccaaaagtagagagcgcggaagggttccccagctacgacactgccagcgaacaactgcacgaagctggttacgacgcttatataaccggcctctgtttcatcagcatggcaaactatcttggctcctttcttagccccccaaaaatccatgtctcggccaggtcaaagctaatagagccattctttaacaagttgttcctcatgcgtgtgatggacattccttacctgaatcttgaaggcccagacctgcagcccaaacgggatcatgtgctgcatgtgacatttcccaaagagtggaaaactagtgacctgtatcagctcttctccgcttttggtaatattcagattagttggatcgacgacactagcgctttcgtcagcctctcacagcctgagcaagttaaaatagctgttaatacaagtaaatacgcagagagctacagaatccagacctatgccgaatacatgggcagaaaacaggaagagaagcagattaaaagaaagtggaccgaagattcctggaaagaagctgactctaaaagactaaatcctcaatgcatcccttataccttgcaaaaccattattatcgcaataattccttcacagctcctagtacagtcggaaagcgcaatctcagtccaagtcaggaagaagccggactggaagacggcgtgtccggcgagattagcgataccgagctcgaacagacagattcttgtgccgagccactgtctgaagggcgaaagaaagccaagaagctgaaaaggatgaagaaagaactgagccccgctggttccatttcaaagaattcccctgctacattatttgaggtgccggatacctggtag

SEQ ID NO: 235349 - DNA, 624 bp, synthetic construct
  misc_feature 1..624: note = Description of Artificial Sequence: Synthetic coding sequence
  source 1..624: mol_type = other DNA
atggagattattaggtctaactttaaatccaacctccacaaggtgtatcaggctattgaagaggccgacttttttgcaattgatggcgagtttagcggcatttccgatgggcctagtgtatcagctctgaccaatggatttgatactcctgaggagagataccaaaagctgaagaagcactccatggacttcctcctgtttcagttcggcctgtgcacatttaagtacgattataccgactccaagtccagtcccgatgtgaagttcgtgtgtcagagcagcagcatcgacttcctagcgagccagggcttcgatttcaataaagtgtttcggaacggaatcccctacctgaatcaggaagaggaacggcagctgcgcgagcaatacgatgaaaagagatctcaggcaaacggggctggagccctgtcctatgtgtcgcctaataccagtaagtgccctgttacaatcccggaggaccagaagaagttcatcgaccaggttgttgagaagattgaggatctactccagagtgaggaaaataaaaacctggaccttgaaccatgcaccggatttcagcgcaaactcatttaccagacactttcgtggaagcggagcgatatctag

SEQ ID NO: 235350 - DNA, 1395 bp, synthetic construct
  misc_feature 1..1395: note = Description of Artificial Sequence: Synthetic coding sequence
  source 1..1395: mol_type = other DNA
atggaaattattagaagtaactttaaaagcaacttgcataaggtgtaccaggccatcgaagaggccgatttctttgccatagatggtgagttcagcggaatctctgacggccctagcgtgtcagcactgactaacggattcgacactccggaagaaagataccaaaaactgaagaaaaaagagcggtatattgtgatttcaaaggtcgatgaggaagagcggaagaggcgcgagcaacagaaacacgccaaggagcaagaagagctaaacgacgcggtgggcttttcccgagtcattcatgccattgcaaactccggtaaactggtaatcggacataacatgctgctggacgtcatgcataccgtccaccaattctattgtccactcccagctgatctttctgaatttaaagagatgacgacttgtgtttttcctagactcttggatactaagctaatggctagcactcagcctttcaaagatatcataaacaatacctctctagcagagttggagaagcgcctgaaggaaactccctttaatccccctaaggtggaatccgccgaggggttcccctcatacgacacagctagcgagcagttacacgaggccggatatgacgcatatattacaggtctttgctttatcagcatggctaactatctgggttcatttttatcacccccaaaaatccatgtgtcagccaggagtaaattgattgagcccttctttaacaagctctttctgatgcgcgttatggacatcccctacttgaacctagagggcccagatctgcagccaaaacgcgaccacgtgctccatgtgacattcccgaaagaatggaagactagtgacttatatcaactgttcagtgcgttcggtaacatacaaatcagctggatcgacgacacctccgcatttgtgtcactttctcaaccagagcaggtaaagatcgctgtcaacacctctaaatacgccgagagctatcggattcagacatacgcagagtatatgggcagaaagcaggaggagaagcagattaagcggaaatggactgaagattcgtggaaggaagcagattccaagagactcaatcctcagtgcatcccgtacaccctgcagaaccattactacaggaataacagctttactgccccttcaaccgttggcaagaggaacttgtccccaagccaggaggaggcaggcctggaggacggtgtctccggtgaaatctctgacacagagttggaacagaccgacagctgcgctgagccactgtctgaaggacgtaagaaggccaagaaactgaagagaatgaagaaggagctgtctcccgcagggagcatatcaaaaaactctcccgctaccctgtttgaggttccagatacttggtag

SEQ ID NO: 235351 - DNA, 1071 bp, synthetic construct
  misc_feature 1..1071: note = Description of Artificial Sequence: Synthetic coding sequence
  source 1..1071: mol_type = other DNA
atggacgcaggtgtcacagagagcggattgaatgtcactttgactatcagactgctgatgcatggaaaggaagtcggctccataatcggcaaaaaaggtgaaagcgtgaaaaggatccgggaggaatcaggcgctcgcatcaacatcagcgaaggcaactgcccggaacgcattattactttgactgggcctactaatgctatcttcaaagcctttgcaatgattatcgataagctagaggaggatatcaactcatcgatgaccaattcaactgccgcttcccgcccacccgtgactctgagattggttgtccccgcaacacagtgtggctcgctcatagggaagggcggatgcaagattaaggagatccgagagagtaccggagctcaggtccaagtggccggagacatgctgcctaatagtaccgagagggccattactattgcaggcgtgccccagtctgtgaccgagtgcgtgaagcagatttgtctagtgatgctggaaacgctgtcacagtccccccagggacgcgtgatgactattccttaccagccaatgccagcctcttcccctgtgatttgcgccggaggacaggatagatgtagcgacgcagccggatacccccacgccacgcatgatctggagggccctccccttgacgcttactccatacagggtcagcacaccatctcgccattagatctggctaaactcaatcaggttgccaggcagcagagccatttcgctatgatgcacggcggtaccggattcgccggaatcgattcgagtagccccgaggtgaaaggctactgggcctctctggacgcttccacacaaactacgcatgaactcactatcccaaacaacctgattggctgcatcatcggtagacagggagctaatattaatgaaattcgtcagatgagcggagctcagatcaaaatagcgaacccagtggagggttcgagtggaagacaggtaacgataacgggctctgctgcaagcattagcctggctcagtatctgatcaacgcacgcctgagctccgaaaaagggatgggctgttcgtag

SEQ ID NO: 235352 - DNA, 957 bp, synthetic construct
  misc_feature 1..957: note = Description of Artificial Sequence: Synthetic coding sequence
  source 1..957: mol_type = other DNA
atggacacgggcgtaatagaaggcggtcttaatgttactctgacaattcgcctcctgatgcatggcaaagaagttggtagcattatcggaaagaagggagaaagtgtaaagaagatgagggaagaaagcggtgcacggattaacatttccgaaggtaattgtccagaaaggatcattaccttagccggacctactaatgccatcttcaaggccttcgcgatgataatcgacaaactcgaagaggacatctcttcatccatgaccaacagcactgctgcctctcggcctcctgtgacattacgcctagtcgtgccagcatcccagtgcggatcccttattggcaagggagggtgcaagatcaaagagatccgggagtcgacaggcgcacaggtgcaggttgcaggggatatgctgcccaattccactgaaagagctatcaccatcgccggaatcccacagagtatcatagaatgcgtgaagcagatttgtgtggtcatgttagaaagccccccaaagggtgtgactattccttacagaccaaaaccttccagttccccagttattttcgctggaggacaggcctatactatccaaggccagtacgccattccccagccagacttaaccaagctccaccagctggctatgcagcaaagccactttcctatgacacacggcaatacaggtttttccgccggactcgatgcctctgctcagactacttcccacgagctgacaatccctaacgatctcattggttgcatcatcgggagacagggtgctaaaatcaacgagatccgacagatgagcggagcgcagataaaaatagccaatcctgtcgagggatctactgaccgtcaagtcaccattaccggttccgcagcatctatttcattagctcaatatctgattaacgtccgtctgagttcagagacgggcggtatgggctcttcctag

SEQ ID NO: 235353 - DNA, 1098 bp, synthetic construct
  misc_feature 1..1098: note = Description of Artificial Sequence: Synthetic coding sequence
  source 1..1098: mol_type = other DNA
atggacactggggtgatagagggcggtctgaatgtcaccctgaccatccgtttactgatgcatggcaaagaggtgggctccatcatcggcaaaaagggtgaatccgtgaagaaaatgagggaggaatccggggcaaggattaacatcagcgaaggcaactgccctgagcgaatcatcaccttggcgggtcccaccaatgctatcttcaaagcttttgccatgatcatagataagctggaagaggacatttcaagttctatgactaatagtacagccgcaagccggcctcccgtcactctgcgtctggtagtgcccgctagccagtgcgggtcactgatcggcaaggggggatgcaaaatcaaagagatacgggagagcacgggggctcaggtccaagtggctggagacatgcttcctaattcaacggaacgagccattacgatcgctgggattcctcagtccatcatcgaatgcgtcaaacaaatctgtgtcgtgatgctggagacactgagccagagccccccaaaaggagtaacaataccttatcgcccaaagccttcctcctcccccgtgatctttgctggaggccaggacagatactctaccggcagcgattcagcaagttttccccataccaccccgtccatgtgtctgaaccctgacctggaaggacctcctcttgaggcctataccatccaaggccagtacgccatccctcaacccgatctgacaaaattgcatcaactcgctatgcagcaatcacatttccccatgactcatggaaatactggctttagcggcattgaaagttctagtcccgaggttaaggggtattggggattagatgcttcggcgcagactacctcgcatgaattgaccattcctaacgaccttatcggttgtatcatcggacggcagggcgcaaagatcaacgagatacgtcaaatgagcggggctcagataaaaatcgctaatcccgtagaggggagcactgatcgacaggtaactattacaggcagcgccgcatcgatatcactcgcacagtatttaattaatgtgcgcctgtcatccgaaaccggagggatgggcagctcttag

SEQ ID NO: 235354 - DNA, 1008 bp, synthetic construct
  misc_feature 1..1008: note = Description of Artificial Sequence: Synthetic coding sequence
  source 1..1008: mol_type = other DNA
atggacacaggcgtgattgaaggcggtctgaacgttaccctgaccatcagactgctcatgcacggcaaggaagtcgggtccattataggcaaaaagggtgagtcagtgaagaagatgcgcgaggaaagcggtgcccgaatcaatatctctgaaggcaattgccccgaacgcatcatcactctggccggacctaccaacgcaatcttcaaggccttcgctatgattatcgacaagctcgaggaagatattagtagttcaatgaccaattcgacggctgcctcaagacctccagtgaccttgagactggtggttccagcgagtcaatgcggcagcctcatcggcaaaggaggatgcaagatcaaagagatacgcgagtccactggcgctcaggttcaggtggccggtgatatgctccccaattcaactgaaagggccataaccatagctgggattccgcagtccattattgaatgtgtcaagcagatctgtgtggtcatgctggaaaccctgtctcagtctcccccaaagggcgtgacaattccttaccgacctaaaccctctagctctccagttatcttcgctgggggtcaggcctacaccatacagggacagtacgccatcccccaaccagatctcacgaagctacatcagctcgctatgcaacagagccattttcctatgactcatgggaacactggcttttccggtatcgagagctcatcacccgaggtgaaaggttattgggccggtctggacgcctccgcccagacgacttctcatgagctaacaatcccaaacgacctgatcggttgcatcataggccgtcagggtgccaaaattaatgagatccgtcagatgtccggagcccagatcaagatcgctaaccccgtggaaggctctactgaccgacaggtgacaattaccgggtctgcggcaagtattagccttgcccagtacctgatcaacgtgcgactaagcagtgaaacgggcggaatgggctcgtcatag

SEQ ID NO: 235355 - DNA, 906 bp, synthetic construct
  misc_feature 1..906: note = Description of Artificial Sequence: Synthetic coding sequence
  source 1..906: mol_type = other DNA
atggatacaggcgtgatcgaggggggtctgaatgtgactctgaccattcgtttactgatgcacggcaaggaggtaggttcaataataggaaaaaagggagagtcagtgaaaaagatgcgggaagagtctggagctagaattaacatatcggagggaaactgccccgagagaattatcaccttggctgggcctaccaacgccatattcaaggcgtttgctatgatcattgataagctggaggaagatatatcctcctctatgactaactctacagctgcctcccgacccccagtgacactccggcttgtggtgcccgcatcccagtgcggaagcctgatagggaaaggcggatgcaagatcaaggagatacgagagtccactggcgctcaggtgcaggtggccggagatatgctgcctaatagcactgaacgggctattaccatcgccggtattccacagtctataatcgagtgcgtcaaacagatctgtgtagtgatgctggagagtccacccaagggcgtcactattccttatcgacccaagccaagctcctccccagtaatcttcgcgggaggccaggatcgctactctacaggtagcgactctgcatcctttccgcacactacaccttcaatgtgtcttaatcctgacctagaagggccacctcttgaggcctacaccattcagggtcagtacgcaatcccccaaccagaccttacaaaactgcaccagctcgctatgcagcagagtcactttccgatgactcatggtaataccggttttagtggaatggacactagtgtgtttatctccgtgagatgcagtgcacgagagcggcctgtcccacgttcacagctcgacatttgtcttaagcagacttccctgtcatcaatcttgctcgtttag

SEQ ID NO: 235356 - DNA, 1089 bp, synthetic construct
  misc_feature 1..1089: note = Description of Artificial Sequence: Synthetic coding sequence
  source 1..1089: mol_type = other DNA
atggacacaggcgtcatagaagggggtctgaatgttactcttacaattcgactgctgatgcatggaaaggaggtcggctccattattggaaagaaaggcgagagcgtgaaaaaaatgcgtgaggaatccggtgcccgaattaatatctccgaaggtaactgccctgagagaattatcacactggctggacccactaatgcaatctttaaagcattcgctatgatcatagacaaactggaagaggatatctcttctagcatgacaaactcaacagccgctagtaggccccctgtgacattgcggctggtggtgcctgcgtctcagtgcggcagccttatcgggaaagggggttgcaagattaaggaaatcagagagtcaacaggcgcacaagtgcaagtcgccggagacatgctcccaaactcaacagagcgagcaattactattgctgggatccctcagagtataattgagtgcgtgaagcagatttgtgtcgtcatgctcgagtcacctcctaaaggcgtgacgataccgtaccgtcctaaaccctctagttctccggtcatcttcgcagggggtcaagataggtatagcaccggatccgactctgctagcttcccacatacaaccccgtccatgtgccttaatccagacctcgaggggcctccattagaggcttacactatacagggccagtacgctattcctcaaccggacctaacaaagctccaccagcttgctatgcaacaatcacattttcctatgacgcacgggaacacaggcttttcaggtatcgaaagctctagccccgaggtgaagggatattgggcaggccttgacgcaagcgcccaaacaacaagtcatgagttgaccattcccaacgacctaattggctgtattatcggcagacaaggtgcgaagattaacgaaataagacagatgagcggagcccagatcaaaattgccaacccagtggagggatctacggaccgccaggtcaccatcacagggtccgccgcatcgataagcttggcccagtacctcataaatgtgagactgtcctccgagacgggcggaatgggctcgagctag

SEQ ID NO: 235357 - DNA, 996 bp, synthetic construct
  misc_feature 1..996: note = Description of Artificial Sequence: Synthetic coding sequence
  source 1..996: mol_type = other DNA
atggacacgggcgtaatcgaagggggtctcaatgtgactctcacgattcgccttctgatgcacggaaaagaggtgggcagtatcatcggtaaaaaaggggagtctgttaaaaaaatgagagaagagtcaggcgcacgaatcaatatcagcgagggcaactgccccgagcgtatcattacattggcaggtcccactaacgcgatcttcaaagctttcgcaatgatcattgataagttagaggaagacatctcttcttccatgactaactctacagccgcatcccgtcctccggtaacactgaggttagttgtgcccgcttcccagtgtgggagcctgatcggaaagggaggatgcaagatcaaggaaattagagaaagcacgggcgcacaggtacaagtcgcaggcgacatgttgccgaacagtactgaaagagccatcaccattgccggaatcccacagtccattatcgagtgtgtcaaacagatctgcgtggtgatgttggagtctcctcctaaaggcgtgaccattccttaccgccctaaacctagctcctctcccgtgattttcgctggagggcaggcctatactatacagggccaatacgcaatcccccaaccggatctgaccaaattgcatcagctcgctatgcaacaatcacacttccctatgacacacggtaatactggtttctccggaatcgaatcgtcctctccagaagtcaagggatactgggccggactcgacgcctcagcgcagacaaccagtcacgagctaaccattccaaacgatctaattggttgtataatcggaagacagggcgcaaaaattaacgaaatccgtcaaatgtccggagcacagatcaaaatcgctaatccggtagagggaagcactgacaggcaggtgacgatcactggctctgccgcatcaatttctctcgcccagtacttgataaatgtgcggctgtcatctgagaccgggggtatggggtctagttag

SEQ ID NO: 235358 - DNA, 1101 bp, synthetic construct
  misc_feature 1..1101: note = Description of Artificial Sequence: Synthetic coding sequence
  source 1..1101: mol_type = other DNA
atggacactggtgttattgaggggggactcaatgtcacgctgacgatccgacttctgatgcacggtaaagaggtaggaagcatcattggcaagaagggcgagtcagtgaaaaagatgagagaagagtccggtgcgcgtatcaacatcagtgagggtaactgtcccgaaagaataatcaccttagcagggccaaccaatgcaatttttaaggcattcgccatgataattgataagctggaggaggatattagttcttccatgacgaactccactgctgcatctcgcccacctgtcacactcagactggttgtgccagcctcccagtgtggcagtctcatcgggaaaggcggatgcaaaatcaaagagattagggagagcactggagcacaggtgcaggtggccggtgacatgctcccgaatagcaccgaacgcgcaatcactatcgcaggtattccccaatccattatcgaatgtgttaagcaaatttgtgtagttatgctcgagactctcagccaatccccccctaagggagtgacaattccatatcgccctaagccatccagcagtcctgtcatcttcgctggaggacaggaccgctacagtacagggtcagactctgccagcttcccccatactaccccctctatgtgcctgaatcccgacctggaggggcctcccctagaagcttacaccatccaggggcagtacgcgattcctcagccggacttaacaaaacttcatcaactggcgatgcagcagagccattttcccatgacacatggtaacaccggcttcagtgggatcgagtcatctagtcctgaggttaagggatactgggcaggcctcgacgcatctgcccagaccacaagccacgagctgactattccaaacgacctgatcgggtgtatcattggacggcagggtgccaaaataaacgaaataaggcaaatgtccggcgctcaaattaagatagccaaccccgtcgagggatccacagaccgccaagtgacaatcaccgggtctgctgcgagcatttctctggcccagtacttgataaatgtgagactcagctctgagacagggggtatggggtcatcttag

SEQ ID NO: 235359 - DNA, 1086 bp, synthetic construct
  misc_feature 1..1086: note = Description of Artificial Sequence: Synthetic coding sequence
  source 1..1086: mol_type = other DNA
atggacactggcgtgattgaggggggactgaatgtcaccctgaccatcagactgctgatgcacgggaaggaagtggggagcattattggcaagaaaggcgagtccgtgaagaaaatgcgggaggaaagcggggcaaggattaacattagtgaaggcaattgccccgagcggatcatcaccctcgcgggtcctacaaacgctattttcaaggcatttgctatgatcatcgacaagctagaggaggatatatcgtccagcatgacgaactcaacagccgcatcacgccctcctgtaacgctgcggctagttgtgcctgcctcccagtgtggctcactcattggcaaagggggatgcaaaatcaaagaaatcagagagagtacaggggctcaggttcaagtggctggggacatgctgccaaactccactgagagggcaattaccatcgccggaatcccccaatctatcattgagtgcgtcaagcagatttgcgtggtaatgctagagtctcctccgaagggggtcacgataccctatagacctaagccttcgagttcacctgtcatcttcgcgggtggccaggaccgttatagcactggaagcgacagtgcgtcctttcctcacactacgcctagcatgtgcctcaatcccgacctggaaggaccccctctggaggcttacacgatccagggccaatacgctatccctcagcccgacctcactaagctgcaccagctggccatgcagcagtctcacttcccaatgacccatggtaatacaggctttagcgggattgagagctcttccccggaagtgaaagggtattggggactggacgctagcgcacagactacatcacatgagctgactattcctaacgacctcatcgggtgcatcatcgggcgacaaggtgctaaaattaacgaaatccgccaaatgagcggggctcagataaagattgccaatccagtcgaaggatctaccgacagacaggtgaccattacgggctcagccgcatccattagtttagcgcagtatctgattaacgtcaggctcagctccgagacggggggtatgggctccagttag

SEQ ID NO: 235360 - DNA, 1056 bp, synthetic construct
  misc_feature 1..1056: note = Description of Artificial Sequence: Synthetic coding sequence
  source 1..1056: mol_type = other DNA
ctgagccccggtgacgctttctgggctccatccgtgctaccccactcaacactgtcaacactctctcaccacccacagccccaatttgggaggcgtatggaaagcaaagtgtctgagggcggacttaacgtgactctcaccattaggctcctcatgcatgggaaggtgcgcggagcggcaatagtgtctaagggcgaaactgtcaagaagatgagggaagagagcggtgcccgaatcaacattagtgaaggaaactgtccagaaagaatcgtcaccattaccggaccgacagatgccatcttcaaggcgttcgccatgatcgcgtataaatttgaggaggacatcatcaacagcatgagcaactctcccgctactagcaagccgccagtgacattgcgcctggtcgtgccggcttctcaatgtgggagcctgatcggcaaggggggaagcaaaattaaagagatccgggagagcacaggagcccaggtccaggtagccggtgatatgctccccaacagtacggaacgtgcggtgactatatccggtacacccgacgccatcattcagtgtgtcaagcaaatttgcgtggttatgttggagtcgccgcctaagggagcaaccataccataccgaccaaaaccagcatctacccccgtgatttttgcgggaggccaagcctataccattcaggggcaatatgcaattcctcaccccgatcagctgacaaagttacaccagctggccatgcagcagaccccgttccccccacttggacagaccaaccctgcctttccaggcctggatgcgagtccccctgcatctacacacgagctgacaattcccaacgatttaattgggtgtattatcggacggcagggaacgaaaattaatgagattcgccaaatgtccggcgcacagataaagatcgccaatgctacagaaggtagctctgagcgtcaaattacgatcacaggcactcccgcaaatattagcctggcccaatacctgatcaacgctaggcttacttcagaggtgacggggatgggcactctctag

SEQ ID NO: 235361 - DNA, 969 bp, synthetic construct
  misc_feature 1..969: note = Description of Artificial Sequence: Synthetic coding sequence
  source 1..969: mol_type = other DNA
ccacaaccacagttcggccgaaggatggaatccaaggtgtcagagggaggactcaacgtgaccctgactattaggttacttatgcatggcaaagaagttgggtctattatcggaaagaaaggcgagacagtgaagaagatgcgggaagaaagtggagctaggattaacatttcggaaggaaattgtcctgagagaatcgtgacaatcaccgggccaactgacgctatttttaaagccttcgcgatgattgcgtacaaattcgaagaggacatcattaattctatgagtaactctccagccacaagcaagccacccgtgacgctcaggctggtcgtcccagcctcccagtgtggctcgctgatcggcaagggagggagtaagatcaaggagatccgcgagtcaaccggagcgcaggtgcaagtggctggagatatgctgcccaactctacagagcgcgcagtgaccatctctggcactccagatgctataatccagtgtgtgaaacaaatctgtgtggtgatgctggaggcttacacaatccaggggcagtacgctatcccacacccagaccagctgaccaaattgcaccaactcgcaatgcagcagactccgtttcctcccctcggacagactaaccccgcattccccggagagaagctgcctctacactcatctgaggaggcccaaaatctgatgggccagtcctccggcctggatgccagcccccctgcctccactcatgagctgacaattccaaatgaccttattggctgcataattgggaggcaggggaccaaaattaacgaaattagacagatgtctggagcacagattaagattgctaacgcaaccgaaggtagctcagagagacagattactattaccgggacgcccgcaaacatttccctggcgcagtacctgatcaatgcacggttaactagcgaagtcacagggatggggacgctctag

SEQ ID NO: 235362 - DNA, 1038 bp, synthetic construct
  misc_feature 1..1038: note = Description of Artificial Sequence: Synthetic coding sequence
  source 1..1038: mol_type = other DNA
atgggcgaaggggacgctttttgggctccctctgtgctcccacacagcacactcagcaccctttctcatcacccccagccccagtttggccgacggatggagagcaaagtatcggagggcggtctcaatgttacgctgactatcagacttctcatgcacggtaaggaagtcggatccatcatagggaaaaagggagaaaccgtcaagaaaatgcgtgaggaatcgggagcaaggattaatataagcgaaggcaactgccccgaaaggatagtgacgattaccgggccaaccgacgctattttcaaagcctttgccatgatcgcgtacaaattcgaggaggatatcatcaactcgatgtctaacagtccagcgacatctaagccacccgtgacattgcggctggtggtgccggcttctcagtgtgggtcattgatcggcaaagggggatcgaagatcaaagagattagagaatctaccggcgctcaggtgcaggttgcaggcgatatgttgccgaactcaacagaaagggccgtaaccatctccggaacccccgatgccattattcagtgcgtgaagcagatttgcgtggtgatgttggaagcatacaccatccagggtcagtatgctattccacatccagacttgactaaactgcaccaacttgccatgcagcagacccccttccccccacttggccagactaatccagctttccctggtgagaagttgcccctgcactcatccgaagaggctcagaatcttatggggcagtccagtgggctggatgcatcgcctcctgctagtactcacgagctcactatacccaatgatctgatcggctgcatcatcgggcgacaggggactaaaattaacgagattcgccaaatgagcggcgctcaaatcaaaatcgcaaacgctaccgagggctctagcgagcgccaaatcacaattaccggcacacctgccaatatttctctggcacaatatctaatcaacgcaaggctgacgtccgaggtgacaggtatggggacactgtag

SEQ ID NO: 235363 - DNA, 1113 bp, synthetic construct
  misc_feature 1..1113: note = Description of Artificial Sequence: Synthetic coding sequence
  source 1..1113: mol_type = other DNA
atgggcgagggtgatgccttctgggcaccttcagtccttccccacagtactctgagcaccctgtcacaccatcctcagccacagttcggccgacgcatggagtccaaggtatcagaggggggacttaatgtgaccctcacaatacgtctgctgatgcacggaaaggaagtcggctccatcatcggcaaaaagggcgagaccgtcaagaaaatgcgggaggaatccggggctcgaatcaatatctctgaaggaaactgtcctgagcgaattgtgaccatcaccgggcctacagatgcgatcttcaaggcatttgcaatgatagcatacaaatttgaagaggacataatcaactctatgtccaatagtccggctacgtctaagcctcccgtgactctgagactcgtcgtgcctgcatctcagtgtgggagcctaatagggaaagggggttccaaaattaaggaaatacgggaatccacgggtgcccaggtacaagttgctggcgatatgctgcctaacagcacggagagagccgtaaccatctcgggtacacctgatgccatcattcagtgcgtcaagcagatttgtgtggtgatgctcgagagcccgccaaagggcgctactattccttaccggcctaagcccgcttccactccggtgatatttgctgggggacaagcttacactatccagggccagtatgccattccccatccagatctgaccaagttacaccagctggcaatgcaacagacacccttccctccattgggtcagacaaacccagcatttccaggcgaaaagctccccctgcattcaagcgaggaggcccagaatctgatgggccagagcagtggacttgacgcatcaccccctgccagtacccatgagttgaccatccctaacgatctgatagggtgtatcattggtcgacaaggaacgaagatcaatgagatacggcagatgagcggcgctcagatcaaaatcgccaatgctacggaaggctcctccgagagacaaataaccatcacaggaacaccagccaacatctcccttgcacaatacctgatcaatgccagattgacttcagaagtgacaggcatgggaaccttgtag

SEQ ID NO: 235364 - DNA, 1056 bp, synthetic construct
  misc_feature 1..1056: note = Description of Artificial Sequence: Synthetic coding sequence
  source 1..1056: mol_type = other DNA
atgggtgaaggcgatgcattctgggcaccaagtgtgctgcctcactcaacattgtctaccctgtcccatcaccctcaaccacagttcggacgccgaatggagtctaaggtgagcgaagggggtttgaacgtcactctcaccataagattattgatgcatggaaaagaggtgggaagtatcattgggaagaagggagaaacggtgaagaagatgcgggaggagagcggtgcacgtattaacatctctgaggggaattgcccagaacgtatcgtcaccatcactggccctacagacgcgattttcaaggcctttgctatgattgcctataaatttgaggaggacattataaatagtatgagcaatagcccagcaactagtaagcctcccgtgaccttgcgccttgtggtacctgcctcccagtgtggctctctgataggcaaaggtgggagcaagatcaaggagatcagggaaagtacaggagctcaggtacaggtcgccggtgacatgctcccgaacagcacagagcgggctgtgaccattagtggaacgccggacgcaatcatccagtgcgtgaaacagatctgcgtggtcatgctggaaagtccgccaaagggcgcaaccataccatacagacccaagccagcgagtaccccagtcatttttgcgggaggccaggcctacactatccagggccagtacgctattccacatcccgatcagctgaccaagcttcatcagcttgccatgcagcagaccccctttcctcccttagggcagactaaccctgcctttcctgggttagacgcatctccacccgcttccacacacgagctcacaatacctaacgatctgattggatgcatcatcggtcgacaggggacaaagattaacgagatccgtcagatgagtggagcacagatcaagatcgcaaatgcaacggagggctcttcggagcgtcagattacaattactggtacacctgcaaatatctccctcgcacaatacctcatcaacgcacgcctgacaagtgaagtgacaggaatgggcaccctgtag

SEQ ID NO: 235365 - DNA, 1116 bp, synthetic construct
  misc_feature 1..1116: note = Description of Artificial Sequence: Synthetic coding sequence
  source 1..1116: mol_type = other DNA
atgggagagggtgacgccttctgggccccttcagttcttccccactccaccctcagcaccctctcacaccaccctcagccccagtttgggcgtcggatggagagcaaggtttcagaggggggacttaacgtgactctgactattcgcctgcttatgcacggaaaggaggtgggcagcattattgggaagaaaggggagactgtcaagaagatgagggaggaaagcggagcaagaattaatattagcgaagggaactgcccagaaaggattgtcaccattactggtcccactgatgctatctttaaagcatttgcaatgattgcctacaagtttgaggaggacatcatcaactcgatgagcaactcaccagcaacttctaaaccgccagtgacactaagattggttgtacccgcttctcagtgtggctccctgataggcaagggaggatcaaagatcaaagagatacgcgaatcaaccggggcacaagtccaggtcgctggagatatgcttcccaacagcacagagagagcagtgactataagtggcacccctgatgcaatcatccagtgcgtgaagcaaatctgcgtggttatgctcgaatcaccccctaagggagccacaataccataccgacccaaaccagcaagtaccccagtgatcttcgcgggaggtcaggcctacactatccagggccagtacgctatccctcaccccgatcagttgacaaagctccaccaattagccatgcagcagactccgttcccacctctggggcagaccaatccggcattccctggagagaagcttcccttacatagctcagaggaagctcagaatcttatgggtcagagctcagggttggatgcgtccccgccagcttcaacccacgaattaaccatacctaatgacttaatcggatgcatcattggaaggcaggggacgaaaatcaacgaaatccggcaaatgtctggtgcacaaatcaagattgccaatgccaccgagggatcctcagagcgccagatcacaatcactggaaccccagcaaacatttctctcgcacagtatcttattaatgccaggctgacctctgaggtgacgggcatgggtaccctgtag

SEQ ID NO: 235366 - DNA, 1116 bp, synthetic construct
  misc_feature 1..1116: note = Description of Artificial Sequence: Synthetic coding sequence
  source 1..1116: mol_type = other DNA
atgggagaaggagatgcgttctgggcaccatctgttcttccacatagcaccctctcaactctgagtcaccacccacagcctcaattcggcaggcgcatggagtccaaagtcagtgaaggcggactgaatgtgacactcaccatcaggttactgatgcacggtaaggaggttgggtccattatcggtaaaaaaggcgaaacggttaagaagatgagggaagagtctggagccagaattaacatctcagagggaaattgtcctgagagaatcgtgactatcactggtcctactgacgccatttttaaagccttcgccatgatagcctacaagtttgaagaagacatcatcaattccatgagcaacagtccggcaacctccaaacctccagtgaccctccgtctggtcgtgcccgcttctcaatgtggatccctgataggtaaaggcggatctaaaatcaaagagattagggagtctaccggcgctcaagtccaggtggccggtgacatgcttcccaattctaccgaacgcgcagtcaccattagcgggacccctgatgctatcatccaatgtgtcaaacagatttgcgtcgtcatgttagaatcgccaccaaaaggagctacaataccctatcggcctaagccagcgtccactcctgtcatattcgccggaggtcaggcttataccatccaggggcagtacgcgatcccacatcctgaccagctgacaaaattgcatcagttggccatgcagcaaacacctttccctccactcgggcagaccaatccggcttttcctggggagaagctccccttgcatagttccgaggaagctcagaatcttatgggtcagtcttcaggtcttgatgctagccccccagcaagtacccatgagttaactatacctaatgacctgatcgggtgcattattggcagacagggcacaaagattaacgagattagacagatgtccggggcacagatcaagatagccaacgcaaccgagggtagttccgaacgtcagatcactattacaggaacccctgctaatatatccctagcccagtatctgatcaatgcacgcctcaccagcgaggtcaccgggatgggcaccctctag

SEQ ID NO: 235367 - DNA, 18 bp, synthetic construct
  misc_feature 1..18: note = Description of Artificial Sequence: Synthetic coding sequence
  source 1..18: mol_type = other DNA
atggagagtaaagtctag

SEQ ID NO: 235368 - DNA, 5070 bp, synthetic construct
  misc_feature 1..5070: note = Description of Artificial Sequence: Synthetic coding sequence
  source 1..5070: mol_type = other DNA
atgggaagtaaaagaagaagagcaaccagtcccagctctagcgtctcaggtgattttgatgatggtcatcactcagtgtctaccccaggaccctccagaaagaggcggcgattatccaatctccccacagtggacccaattgcggtttgtcacgaactgtataacaccattcgagattacaaagacgaacagggtagactcctctgcgagttattcattcgcgctccgaaaagaaggaatcaacccgattattacgaagtcgtctcacaaccaattgatctgatgaagatccagcagaagctcaagatggaagagtatgatgacgtgaacctgctgactgctgattttcagctgctgttcaacaatgccaagtcgtactataagccagatagtcccgagtataaggccgcttgtaagctgtgggatctctacctccgaaccaggaacgagtttgtccagaaaggcgaagctgatgacgaggacgatgacgaagatggccaagacaatcagggaactgtcaccgagggatcttcacctgcatacctgaaagagattctcgaacaattactggaggcaattgtcgtggccactaacccgtccgggagactgatcagcgagctgtttcaaaagctaccttctaaagtgcagtatcccgattactacgcaatcataaaagaacctattgacctgaaaaccatcgcacagcggatccaaaatggtagctacaagtctatccacgccatggcaaaagatatcgatcttctagccaagaatgccaagacctacaacgagccaggcagccaggtctttaaagatgccaacagtattaaaaagatcttctatatgaaaaaggcggagattgagcaccacgaaatggctaagagtagtctgcgaatgaggaccccctccaacctggctgccgcacggctcaccggcccaagtcattccaaagggtccctgggggaagagagaaaccctaccagtaaatactacagaaacaaacgcgcagtgcaaggtgggcgtctgtcggccatcactatggccctgcagtacggcagtgagtctgaggaagatgcagctttggccgctgctcgctacgaggaaggcgagtctgaggctgagagcatcacttcttttatggatgtgtccaaccccttctatcagctgtacgatacggtccggtcgtgccgcaataatcaggggcaactgattgctgaacctttttaccacttgcctagtaagaaaaagtatccagactactatcagcaaataaagatgccgatcagcctgcagcagataagaaccaaattaaagaatcaggagtatgaaacactcgaccacctggagtgtgacctgaacctgatgttcgagaacgcaaaaagatacaacgtacccaatagcgccatttacaaacgcgtcttaaaactccagcaggtgatgcaagcaaagaaaaaagagcttgctagacgggacgacattgaagacggtgattccatgatcagttcggccactagtgataccggcagcgccaagcggaaaagtaagaaaaatattagaaaacagcggatgaaaatcctgttcaacgtggtgcttgaggctagagaacccggaagtgggaggcggctttgcgacctgtttatggtcaaacccagcaaaaaagactaccctgactattataagatcatactggagccaatggacctaaagattatcgagcacaacatcagaaatgacaagtacgccggtgaggagggaatgattgaggacatgaaacttatgtttcgcaatgcgagacactataatgaagagggaagccaagtctacaatgatgcccacatcctggagaaattgctgaaagagaaacggaaagagttgggtcccctccctgacgacgatgatatggcctctcctaagcttaagctcagccggaagtccgggatctctccaaagaagagcaaatacatgacaccgatgcaacaaaagctcaatgaagtgtatgaggcagttaagaattataccgacaagcggggtcggagactgtcagctattttcctccgcctaccttctaggagcgaacttcctgactactatctgaccatcaaaaaacctatggacatggagaagatccgaagccacatgatggctaacaagtaccaggacatcgattcaatggtggaggattttgtcatgatgtttaacaatgcttgtacctataacgaaccagagagcttgatatacaaagacgccctagttctgcataaggtgctgctcgagacgagacgggatctggagggggacgaggattcccacgttcctaatgtcacacttctgattcaggagttgattcacaacctctttgtttccgtgatgtcacaccaggacgacgaaggtcgttgttatagtgactctctggctgaaatcccagctgtggatccgaattttcccaacaagcctcccctgactttcgacatcatccgaaaaaatgtggagaacaaccgttaccgtcgacttgatctatttcaggagcacatgttcgaggtactggagcgcgcacgcaggatgaacaggactgactcggagatctatgaggatgctgtggagctgcagcaattcttcatcaaaatccgggacgagttatgcaaaaacggcgagattttgctaagcccagccttgtcttacaccaccaagcacctgcacaacgacgtggagaaagagcgcaaggagaagctccctaaggagattgaggaggataagcttaagagagaggaggagaaacgcgaagcagaaaaatcagaggactcctcgggcgctgccggtctctccggacttcatagaacatactcacaagattgctcatttaagaacagcatgtaccacgtgggagattacgtatatgtggagccagccgaagccaatcttcagcctcatattgtctgcatagagagactgtgggaggacagcgctggagagaagtggctgtacggttgctggttctaccggccaaacgagacttttcacctcgccacgcggaaattcttggaaaaggaagtatttaaaagcgactattacaataaggtgcccgttagcaaaattcttggtaaatgcgtggttatgttcgtcaaggagtatttcaagttatgccctgaaaatttcagggatgaggacgtattcgtgtgcgaaagtcgctattcagcaaaaactaagagcttcaagaagatcaagttatggaccatgcccatttcctccgtgcgttttgtgccacgagatgttcctctgccggtggtgcgcgttgcctccgtcttcgcgaatgccgacaaaggagatgacgaaaagaataccgacaactctgaagacagtagggccgaggataatttcaacctggagaaagagaaagaagacgttccggtcgaaatgtccaatggcgagcccggatgtcactatttcgagcaactgcactacaacgacatgtggttaaaagtcggcgactgcgtatttatcaaatctcatgggctagtgcggccaagagtcgggagaatcgaaaaagtttgggtccgagacggcgcagcatacttttacgggcctattttcatccaccctgaagaaaccgaacacgagccaacaaagatgttttacaaaaaagaggtattcttaagtaacctggaagaaacctgcccaatgacatgcatcctgggcaaatgcgctgtgctgtccttcaaggattttctctcttgtcgacccacagagatcccggaaaatgacatcctcctctgtgagagcagatataatgagtctgataagcaaatgaaaaaatttaaagggcttaagcgcttcagtcttagcgccaaggtcgtggatgatgagatctactattttagaaaaccaatcgtccctcagaaggaaccttctcctctcctggaaaaaaagattcagctcctcgaagcaaaatttgccgaactggagggcggtgatgatgatatcgaagaaatgggcgaggaagatagcgaggtgatcgagcctccttcgcttccccagctgcagacccctttggccagcgagctggatcttatgccttacacccccccacaaagcacacctaaatctgccaaggggagcgccaagaaggaagggtcgaaacgcaagattaacatgagcggctacattctcttcagctcggagatgagagcagtgatcaaggcgcagcatccggattattccttcggcgagctgagccggttggtcggaacagaatggcgaaatctcgagaccgccaagaaagctgaatacgaggaaagggcagcgaaggtggcagaacagcaggaaagggagagagccgctcagcagcagcagccgagcgcgtccccacgtgccggaactcctgtgggggcactgatgggcgtggtcccaccaccaaccccaatgggcatgctcaatcagcagctgacgcctgttgccggtatgatgggaggctacccacctgggctaccccctcttcagggccctgtggacggcctggtgagtatgggttcgatgcaacctctgcatccagggggaccaccccctcaccatctgccaccgggtgtgccgggactccccggtattccccctcctggcgttatgaaccaaggagtggcaccaatggttggcacccccgctccaggaggaagcccttatggccagcaagtgggagttctggggcctccaggacaacaggcgcctcccccttatcccggtcctcatcccgctgggccaccagtgatccaacagcccaccaccccgatgttcgtcgccccaccgccaaagacccaacgcttgctccattcagaggcataccttaagtatattgaaggcctcagtgccgagtccaactccatctcaaagtgggaccaaacactcgctgcaagacgaagggatgtgcatttatctaaagagcaggagtctcggctgccatcccattggctgaagtcaaagggtgctcacaccaccatggctgatgctctgtggaggttaagagacctaatgctccgggatactctcaatatccgccaggcctataacctcgagaacgtttag

SEQ ID NO: 235369 - DNA, 4749 bp, synthetic construct
  misc_feature 1..4749: note = Description of Artificial Sequence: Synthetic coding sequence
  source 1..4749: mol_type = other DNA
atgggaagcaagcgcaggcgggcaacgtctccttcctcttctgtgagcggagacttcgacgatggccatcactctgtaagcacgcccggaccctcccgcaaaagacgtaggttgtccaacctgcctacagtggacccaatcgccgtgtgccacgaactttataacaccatccgggattataaggacgagcagggtcggctcctctgcgagttgtttattcgtgccccaaagaggcggaaccaaccagactactacgaagtggtctcacaaccgatcgacctcatgaaaattcagcagaagctaaaaatggaggagtacgatgacgtcaacctcctgaccgcggatttccaactcttgtttaataacgccaaaagctattacaagccggatagcccagaatataaggccgcttgtaaactatgggacctctatctccggaccaggaacgagttcgttcagaagggtgaagccgatgacgaggacgacgatgaggatggccaggataatcagggcacagtcactgaaggcagttcaccagcctaccttaaggaaatccttgaacagctgctagaggcaatagttgtcgcaactaatccctctggcaggctgatctctgaactgtttcagaagctgcccagcaaagtccaatacccggactactacgctattatcaaggaaccgatcgacctgaaaaccatagcccagcgcatccagaatggttcctacaagagcatccacgcaatggctaaagatattgatcttctggctaaaaatgctaagacatacaacgagcccggatctcaagtattcaaagatgccaacagtatcaagaagattttttatatgaaaaaggccgaaatcgaacaccatgagatggcaaagagtagcctacgaatgcggacaccctcgaatcttgctgccgctcgcttaacgggcccatcacattctaaaggatccttgggcgaagagaggaaccctacttctaagtattaccgcaataagagggccgtgcaggggggtcgactgtccgccataacgatggctctgcagtacggcagtgagtctgaggaggatgctgctctcgcggctgcaaggtacgaagaaggggaatccgaggcagaatccattaccagcttcatggacgtctcaaacccattttaccaactgtacgacacagtgaggagctgtcgcaacaatcaaggacaactaattgcggaaccattttatcacttgccttcgaagaagaagtatcccgactactatcagcagattaagatgcctatcagcttacaacaaattcgcactaagttgaaaaatcaggaatacgaaactttagaccatctggaatgtgatctaaacctgatgtttgaaaatgctaaacgctacaatgtgcccaacagcgctatttataaacgggtgcttaaacttcagcaggttatgcaggcaaaaaagaaagagttggccaggcgcgacgacatcgaggacggcgattcaatgatatcctctgcgacaagcgacaccggatccgcaaagcgtaaatctaaaaagaatatccgcaaacagagaatgaagatactcttcaacgtcgtgctggaagcacgggagccgggtagtgggagacgcttgtgtgacttgtttatggtgaagccaagcaaaaaggactatccagactactataaaatcatcttggaaccgatggacctaaagattatcgagcacaacataagaaatgataagtatgcgggagaagagggtatgatcgaggatatgaagctaatgttccgaaatgccagacactataacgaagagggcagccaggtctacaacgacgcgcacatccttgagaagttattgaaggagaaacggaaggaactgggtccactgccagacgatgacgatatggctagcccaaaactgaaattgagccgcaagtctggcattagtcctaagaagtcgaaatatatgaccccaatgcagcagaaactcaatgaggtgtacgaggctgttaaaaattatactgacaagcgcggtaggcgtctaagcgcaatctttttgcgtttaccctcaagatctgaactgcctgattactatctcactatcaagaagcccatggatatggagaagatacggtcgcacatgatggccaacaagtatcaagacatcgactccatggtggaggacttcgtcatgatgttcaataatgcctgcacatacaacgaacccgagagccttatctataaggatgctttagtcctgcacaaggtgctcctagagacaagacgagatctcgaaggcgatgaagactctcatgtccccaacgtgaccctgctaatccaagaactgattcacaacctttttgtatccgtgatgagtcaccaagatgatgaaggccgatgttatagtgactctctagctgagatccctgcggtggatccgaatttccccaataagcccccattgactttcgatataatcagaaagaatgttgagaacaatagatacaggcgcttagatctctttcaggagcacatgttcgaggttctggagcgggctaggcggatgaacaggaccgactccgagatctatgaggatgcagttgagctacaacagttttttataaagatccgcgacgaactctgcaagaacggggaaatccttttatcccccgcactttcgtatacgacaaaacatctccataatgacgtcgagaaggagcggaaagaaaaactgcctaaagagattgaggaggacaagctgaagcgggaggaagagaagcgcgaggcggaaaaatcggaggactcgagtggcgcagcgggtctgtctggtctccaccgaacttattcccaagactgttcgttcaagaattccatgtaccacgtcggcgattacgtttacgttgagcccgctgaagccaatctgcaaccgcacattgtgtgcattgagagactgtgggaagattccgccggtgagaagtggctatatggatgctggttctacaggccaaatgaaacgttccacctagctacacgcaaatttcttgaaaaagaggtgtttaaatccgactattacaataaggtgcctgtgtctaagatcctgggtaagtgtgtggtgatgtttgtcaaggagtactttaaactgtgtcctgagaattttcgtgacgaggacgtgtttgtttgcgagtcaagatatagcgctaagactaaaagtttcaagaagatcaaactttggaccatgcctatttctagcgttagattcgtgccacgagatgtacccctgcccgtggtgagagtcgcctccgtgtttgccaatgctgataagggggacgatgagaaaaatactgataactccgaggactcacgagcagaggacaatttcaatttagagaaagaaaaagaggacgtgccggttgagatgagcaacggcgaacctggctgtcattactttgaacagctgcactacaatgacatgtggctgaaagtgggcgattgcgttttcatcaaatctcacgggcttgtaagacctcgcgtcggacgcattgagaaggtgtgggtgcgagacggcgctgcttatttctacgggcctatttttatacacccggaagaaaccgagcatgagcctacaaagatgttttataagaaagaggtcttcctttcaaacctagaggaaacttgtccgatgacatgtatcctgggcaagtgcgctgtactgtcttttaaagatttcctgtcctgccggccaaccgaaatccccgagaatgatattctgctgtgtgagtcccggtataacgagagcgacaagcagatgaaaaagttcaaaggtttgaaacggttctcactgtctgcaaaggtcgtcgacgacgaaatctactactttagaaagcctattgttcctcagaaagaaccaagccccctattggaaaagaagatacagctcctggaagcaaaattcgccgagttggaaggtggcgacgacgatatcgaagagatgggcgaggaggacagcgaagtgattgagccgccatctcttcctcagttacagactcccttggcatctgagctggacctgatgccatatactcctccccagtctacaccaaaaagcgccaagggtagcgccaaaaaagaaggctcaaaaaggaaaattaacatgtccggatatatcttgttcagcagcgaaatgagagccgtcattaaggcacaacaccccgattactctttcggcgagctgagtagattagtcggtacggaatggagaaacctggagacagccaaaaaagctgaatatgaaggggttatgaatcagggggtcgctcccatggtcgggacaccagcacccggtggctcaccttacgggcagcaggtaggggtgcttggtccacctggacagcaagcacctcctccataccccggaccccaccccgctgggccaccagtgattcagcagcctaccacaccgatgtttgtggcaccaccacctaagacccagaggctgttgcatagcgaagcatatctgaagtatatcgagggcctgtccgccgaatcaaatagcatctcaaaatgggatcagacactggccgctcggagacgcgacgttcacctttcaaaggagcaggaatctagactgcccagccactggttgaagtcgaagggtgcccatacaacgatggctgatgctctctggcgacttcgtgacttgatgctgcgagacacccttaacatacgccaggcctacaatctggaaaatgtatag

SEQ ID NO: 235370 - DNA, 4808 bp, synthetic construct
  misc_feature 1..4808: note = Description of Artificial Sequence: Synthetic coding sequence
  source 1..4808: mol_type = other DNA
atggggagtaagcggcgacgtgctacttcccccagttcttcagtctcaggagacttcgacgacggacatcacagtgtgagtacccctggccctagtaggaagcgtaggcgtctcagtaatctcccgactgttgatcctattgcggtctgtcacgagctgtataataccatccgagactacaaagacgaacagggccgattactgtgtgaactgttcatcagagccccaaaaaggcgaaaccagcccgactattacgaggttgtcagccagccaatcgacctgatgaagattcagcagaaactcaagatggaagaatatgatgacgtgaacctccttacagcagactttcagttactgttcaataacgcaaagagttattacaagcccgacagtccagagtataaagccgcatgtaagctgtgggacctgtacctgcgtactcggaacgagtttgttcagaagggagaagcagacgacgaagacgatgacgaagacgggcaagacaaccaggggaccgtaacagaagggagctcgccagcgtacctgaaagaaatattagagcagctcctggaagctatcgtggtcgccactaaccccagtggacggctgatctcagagctgttccaaaaactacccagtaaggtacagtatccagactactacgccattattaaggagcctatagatctgaagacaattgcgcagcggattcagaacggatcctacaagtctattcacgcgatggccaaagacattgatctactcgctaagaatgctaaaacctataatgagccaggatcacaagtattcaaagacgccaatagtattaaaaaaattttctacatgaaaaaagccgagatcgaacaccacgagatggcgaaatcctccctgcgcatgtctaacaagcgcgctgtccaagggggtcgcctttcggccatcaccatggccctacagtatgggtctgaatccgaggaagacgcggctctagccgcagcacggtacgaagagggggaatccgaggccgagtcgattacatccttcatggatgtgtcaaatcctttttaccaactttatgacaccgtaagaagctgcaggaataatcagggccagttgattgccgaacctttctatcacttaccaagtaagaaaaagtatccagactattaccagcaaattaaaatgccgatcagtctacagcagatacggaccaagcttaaaaatcaggagtatgaaactctcgaccatctggaatgtgacttaaatcttatgttcgagaacgcaaaaagatataacgtcccaaactccgccatttacaagagagtgctgaaactgcagcaggtgatgcaggccaaaaagaaggaattagcccgtagagatgatattgaagacggggacagtatgattagttcagccacttccgacactggaagtgcaaagagaaaatcaaaaaagaatattaggaaacagagaatgaaaattctcttcaatgtcgttctcgaggccagggaacccggtagtggtcgcagactctgtgatctgtttatggtgaaaccaagtaaaaaagactaccccgactactataaaattatcctcgagcctatggatctcaagattatcgaacataatattcgcaacgacaagtatgctggggaggagggcatgatagaagacatgaaactgatgtttcgcaacgccaggcactacaatgaggagggctctcaggtgtataacgatgcacatatattggagaagctcctgaaggagaaacgaaaggaattgggaccactcccggatgacgatgacatggcttctcccaaacttaagctaagtagaaaaagtggtatatctccaaagaagagtaagtacatgaccccaatgcagcagaaactgaacgaggtatatgaagctgtcaaaaactataccgacaaacggggacgccgactgagcgccattttcctgagactccctagcagatcggaattgccggattattacctgacgatcaagaagcccatggacatggagaagatccggtcccacatgatggccaataaatatcaggatatcgacagtatggtagaagattttgtgatgatgtttaataacgcatgcacatataatgagcctgagtccctgatctacaaggacgcactggtgttacacaaggttctccttgaaacacgcagagatctggaaggcgatgaggactcccatgtccctaatgtgacccttttgatccaggaacttatccacaatctgtttgtctcggtcatgtctcaccaggatgacgagggacgctgctattccgactccttagctgaaatccctgctgtggacccaaattttcctaataagccacctttgacctttgacattatccgaaagaacgtcgagaacaataggtaccgtcggctggacctctttcaggagcacatgttcgaggtactggagcgtgcccgacgaatgaacaggacagattccgagatttacgaggacgccgtcgagttgcagcagttttttataaagatccgggacgagttgtgtaaaaacggagaaatattgctctccccggcactgtcatataccaccaaacacctgcataacgacgtcgagaaagaacgtaaggaaaaactccccaaggaaatcgaagaggataaattaaagagggaggaggagaaaagggaagctgagaaaagtgaggactccagcggcgcagctgggctgtccggattgcaccgcacctatagccaggactgctctttcaaaaacagcatgtaccatgtcggcgactacgtgtacgtagagccagctgaggctaatttacagccccatatcgtttgcatagaacgactgtgggaagattcggcaggcgaaaaatggctgtacggctgctggttttacaggcctaatgagaccttccatctagcaacccgcaagttcctggaaaaggaagtgtttaagtcagattactacaataaggttcccgtctctaaaatcctgggtaagtgcgtcgtgatgtttgtcaaagagtatttcaagctttgccccgagaactttagagatgaggacgtgtttgtgtgcgagagtaggtactcagccaaaacaaaaagcttcaagaaaattaagctctggacaatgcccatctcttcagtgcggtttgttcctagagacgtgcctctccccgtggtacgagtagcgagtgtattcgcgaacgctgacaaaggagatgatgagaagaatactgataattcggaggattcaagggccgaggataattttaacctggagaaagagaaagaggatgttcccgtggagatgagtaacggcgaaccaggttgccactactttgagcagctgcattacaacgatatgtggctgaaagtgggcgattgtgtgtttatcaagagccacggcctggttcgcccaagagtcggacggatcgagaaggtgtgggttagagacggcgcagcctatttttacgggcctatcttcatccacccggaggagacagagcacgagccaaccaagatgttctataaaaaagaggtcttccttagcaatcttgaagaaacctgcccaatgacctgcattctgggcaaatgcgccgtgttgagttttaaagatttcctgtcgtgccgtcctacagaaatcccagaaaacgacattttattatgtgagagccggtacaatgagtcagacaaacagatgaaaaagttcaagggcctgaagcgattcagcctgtccgcaaaagtagtggacgacgagatttattatttcaggaagcccattgtgcctcagaaagaaccctcgccattgttggaaaaaaaaattcaactcttagaagccaaattcgcagagctggaaggaggagacgacgatatcgaggaaatgggggaagaagactccgaggtcattgagcccccatcactgcctcagctgcagaccccactggctagcgaacttgatctcatgccgtatacccccccacagtctacgcccaagagtgctaaaggatcagccaaaaaggaaggctctaagcgtaagatcaatatgtccggatacatcctgtttagtagcgaaatgcgagcagtcatcaaggctcaacatcctgattattcatttggcgagctttcaagattggtagggaccgaatggaggaacctggagaccgcaaagaaggcagagtatgaggggatgatgggcggttatcctccagggctgcctcctcttcaggggccagtcgatggacttgtgtctatgggcagcatgcaacctttgcaccctggtggtccgcctccccatcaccttcctcccggagtacccggactgcctggcatcccccctcccggtgtaatgaatcagggggtggcccctatggttggaactccggctcccggaggatccccttatggacaacaggtgggcgtcctaggaccgccaggccaacaggcacctccaccttatcccggaccacatccagccggtccaccagtcattcagcagccaaccacccctatgttcgtagccccaccccctaaaacgcagcggctcctccacagcgaggcttacctaaaatacattgagggactgtcagctgagtctaactctattagcaaatgggaccagaccctagcggctagacgtagagatgtgcacctgagcaaagaacaggagtccagactcccttcgcactggctgaagtccaagggggctcataccaccatggctgatgctctttggaggctgagggacctgatgctgcgcgataccctgaacataagacaggcctacaacctcgagaacgttta

SEQ ID NO: 235371 - DNA, 4749 bp, synthetic construct
  misc_feature 1..4749: note = Description of Artificial Sequence: Synthetic coding sequence
  source 1..4749: mol_type = other DNA
atgggatccaaacggagacgagctacgtccccttcatccagcgtgagtggagatttcgatgacggccaccattcagtatccacacccggacccagccgcaaacggaggagactgagcaatctccccacagtggacccaatcgctgtgtgtcatgagctatataataccatcagggattataaggatgagcagggtagactgctgtgcgagttgttcatccgggcaccaaagaggagaaatcagcccgactactatgaagtggtgagtcaacctattgatctcatgaagattcagcagaaactaaagatggaggagtatgatgatgtgaatctgctcacagcagatttccaacttttattcaacaatgctaaatcttattataaaccagacagccccgaatacaaagctgcctgcaaactgtgggacctttacttacgcacccgtaatgaatttgtacagaagggggaggcagacgacgaagacgatgatgaagacggacaagacaaccaaggcaccgtaactgaaggctcgagtccagcctatttgaaggaaatacttgagcagctccttgaggccatcgttgtcgccaccaatcctagtggacgtttaatttctgagctattccagaaactcccatccaaggtccagtatccagattactacgcaattatcaaggaacctattgaccttaaaacaattgcacagagaattcagaacggttcctataaatccatccacgccatggcaaaagacatcgacctgctggcaaagaacgccaaaacatacaacgagcccggaagtcaggtgttcaaagacgcaaattctatcaaaaagatcttttacatgaagaaagcagaaatagagcatcacgaaatggcgaagagtagccttcgcatgcgcaccccaagcaaccttgccgcagcgagactaacgggcccatcccattcaaaaggatccctgggagaggaaagaaaccctaccagtaaatattaccgaaataagcgagccgttcaaggaggcaggctctctgccataaccatggcgctgcagtatgggtctgaaagtgaagaggatgcagccctggctgccgcacggtatgaggagggcgagagtgaggccgaaagcattacttccttcatggatgtctctaaccctttctatcagctctacgatacagtgcgatcatgccggaataaccaggggcagctgattgccgagccattctatcacctgcccagcaagaaaaaataccctgactattatcaacaaattaagatgccaatatctctgcaacagattcggactaagctgaaaaatcaggaatacgagaccctggaccatttggagtgcgatttaaacctcatgtttgagaatgctaaaaggtataacgtcccaaatagcgcgatttataagagagtccttaagctccagcaggtgatgcaggctaagaagaaggagctggcccgacgtgacgacatcgaggacggagactctatgatatcaagtgccacctcagacaccggcagcgccaagcgcaagagcaaaaagaacattcgtaaacaaaggatgaaaatcttgtttaacgtggttctggaagcgcgtgagcctggatcagggaggcggttgtgtgatctgttcatggttaaacctagcaaaaaggactacccagactattacaagataattctggaacccatggacctcaagattatagaacacaacatcagaaacgacaagtacgcaggcgaagaaggcatgattgaagatatgaaattgatgtttcgcaacgccagacactataatgaagaaggatcacaggtgtataatgacgcgcacatactcgagaaactgctgaaagagaaacgcaaagagttagggccattgccagatgatgacgacatggctagcccaaagctgaaactcagcagaaaaagtggcatatctccgaagaaatctaaatacatgacccctatgcaacagaagctgaatgaggtgtacgaggccgtcaagaactataccgataagcgcggacgtcgattgtccgcgatctttctccggcttcccagcaggagtgaactgcccgactactacctcacaataaagaagccgatggacatggagaaaatccgttctcacatgatggctaacaagtaccaggacatcgacagcatggtcgaagatttcgtgatgatgttcaacaatgcgtgcacctataacgaaccggagagcctgatatacaaagacgctctggtgctgcataaagtgcttctggaaacccgacgcgatttggaaggcgatgaggattctcatgtgccaaacgtgaccctgctgatacaggaactcattcataatctctttgtttctgtgatgtcccaccaggatgacgaagggaggtgttattccgactcccttgccgagattcctgctgtcgaccccaacttcccaaataagccacccctgaccttcgatattatcaggaaaaatgtggaaaacaacaggtatcgacgcctggacctgttccaggagcacatgtttgaggtactggaacgggcacgacggatgaaccgaacagacagcgagatctacgaggacgcggtggagctgcaacaattttttatcaagattcgagatgagctctgcaagaacggggagatactgctgtccccagcactgagttatacaaccaaacacctccataacgacgtggaaaaggagaggaaggagaagttgcccaaggaaattgaggaggacaagcttaaacgcgaagaggaaaaaagagaagccgagaagtcggaggatagttcaggcgcagcaggcctgtctgggcttcacaggacatattcccaggattgtagttttaagaattcaatgtaccatgttggcgactacgtttacgtagagcccgcagaagccaatctgcagcctcacattgtgtgtatcgagcggctgtgggaagacagtgcggaaaaggaagttttcaagagcgattactacaacaaggtccctgtatcaaaaattctgggcaagtgcgtggttatgttcgtgaaggagtactttaaactgtgtccagagaactttagagatgaagacgtctttgtctgtgaatcccggtactcagcaaagactaaaagttttaaaaagatcaaactttggactatgcccattagcagtgttaggtttgtgcctcgcgacgtgcccctgcccgtcgtgcgtgtggctagcgtctttgcaaatgccgataagggggacgacgaaaagaacaccgacaacagcgaggactctcgcgcagaagacaactttaacctggagaaggagaaagaggatgtccctgtagaaatgagcaatggagagcctggatgtcattattttgagcagttgcactataacgatatgtggttaaaggttggggactgcgtgtttattaaatcacacggcctggtgaggccacgggtgggacgaatcgagaaggtgtgggtccgtgacggagctgcatatttttacggcccaatatttatccacccggaggagaccgagcatgagccaaccaaaatgttttacaagaaagaggtcttcttaagtaacttagaggaaacgtgccctatgacctgcatcctgggcaagtgcgccgtgctctccttcaaggactttttgagttgtcgcccaacagaaatccctgaaaacgacatcctgttgtgcgaatcaagatacaatgagtcagacaagcaaatgaaaaaatttaaggggctgaaaagatttagtctttcggcaaaagttgtggacgacgagatctactattttcgaaagccaattgtgccccagaaggaaccctccccacttttggagaagaagattcagctgcttgaggctaagttcgctgagttggaggggggagatgatgacatcgaagaaatgggtgaggaggacagcgaatctacccctaaaagtgccaagggtagcgctaaaaaggaaggatccaagaggaagatcaacatgtccggctacattctcttcagttccgaaatgcgggcagtcataaaagcacagcatcctgattactcttttggagagctgagccggctagtcgggacagaatggcgaaatcttgagacagccaaaaaagctgaatacgaaggcatgatgggcggttatccccctggtctgcccccactgcagggacctgttgatggccttgtgagcatggggagcatgcaaccacttcaccccggaggtccaccccctcaccatctacctcccggagtgccaggtctgcctggtatccctccgccaggagtaatgaaccagggcgtggccccaatggttggcaccccggctccgggtggttcaccctatggacagcaagttggcgtgttgggccctcccggtcagcaggcccctcctccttatcctggaccccatccggctggacccccagtgatccagcagccgacaacccccatgttcgtcgcccctcccccaaaaacgcaacggctgctccactctgaggcatacctgaagtacattgagggtttgagcgcggaatccaattcaatcagtaaatgggatcaaaccctagccgctagacggagagacgtgcacctatcgaaggagcaagagtctcggctcccttcccactggctgaagagcaagggcgcacacacaactatggccgacgcactgtggagactgagggatctcatgttgcgcgacacattaaatatcagacaggcgtacaacctcgagaacgtgtag

SEQ ID NO: 235372 - DNA, 4905 bp, synthetic construct
  misc_feature 1..4905: note = Description of Artificial Sequence: Synthetic coding sequence
  source 1..4905: mol_type = other DNA
atgggcagcaagcggcgacgcgcaacgtcgccaagttcttccgtgtcaggagatttcgatgacggtcatcactcagtatctaccccagggccaagccggaaacggcgaaggttgtcaaatttgcctaccgtcgaccctatcgccgtttgccacgaactgtacaacactattcgggactataaggacgaacaggggagactcctctgtgaactgttcattagggcccctaagcgcagaaatcagcctgactattatgaggtcgttagtcagcctatcgacttgatgaagattcaacagaagctgaagatggaggagtacgatgacgtcaacctgctgacagctgacttccagctcctcttcaataacgccaaatcttattataaacctgactcgcccgaatataaggccgcttgtaaattatgggacctttatctgcgcactagaaacgaattcgttcaaaaaggtgaagcagacgatgaagatgacgacgaggacgggcaagataatcagggcacggtcaccgaggggagctcaccggcttaccttaaggagatccttgagcaactcctagaggcgatcgttgttgccacaaatccttcaggtcgtttgatctccgaactgtttcagaagttgcctagtaaagtacagtatcctgactactacgctataattaaggaacctatcgacttgaagacgattgcccagcggattcaaaacggctcatataaatctatccatgccatggctaaggacattgatcttctggctaaaaatgccaaaacatataacgagccaggaagtcaagtgttcaaagatgccaactctatcaaaaagatcttctacatgaagaaagcagagattgaacaccacgagatggcaaagtcttctctcagaatgcgcaccccctcaaacctagctgcagccagactgacagggccatcacattctaagggctccctcggagaagaacgtaatcctaccagcaaatactatcgcaataagcgcgctgtgcaaggcggtagactgtccgccatcaccatggccttacagtatggatctgaaagcgaggaggatgctgcactcgcagcagcaagatacgaagaaggagaatctgaggctgagagcatcacttccttcatggacgtgtccaatcctttctatcagttgtatgacaccgtcaggagttgtcggaataatcaggggcaactgatagctgagccgttctatcatttgccctcaaagaaaaagtaccctgactactatcagcagattaagatgcccatttctttacagcagattagaaccaagctcaagaaccaggagtacgaaactctggatcatctcgagtgtgacttaaatctgatgttcgagaacgccaaaaggtacaacgtgcccaactcagcaatatataagcgcgtgctgaagctgcagcaagtaatgcaagcaaaaaagaaggaactggcccgtagagacgacatcgaggacggggacagcatgatttcatccgctacctctgacaccggaagcgccaagaggaagtcaaagaagaacattaggaagcagcgaatgaaaatacttttcaacgtcgtgctggaggccagagaaccaggatccgggcgacgcctgtgcgaccttttcatggtcaagccttctaagaaagactatccggactactataagattatccttgagccaatggacctgaaaatcatcgaacataacatccgcaatgacaaatacgctggtgaggagggcatgatcgaggacatgaaactcatgtttcggaacgctaggcactataacgaagagggcagccaggtgtacaacgacgcgcacattctggagaaactgcttaaggagaaacgcaaagagctgggaccgctccctgacgacgatgacatggccagcccgaaacttaaactgtcccgaaagagtggaattagcccaaagaaatccaagtacatgacccctatgcagcaaaaactgaatgaagtatatgaagcagtgaaaaattataccgacaagcggggtagaaggctgtccgcaatttttctaagactgcccagtagaagcgagctgccagactactacttaaccatcaagaagcctatggacatggagaagatcagaagtcatatgatggcaaacaagtatcaggacattgactcgatggtggaggatttcgtcatgatgttcaacaacgcgtgtacctataacgaaccggaatctctgatctacaaggatgcactcgttctgcacaaagtgctgctggaaacccggagggatcttgagggcgacgaggactcccatgtgcctaacgttaccctgctgatccaggagctgatccacaatctttttgtaagcgttatgagtcaccaagacgatgagggaagatgctacagcgatagcttagcggagatacccgctgtggacccgaatttccccaacaagccacccctgacgttcgacataatccggaaaaacgtagagaataataggtataggaggctggatctgtttcaggaacacatgttcgaggtcctggagcgggctaggcggatgaaccgcacagacagtgagatctacgaagatgctgtcgaactgcagcagtttttcatcaagataagagacgaactgtgcaagaacggtgagatcctgctatcacctgctctgtcttacactacaaagcacctacacaatgacgttgaaaaagaacgcaaggaaaagctgccaaaggaaatcgaggaggataagctgaagcgggaggaagagaaacgagaagccgagaagtccgaagatagctcaggtgccgcaggcctctccgggctgcatcgcacgtactcccaggattgctcttttaagaattctatgtatcacgtgggggactatgtctatgtggaaccagccgaggcaaaccttcaaccgcacatcgtttgcattgagcggttgtgggaggatagtgctggcgaaaagtggctgtacggttgctggttttaccgtcccaatgagaccttccatttggccacgaggaaatttctcgagaaggaggtgttcaaatcagactattacaataaagttcctgtttctaaaattctgggtaaatgcgtagttatgtttgtgaaggagtactttaaattatgtccggaaaatttcagagacgaagatgtatttgtttgtgagtctagatactctgccaaaaccaagtcattcaaaaagatcaaactgtggacaatgcccatcagctcagtccggttcgtaccccgtgacgtcccactgcctgtcgttcgcgtcgctagcgtgtttgctaacgcagacaagggcgatgacgaaaaaaacactgataactcggaagatagcagggccgaggacaatttcaaccttgaaaaggagaaagaggatgtccctgttgagatgtcgaatggagaaccaggatgccactatttcgagcagttacactacaatgacatgtggctgaaagtgggagactgtgtgtttattaaaagccacggcctcgtaagacctcgagtggggaggatcgagaaagtctgggtgagagatggcgctgcttatttctacggcccaatttttattcaccccgaggaaactgagcacgagcctacaaagatgttctacaaaaaagaagtctttctctccaatctggaagagacctgtcccatgacctgcattcttggcaaatgcgccgtcctgtcatttaaggattttctgagttgccgtccaacagaaattcccgaaaatgacatcctgctgtgcgagtcaagatacaatgagtcagacaaacagatgaagaaatttaaaggtcttaagagattttctctgagcgccaaggtcgtcgatgatgagatctactattttaggaagcccatcgttccccaaaaagagccctccccgctgctcgaaaagaaaatccagctgctggaggcgaagtttgcagaactggagggaggggacgacgacatcgaggaaatgggcgaggaggactctgaggtcattgagccccctagtctgccacaactgcagactccactggcctcagaactcgacctgatgccttacactcctccacagagcaccccaaagagtgctaaaggatctgcaaagaaagaagggtcgaaaagaaaaattaacatgtctggatacatcctctttagttctgagatgcgtgccgtgatcaaggctcagcatccagattactccttcggtgagttgtcccgtttggtgggaacagaatggagaaatctcgagaccgccaagaaagctgagtatgaaggtatgatgggtggctatcctcctggtctgccccctcttcagggccctgtggatggcctcgtatctatggggagtatgcagcccctccatccaggaggtccccctccacatcacctgccaccaggcgtcccagggctacccggtatcccacctcctggggtcatgaaccagggcgtcgctccgatggtggggaccccagcccctgggggaagtccgtacggtcaacaggtgggagtcctgggtcccccagggcaacaggcgcctcccccataccccggacctcaccctgcaggaccgccagtcatccaacaaccgaccacccccatgttcgtcgccccacctcccaagacacagcgcctcctccacagcgaggcttatctgaagtacattgagggcttatcggccgaatccaactcaatcagcaagtgggaccagaccctcgctgccagaaggagggacgtccacctgagcaaagagcaagagtcccgactgccaagccactggctgaagagcaagggggctcatacgacaatggctgatgccctgtggcgcttacgggatctgatgttgcgggacacactcaacattaggcaggcgtataacctggaaaacgtgtag

SEQ ID NO: 235373 - DNA, 459 bp, synthetic construct
  misc_feature 1..459: note = Description of Artificial Sequence: Synthetic coding sequence
  source 1..459: mol_type = other DNA
atgggatccaaacggcgaagggcaacctcgccatctagcagcgtgtccggcgactttgacgatggccatcacagcgtgtctacccctggaccttctcggaaacgtcgcaggctgagcaacttacccactgtggaccctatcgccgtgtgccacgaactatataatacaattcgcgactacaaggatgagcaaggacgtctcctatgcgagctttttattcgagctcctaaaaggcgcaaccaacctgattactatgaggtggtctcacaacccattgatctcatgaagatccaacagaaattgaagatggaggaatacgacgatgtcaacctgttaaccgctgatttccagctgctgtttaacaacgcaaagtcatactataagccagacagtcccgaatacaaggctgcctgcaagctatgggacctatatctcagaactcgcaatgagtttgtctag

SEQ ID NO: 235374 - DNA, 81 bp, synthetic construct
  misc_feature 1..81: note = Description of Artificial Sequence: Synthetic coding sequence
  source 1..81: mol_type = other DNA
atggggagcaaacgcaggcgggctacatccccaagtagcagcgtctccggcgattttgacgacgggcatcattcagtgtag

SEQ ID NO: 235375 - DNA, 693 bp, synthetic construct
  misc_feature 1..693: note = Description of Artificial Sequence: Synthetic coding sequence
  source 1..693: mol_type = other DNA
atgggctccaaaagacgaagggctacaagcccgtcttcaagcgtctccggcgacttcgacgatgggcaccatagcgtgagcacacccggtcctagccgcaagcgcagacgcttatcaaacctgcctaccgtggacccgattgctgtgtgccatgagctatacaacaccattcgggactacaaagacgagcagggcaggttactatgcgagctgtttattcgcgctcccaagcggaggaaccagcctgattattacgaggtagtctcccagccaattgatctcatgaagatccaacagaagctgaaaatggaggagtacgacgacgttaatctgcttaccgctgattttcagctgttattcaacaatgcaaagtcttactataagcccgactcaccggaatataaggctgcctgtaagctgtgggatctttaccttcggacaagaaatgaattcgtgcagaagggggaggcggacgacgaggatgatgatgaggatggacaggacaatcagggtactgtcaccgagggctccagccctgcttaccttaaggagattctggaacagctgctcgaggctatcgtggttgccaccaacccatcaggacgactcatatcagaacttttccagaaactcccgtcaaaggtccagtatccagactattacgccattattaaggagcccatcgacctgtag

SEQ ID NO: 235376 - DNA, 132 bp, synthetic construct
  misc_feature 1..132: note = Description of Artificial Sequence: Synthetic coding sequence
  source 1..132: mol_type = other DNA
atgggatcaaagaggcgaagggcgaccagccctagtagcagtgtcagcggcgattttgacgacgggcaccatagcgtgtcaacgcctgggccttcacgaaagcggagaagactgtccaatcttccgacatag

SEQ ID NO: 235377 - DNA, 357 bp, synthetic construct
  misc_feature 1..357: note = Description of Artificial Sequence: Synthetic coding sequence
  source 1..357: mol_type = other DNA
atgggtagcaagcggagacgagcaacctccccaagctcttcagtatcgggggactttgacgatggtcaccatagcgtttctaccccgggaccctctcgcaagaggaggaggctgtctaatctgccaaccgtagaccctatagccgtgtgccatgaactttacaatacaattcgggactacaaagatgagcagggtcgtcttctctgcgaacttttcattagggccccaaagcgacgtaatcagccagactattatgaggtcgtcagtcagccaattgatcttatgaagatccagcagaaactgaaaatggaagagtacgatgacgtgaatcttctgaccgccgactttcagctatag

SEQ ID NO: 235378 - DNA, 264 bp, synthetic construct
  misc_feature 1..264: note = Description of Artificial Sequence: Synthetic coding sequence
  source 1..264: mol_type = other DNA
atgggttccaaacgtagaagagctacgagtcctagcagctcagtctcaggagattttgatgacgggcaccattccgtgtcaacgcctgggccaagcaggaagcggcgacgactctctaacttgccaactgtcgatcctatcgctgtttgccacgagttgtataataccataagagattacaaggatgaacaggggaggctgctgtgtgaactgtttatcagagcccctaagcgccgtaaccagccagattactacgaggtatag

SEQ ID NO: 235379 - DNA, 132 bp, synthetic construct
  misc_feature 1..132: note = Description of Artificial Sequence: Synthetic coding sequence
  source 1..132: mol_type = other DNA
atgggcagtaagaggcggagagcaactagcccttcttcctcagtctccggtgacttcgatgacggccatcactcagtctctactcctggtcctagtcgcaaacggagaagattgagcaatttacccacatag

SEQ ID NO: 235380 - DNA, 828 bp, synthetic construct
  misc_feature 1..828: note = Description of Artificial Sequence: Synthetic coding sequence
  source 1..828: mol_type = other DNA
atggagggcgtcgctgtagttacagccggatcggtgggtgccgctaagactgagggcgctgctgccctgccgcctccccctcctgtttcaccaccggctctcacaccagccccagccgcaggggaagaggggccagcaccactttccgagaccggagctcccggatgctcgggttcgcggccaccagaacttgagcctgaaaggtcccttgggagatttcggggaaggttcgaggatgaagatgaggaactggaggaagaagaggaactggaggaggaagaagaagaggaggaagaggacatgtcgcacttctcactgaggttggaaggcggacggcaggactccgaagatgaagaagagcggctgatcaacctgagtgaactgacaccatacattctgtgttcaatctgtaaaggctacctcattgacgcaacaaccataacagaatgcctccacaccttttgcaagtcctgtatcgttaggcatttctattactccaatcgctgtcccaagtgtaacatagtggtgcaccagacacagcccctgtataacatctccgccaacgaaggaacgggacatttcaagcctttggaaaagaaattcgttcgtgtctctggagaagcgactatagggcatgtcgagaagttcctccggagaaaaatgggactggaccctgcatgccaggtcgacatcatctgcggcgatcacctgctggagcagtatcagacgctccgagagatccggagggcgatcggggacgctgctatgcaggacggactgctggtattgcactacggtttggtggtctcgcccctgaagattacgtag

SEQ ID NO: 235381 - DNA, 1053 bp, synthetic construct
  misc_feature 1..1053: note = Description of Artificial Sequence: Synthetic coding sequence
  source 1..1053: mol_type = other DNA
atggaaggtgtggctgtggtgacggccggaagcgtcggggctgctaagaccgagggggcagcagccctcccacctcctccacctgtgagtcccccagctctcacacctgcgcctgccgcaggagaggagggcccagctcctctttctgaaactggcgctcccggatgtagtggcagtcgtccgcctgaattagaacccgaaagatctttaggcagattcagaggccgttttgaggacgaagacgaggagttggaagaagaggaagagctagaggaggaggaagaggaagaggaggaggatatgagccacttctccctaaggctggagggaggtcgacaggacagtgaagacgaggaggagaggctgattaatctgtctgaactaactccatatatcctctgttcaatctgcaaaggctatctcatcgatgccaccactataacagagtgtcttcacacgttttgtaaatcctgcattgtacgacatttctactacagcaaccgctgtcctaaatgtaacatcgtggtgcaccagacgcaaccgctgtacaatatccggctggataggcagctgcaggacatagtctacaaattggtcattaacctggaggagcgcgagaaaaagcagatgcatgatttctacaaggagaggggtctcgaggtcccaaaacctgctgtcccacagcccgtaccgagctccaagggtcgaagtaagaaggttctggagagcgtgttccggattcctcctgagttggacatgagccttttactcgaatttattggggcaaatgagggtacagggcacttcaaacctctggagaaaaaattcgtgcgcgtgagcggcgaggccactattggccacgttgagaaatttctgcgcaggaagatgggactggatcctgcttgccaggtggacatcatatgtggtgatcacctcctagaacaataccagactctgcgagaaataaggagggcaatcggcgacgccgctatgcaggacggtctcctggtacttcactacggcctcgttgtgagtccattgaagatcacttag

SEQ ID NO: 235382 - DNA, 10191 bp, synthetic construct
  misc_feature 1..10191: note = Description of Artificial Sequence: Synthetic coding sequence
  source 1..10191: mol_type = other DNA
atgaccgcatggttgatttctcttatgagcatcgaggtgctcctacttgccgttaggcacctctccctgcatattgagccggaggaaggaagtctcgccggaggaacctggattacagtgatctttgacggcctggaacttggcgtgttatacccaaacaatggctctcagttagagattcacctggtgaatgtcaatatggtggtaccggctctgcgatcggtcccgtgtgatgtctttcctgtttttctcgacctccccgtagtcacctgccggacccggtccgtgctcagtgaagcccacgaaggactgtattttttagaagcctattttgggggacagttggtcagtagccctaatccagggccaagagattcatgtaccttcaaattcagcaaggcccagacaccaatcgtgcaccaagtgtatccgccaagcggggtaccaggaaagctgatccacgtgtatgggtggattatcactggtaggctcgaaacattcgatttcgatgctgagtacatcgattctccagtcattctggaggcccaaggcgacaaatgggtaacgccatgctcactcatcaatcgccagatgggtagctgttatccaattcaagaagatcacggactgggtaccttgcagtgtcatgtggaaggtgactatattggatctcaaaacgtatctttctccgtcttcaataagggcaagtccatggttcacaaaaaggcctggctgattagtgctaaacaggatctcttcctttaccaaacccattccgaaattctgtctgtttttcccgaaacaggctctctgggaggaaggaccaatattactatcactggcgatttctttgataacagcgcacaagtgacaatagcgggtattccatgcgatatccgccatgtttctccacggaaaattgagtgcaccaccagagctcccggtaaggacgtgaggctgacgactcctcagcctggcaatcgcggtctgctgttcgaggtgggcgatgccgtagagggactggaacttactgaagctaccccgggatatcgctggcagatcgtgccgaatgctagtagcccttttgggttctggtcgcaggaaggccagccattccgcgctcggctgtccggcttctttgtggcacctgaaactaataactacaccttttggattcaagccgattcccaggcctctctacacttttcatggagcgaagaaccccgtaccaaggtcaaggtcgcgtctatttctgttggtactgctgactggttcgattcatgggagcagaaccgcgacgagggcacctggcagcaaaaaacaccgaaacttgaactgctgggcggtgctatgtactacttggaagccgaacatcacggtattgcccctagccggggaatgcggatcggtgtccagattcacaacacgtggctgaaccctgacgtagtgaccacttatctcagggagaaacaccagattcgcgtccgcgcacagcggctcccggaagtgcaggtgttaaatgtcagcgggagaggcaacttctttttgacatgggacaatgtctctagccagcctatccctgccaatgccaccgcccaccttatccagactaccatcgaggagttactggctgtgaaatgcaaactagaaccactgtggtcaaacattctgctcaggctgggctttgagcgaggacccgaggtgtccaattcagacggagatttaacatctgggacggaacccttttgtggccgattttctctgcgccaaccacggcacttggtgctgacaccccctgctgcacagaagggctaccggctggatcaatatacccatctctgtttagcctacaagggccacatgaataagattctcaaaatgatagttagcttcacgataggttttcagaatatggtcaagaacacaacgtgtgattggagcctcacccgcacttcacctgagtcatggcagttcgattgtactgatctgtgggagacatgcgtccggtgttttggagacctgcagccaccacctgcaaattcacctgtgctcgttcaccagatcaatctgcttcccctggcccaggagaccggccttttttatgtggacgaaatcataatcgccgacactaacgtgacagtgtctcaggcggatagcgggacggccaggcccggtgggaacttagtggagtctgttagcgtggtgggtagtccaccggtgtacagcgtgacgtcctggttggcgggttgcggaacagagctccccctgattactgcccgatctgttccaaccgaaggcacggaagaaggctcaggtttggttcttgtgacgacacagcgtagacagaggacgtcccccccactgggaggccacttccgcattcagctgcccaacacagtgatcagtgatgtacctgtgcagatctcggcccaccatttgcaccagttacttcagaacaatgccgacgacttcaccagccggtacctgaacgctagcgatttcaccgtgaaagaggacttgtacacctgctacgagcatgtttggacactttcgtggagcactcaaataggtgacctcccgaattttatcagggtatccgacgagaatctaactggtgtgaaccctgccgcagccaccagagtggtatacgacggtggagtctttttaggaccaattttcggagatatgcttgccactgctaaccagcatacccaggtcgtggtgcgggttaatgacgttccagcacattgccctgggtcttgttccttccagtacctgcaagggagcacaccttgtgtacactccgtttggtattccatcgatggggacattaacctgatgatctatattaccggcacaggcttctcaggggactctcagtttttgcaggtcaccgtgaacaagacttcatgtaaagtgatcttcagtaaccagactaatgtggtttgtcagaccgacttactgccggttgggatgcaccgaatactgatgctggtgagaccttcaggtctggcgatctccgccacgggggaagaccttttcctaaatgtgaaaccaagactggacatggtcgagccctcccgggctgcggatattgggggtctgtgggcgactattaggggttcctctctggagggtgtttctctcatcctgttcggttcctactcttgtgccattaacgtagccacctcaaattcttcgcggattcagtgcaaggtgcctcctagaggcaaggatggtaggatagtgaacgtgaccgtgattagaggggattacagtgccgtactcccacgggcatttacctacgtttccagcttgaaccccgtgatagtgaccctcagccgcaacatttcaaatattgccggaggggagactctcgtaatcggggtggcacggctcatgaattacacggatctggacgttgaggtgcacgtacaggatgcccttgcgccagtgcacacccaaagtgcctggggcctcgaggtcgccctgcccccactgcccgcaggcttgcaccggatttccgtctctataaatggtgtaagcatccacagccagggcgtcgacctgcatattcagtatctgacagaagtgttttccatcgaaccttgttgtggctcacttttgggcggaactatcttgtccatcagcggcattgggttcagtagggaccccgctttggtttgggtcctcgtggggaaccgcagctgcgatatagtcaatctaaccgaggcaagtatttggtgcgaaactttgcccgctccgcagatcccagatgctggggctccgacagttccagccgctgtcgaggtgtgggcgggaaatcggttttttgcccgaggcccttcacccagcctggtcggcaagggattcaccttcatgtacgaggctgcagctacacctgtggtgactgctatgcaaggtgaaatcactaattcctccctgagcctgcacgttggaggctccaatttgagcaattctgtgattctgctggggaatctgaactgcgacgtcgaaacccagagctttcagggaaatgtgagcctctcagggtgtagtatccccctccattctctggaagcagggatctaccctctccaggttcgacagaaacagatgggcttcgctaacatgtccgttgtcctccagcagtttgctgttatgccacgaataatggccatctttccttcacagggaagcgcatgtgggggtacaatactcaccgtacggggtcttttactcaacagtaggaggcgatcagtccgcgtggacctttcgggacccttcacctgcgtgatactctctctcggcgatcacacaatcctttgtcaggtcagcctagaaggcgaccccctacccggtgccagcttttctctgaacgtgacggtcctagtaaacgggttgacctcagagtgccaaggaaactgcacactcttcatacgtgaggaagccagccccgttatggacgctctttccaccaacaccagcggcagtctgactacagtgttgattaggggtcaacgactagccacaacagccgacgaaccaatggtctttgtggatgatcagctcccatgcaacgtgacattcttcaacgcgtcacacgtggtatgtcagactcgggatctggctccagggcctcactatcttagcgtcttttacaccagaaatgggtatgcatgcagcggcaatgttagcaggcacttctacattatgccgcaggttttccactactttcctaagaatttcagtttgcacgggggttcactgcttactattgaaggcacaggcctccgcggacagaacaccacctcagtgtacatcgatcaacagacttgcctgacagtgaacataggagcagaactgattcgctgcattgtcccaactgggaatgggagcgttgcgctcgaaattgaagtcgatggactgtggtaccatatcggggttattgggtataataaggctttcacccccgagttaatcagcattagtcagtcggatgacatactcacttttgcggtggcccagatttccggtgcggcaaacattgacattttcatcggaatgagtccttgcgttggggtgtctggtaatcatacagtcctacagtgcgttgtgccttccctgcccgctggcgaataccacgtccgcggatacgactgcattcgagggtgggccagtagcgccctggtctttaccagtcgtgtgatcattacggctgttacggaaaattttggctgcctgggaggtcggctggtgcatgtgtttggcgcaggctttagccctggcaacgttagtgctgctgtatgtggcgctccttgccgagtgctggccaatgccactgttagtgccttttcctgcctggtcctcccactggacgtaagcttggccttcctgtgcggcttgaaacgggaagaagattcctgtgaggctgccaggcacacatatgtacagtgcgatttgacggttgctatggccacagaacagttgttagaatcttggccttacctctacatttgtgaagagtcatctcagtgtctgtttgtgcccgatcattgggcagagagcatgttcccctcgttcagcggattgttcatctcccctaaactggagcgggacgaggtgttgatatataatagctcttgtaatatcaccatggaaacagaggccgagatggagtgtgaaactcctaatcagcccataacagtgaaaatcaccgagattagaaagcgctggggacagaatacacaggggaatttttcgctacagttctgcaggcggtggagtaggacccacagttggtttcccgagagacttcctcaggacggggacaacgttacagtggaaaatggtcagttgctcctgctggataccaatacctctattctgaacctgctgcatattaagggcggtaagttgattttcatggctcctggacctatcgaattaagagctcatgccattctggtttcagatgggggagagttacggatcggcagtgaagataagccgttccaaggtagagcacagatcacattgtatggtagcagttacagtacacccttctttccctacggagtgaagtttctggctgttagaaacggaaccctctctctccacggctccctccctgaggtcatagtgacatgcctgcgggcaacagctcatgcattggacacggtgctcgctctggaggacgctgtcgactggaatcccggtgacgaagtggtcatcatcagtggaaccggcgttaagggggcaaagcccatggaggaaattgtgaccgtggaaacagtacaggatacggacctctatttgaagagtccattgcgatattctcataattttactgaaaactgggtggcaggtgaacaccatatcctcaaggcaaccgtggccttgctgtcccgcagcatcaccattcagggcaatctcactaatgaaagagagaagctcctggtaagttgccaggaggcaaacgccccagaagggaacttacaacattgcctttatagcatgtctgagaagatgctaggctccagggatatgggcgctcgtgtcattgttcagtcattccccgaagaaccaagccaggtgcagcttaaaggtgtgcaattccaggtgctggggcaggcttttcataagcatctgtcttcactaaccctggtcggagccatgcgtgagtcttttattcaggggtgcaccgttcgaaattcattcagcagagggttatccatgtgcgggaccctggggctgaaggtggatagcaacgtgttctacaatattttgggccacgctttattagttggaacttgcacagaaatgcgctatatctcttgggaggccatacatggtcgcaaggacgactggtctggccatggtaatattatcagaaacaacgtgataattcaagtgtcgggcgctgaggggctcagcaatcctgagatgctcaccccaagtgggatttacatctgttcacccacaaacgtcatcgaagggaatcgcgtgtgtggcgctgggtatgggtactttttccatctgatgacgaatcagacctcacaggctccattactctcttttacccagaatatagcccactcatgtactagatatggcctgtttgtgtaccctaaattccagcctccatgggacaatgtaacagggaccaccctgttccagtcattcaccgtctgggaaagcgcaggtggcgctcaaatctttcgcagcagcaacctccgtctcaagaactttaaggtgtactcctgccgggactttggcatagatgtgttggagtccgatgcaaatactagcgtgactgactctctgttactgggccatttcgctcataaaggtagcctgtgtatgagctctggcattaagacaccgaagcggtgggagctgatggttagtaacactaccttcgtgaacttcgatctaattaactgcgttgccatcaggacatgttctgactgctctcaggggcagggtgggtttaccgtaaagacttcacagctaaagttcacaaactcatcaaacctggtggccttcccttttcctcatgccgcaatcctcgaggacctggacgggtcattgagcggcaaaaacagatcgcacattttggcctctatggaaaccctgagtgcgagctgtttggtgaatagctctttcggacgcgtcgtgcatgggagcgcttgcgggggtggggtcttgtttcaccgaatgtccatagggcttgctaatacaccggaggttagttacgacctaacgatgacagacagtcgtaacaaaacgacaactgtgaactacgtgcgggataccctgtctaacccaagggggtggatggctctgttgttggatcaggagacctatagccttcagtcagaaaacctgtggatcaatcgaagcctccagtattccgcgaccttcgacaactttgcacctggaaactatctcttactggtccatacagacctgcctccatacccggatatcctccttaggtgcggttcacgggtggggctctcttttccgtttctgcctagtccaggccagaaccagggctgcgattggttcttcaattctcagctgagacagctcacttatctggtttccggagagggacaggtgcaggtcattcttcgcgtgaaggaggggatgccaccgacaatttccgcctcaacatcagccccagagtcagccctgaagtggtccctgcctgaaacatggcagggcgtggaagaaggctggggcggatacaataacaccatccccggaccgggagacgacgtgcttatcctgccgaaccgaacggtgcttgtggacacagacctcccatttttcaaaggtctatacgtgatgggaacactggactttccggttgacaggagcaatgtcctgtctgtagcttgtatggtgattgcgggaggggagctgaaagtgggcacactcgaaaatccactcgagaaggagcagaagctactcattctcttgagagcctcagaaggcgttttttgtgataggatgaatgggatacatattgatccagggacgataggggtctacggtaaggtccacctatacagcgcttatcccaaaaactcgtggacccaccttggggctgatatcgcttctggaaatgagcgtattatcgtggaagacgctgtagattggcgccctcacgataaaatcgtgttgtctagcagcagttacgaaccccatgaggcggaggtgttaaccgtcaaggaagttaagggccaccatgtcaggatatatgagcgcctgaaacatcgtcacatcggtagcgtgcatgtgacagaagacggacggcacatccggctggcagctgaggtgggacttctgacaagaaacatccagatccaaccagacgtctcttgtcgaggcaggttatttgtgggcagctttaggaagagttctagggaggagttctctggcgtgctgcagctcttgaatgtagagattcagaactttggatcgcccctgtatagttctgtcgaattttctaacgttagcgcgggtagctggatcatttcgagtacgctgcaccagtcttgtggcggaggcattcatgcagccgcatcacatggcgtgctgctcaacgataatatcgtgtttggtacggctggccacggcattgacttggaggggcaggcttataccgtgactaataatttagtggtcctgatgactcagccagcatggtcaactatctgggtggcagggataaaggtgaatcaggtgaaagacatcaacctgcacggaaacgttgtagctggcagtgaacgccttggttttcatatcagaggtcacaagtgctcatcatgtgagctgctgtggagtgacaacgttgcccactcgtctctccatggactccacttgtacaaggagtccggcctggacaattgtacaaggatttctggtttcttggcttttaaaaacttcgactatggagcaatgctgcatgtggagaactctgtagagattgaaaacatcactctggtagataatactataggattgctagcagtcgtatacgtattctccgccccacagaactctgtaaaaaaagtgcaaatcgtactgcggaattccgttattgtcgccacatcttccagtttcgactgtatccaggacaaggtcaaaccccattctgccaacctgacttcaacagaccgggcaccttcaaatccacgcggtggcaggattggaattttgtggcctgtgtttacaagtgagcccaatcagtggccacaggaaccttggcacaaagtgcgaaacgaccactcaatctcgggtataatgaaacttcaagatgtgactttttctagctttgtgaagtcctgctactctgatgacctggatgtgtgtatactgccaaacgcggaaaactcaggaattatgcatcccataaccgctgagaggacccgaatgctgaaaatcaaggacaagaacaaattctactttccctccctacaaccacgcaaggatctgggcaaggtagtgtgtcctgaactggattgtgctagtcccaggaaatacctctttaaagacctggacgggagagccttaggattgcctcccccagtgtcagtgttcccaaaaaccgaggccgagtggaccgcgagcttttttaacgctgttacgacagaacaggcacttaagatctctgagtag

SEQ ID NO: 235383 - DNA, 12225 bp, synthetic construct
  misc_feature 1..12225: note = Description of Artificial Sequence: Synthetic coding sequence
  source 1..12225: mol_type = other DNA
atgactgcctggctcataagcctcatgagcatcgaggtcctactgttagcagttcggcatctcagccttcatattgaacctgaagagggatccctcgcaggcggaacatggatcacagtaatttttgacggattggagttgggagtgctgtatcctaacaacgggtctcagcttgagatccacttggtgaacgtaaatatggtggtgccagccctccggtcagtgccttgcgatgtatttcccgtgtttctggatcttcctgtcgttacttgtcggacacgctcggtattgagcgaggcccacgagggcctgtacttccttgaggcgtactttgggggtcagctcgtctccagccccaacccgggtcctagggatagctgtacattcaagttctccaaggctcagaccccaattgtccaccaggtttaccctccctctggtgtgccagggaaattaattcatgtctatgggtggatcatcactggacgtctggagacatttgatttcgatgccgaatacatagatagccctgttattctcgaagcccaaggcgacaagtgggtgacaccttgctcattaattaataggcagatgggctcctgctatcccattcaggaagatcacggccttggcacactgcagtgtcatgtggagggcgactacattgggtcacagaacgttagcttcagcgttttcaacaagggaaaaagcatggtgcataagaaggcctggcttataagcgctaagcaggacctgttcctataccagacacactcagagatcctttccgtgtttccagaaacaggctctctaggcggtcgcacaaatattaccatcactggggacttcttcgacaacagtgctcaagtcacaatagcgggaattccttgtgacatccgtcacgtttctccacgaaaaatagaatgtaccacccgggcacccggtaaggacgttcgcctgaccaccccccagcctgggaatagaggtctcctctttgaggtgggggacgccgttgaaggcctggaactgacagaggccacaccgggttataggtggcaaattgttcctaatgcctcatcaccttttggcttctggtcgcaggaaggacaaccattcagagctaggttgagtggcttcttcgttgcccctgagacaaataactacacattttggattcaggcggactcccaggctagccttcatttttcttggagcgaggagccgaggaccaaagtgaaagttgctagtatctccgtggggacagccgattggttcgatagttgggagcaaaaccgagatgagggcacatggcagcagaaaacaccaaagctcgaactgctggggggtgcgatgtactacttggaagccgaacatcacggaattgctccatccagaggaatgcgaataggagtgcaaatacacaatacatggcttaatcctgatgtggtaaccacctatcttcgggaaaagcaccagattcgtgtgcgcgcacagagactgccggaggtgcaggtgttgaacgtgtccggccgtgggaacttcttcctgacttgggataacgtctcttcacaaccaatcccggctaacgcgactgcccacctgatccagacaacaatcgaggagcttttggctgtcaagtgcaagcttgagcccctgtggagcaacattctgctgcgtctaggctttgaaagaggccctgaggtttccaattccgatggcgatctgacgtccggcacagaacctttctgtggtcgcttctctttgcgacagccgagacacctcgtcctgactccacctgccgctcagaagggctacaggctggaccagtatacccacttgtgcttggcttacaaagggcatatgaataagatattgaagatgatcgtgagctttactatcgggtttcaaaacatggtgaagaacactacatgcgactggagccttactcggacgtcacctgaatcatggcagtttgattgtactgacctgtgggaaacttgcgtccgctgttttggcgatctgcagccgccaccagccaacagcccggtcttggttcatcaaatcaatctgttacctctggcccaggaaacgggcctgttctacgtagatgaaatcatcattgctgacaccaacgtaaccgtgagtcaagctgactccggaacagctcggccagggggtaaccttgttgaaagcgttagcgtagtcggcagtccacccgtttactccgtgaccagctggcttgccggttgtgggactgagctgccactaattaccgcgcgatcggtccctaccgaaggcaccgaagaaggaagcggcctagtgttagtcaccacacagaggcggcagagaacaagtcccccattggggggtcatttccgaatacagttgcccaacactgttatcagtgatgtccctgtccagatcagtgctcaccatcttcaccaactgctgcagaacaatgctgacgattttaccagtcgatatctgaacgcttccgacttcaccgtgaaagaggacctgtacacctgttacgaacatgtttggaccttgtcttggagtacccagattggcgatttaccgaactttatccgggtgagcgacgaaaacctcacaggcgtcaacccagcggcagccacccgcgtggtgtatgacggcggagtcttccttggcccaattttcggggatatgcttgccaccgccaaccagcacacccaggtagttgtgcgcgtgaatgacgtgcccgcacattgtcccggtagctgtagcttccaatacctgcagggctctaccccatgcgtacattccgtgtggtactcaattgatggtgacatcaacctgatgatttatatcaccggtacgggattctctggtgactctcagtttctgcaagttaccgtgaataaaacctcctgcaaggtcattttttccaaccagactaatgtcgtttgtcagacagatttgctacccgtggggatgcatcgtatcctgatgctcgtcaggccatccggcttggctatctccgctacaggcgaggatttattcctcaacgtgaaacccagattggacatggtggaacctagtcgcgctgcagacattggcggactctgggccacgatcagaggaagttccctggaaggagtttccctgattctttttgggtcctacagctgtgctatcaacgttgcaactagcaactccagcagaatccagtgcaaggtcccgcctagagggaaagatgggaggatcgtgaatgtgaccgtgatcagaggggactacagtgccgtgcttcctcgtgcatttacctatgtgtcttcactgaaccctgtgatcgttaccctcagtcggaatatatccaatatagcagggggagagacactggtaataggtgttgctaggcttatgaattacaccgatttggacgttgaagtacatgtgcaggacgcactcgctcctgtgcacactcagagtgcatgggggctggaagtggcccttccgcctctgccggctgggctgcatcggatttccgtatctataaacggggtgagcatccattcccaaggcgtcgatctgcatatacaatatttaaccgaagtcttttccatcgagccatgctgtggttcacttctaggcggtacgattctgtcaatcagcgggattggattcagtcgcgacccggcactggtgtgggtgctcgtcgggaatcggtcctgtgatatcgtgaacctgaccgaagcctcaatatggtgtgaaaccttgccagccccacagatccccgacgcaggcgcacccacagtgccagctgcagtggaagtctgggccggaaaccgctttttcgcgcgaggcccttctccttcactcgtgggtaagggttttaccttcatgtatgaagcagcagcaacacctgttgtgaccgctatgcagggagagatcacaaactcgtccctatctctgcacgtggggggttcaaatttaagcaattctgtaatcctactggggaaccttaactgcgatgtggagactcagtcttttcaaggaaatgttagcctgagtgggtgcagtatccctcttcacagtttggaggcagggatttacccacttcaggtgcggcagaagcagatgggcttcgcaaacatgtcagtagtgctgcagcagttcgccgtgatgccccgaataatggccatctttcccagccaggggagtgcctgcgggggaaccattctcactgtaagggggcttctcctgaactcccgaagaaggtcagtccgggtagatctgagcggcccttttacatgtgttatccttagcttgggcgaccacactatcctttgccaggtgagcctggaaggagaccccttgccaggcgcttctttctcgctgaacgttactgtcctggtcaatggccttaccagtgagtgtcaaggaaactgcacgttatttatcagagaggaggctagtcccgtgatggacgctctgtctaccaatacctctggctcattgactactgttctaatcagggggcagagactggccacaactgcagatgagcccatggtgttcgttgacgatcagctgccttgcaacgtcactttttttaatgcatctcatgtagtgtgtcagactcgtgacttagcccctggtcctcattacctgagtgtgttttatactcggaacgggtacgcttgcagtgggaacgtaagcagacatttctacatcatgccccaggtattccattactttcctaagaattttagtttgcatggagggtccctgctgaccattgaaggtactggcctgaggggacaaaacactacatccgtttatattgaccaacagacttgcctgaccgtcaatatcggcgcagagttaatacgatgcatcgttccaacaggcaacggcagtgtcgctctcgagattgaggtggacggcttatggtatcatatcggagtgatcggctataataaggcgtttacaccggagcttatcagtatctcccaatccgacgacattctgaccttcgcagtagcacagatcagtggcgctgccaatattgacattttcatcgggatgtccccctgtgtgggcgtgtctggcaaccacacagtgctacagtgcgtggtgcctagccttcccgctggagagtatcatgtacgagggtatgattgtatccgcggttgggccagctccgcccttgtattcaccagtcgcgtgattattaccgctgtcactgagaattttggctgcttgggcggtagactagtgcacgtgttcggcgcaggattctctccaggtaacgtaagtgctgcagtgtgcggagccccttgccgagtgttggcaaacgctaccgtctccgccttctcctgcctggttttaccacttgacgtgagtctcgctttcctgtgcgggctgaagagggaggaggactcctgtgaagctgccagacacacttatgtgcagtgtgaccttacggtggccatggccaccgaacagctgctcgagtcctggccatacctctacatctgtgaggagtccagtcaatgtctgttcgtacctgaccattgggccgaaagcatgttcccaagcttcagtggccttttcatcagccccaagttggaaagagacgaagttctgatctacaactcttcttgcaacatcacgatggagaccgaagccgaaatggaatgcgaaactcccaatcaacctattacagtgaagattaccgagataaggaaaagatggggacagaacacccaaggcaacttcagcctgcagttctgcagacgatggtctcgaacccactcatggttccccgagagactgcctcaagatggcgacaacgtgacggttgagaatgggcagcttctcctccttgataccaacacctctattttaaatttgcttcatatcaaagggggtaagctcatatttatggcccctggtcccatcgagctgcgcgcacacgcaattctggtgtctgacggtggggaacttcggatcgggtcggaggacaagcccttccagggtcgtgctcagatcacactttacgggtcctcatacagtaccccattcttcccctacggggtcaagtttctcgcagttcggaatggcaccctgagtctccatgggtccctgcctgaggtcatcgtcacatgtctgcgggcaacagcccacgcgttagatacagtcctcgcactggaagacgcggtagactggaacccgggagacgaggttgtgatcatatcgggcaccggggtgaagggcgctaaacccatggaggagatagtaaccgttgaaactgtccaggacactgatctatatctcaaatcccctctgcgctattcccataacttcactgaaaactgggtggctggggagcaccacatactgaaggcaacggtggccctcttgagccggtccattaccattcagggtaatctgactaatgagagagaaaagctgctcgtttcctgtcaggaagccaacgccccagagggtaacttacagcactgtctgtacagcatgtcggaaaaaatgcttggcagccgggacatgggagcaagagtcatcgttcagtctttccccgaggagccctcgcaggtgcagctcaagggcgtacagttccaggtgcttggccaagccttccataaacacctgagctctcttacactggtgggggcaatgcgcgagagctttatacagggctgtacagtgcgcaattccttctcgagaggcttgagcatgtgtggcactcttgggctcaaagttgactcaaacgtcttctacaatattctgggtcatgcactgcttgtgggcacctgtacagaaatgagatacatatcatgggaggcaatacacggcaggaaggacgactggagtggacacgggaatatcatccgaaacaacgtgattatccaggtgtctggcgctgaggggttgagtaaccctgagatgcttactccatcagggatctacatctgtagccctactaacgtcatcgaaggcaacagagtgtgtggagctggatatggatacttctttcaccttatgactaaccaaacaagtcaggccccactcttgagcttcactcagaatattgctcactcttgcaccagatatgggttgtttgtttatcccaagtttcagccaccgtgggacaatgtgaccggcactaccctcttccagtccttcaccgtctgggagagtgccggtggtgcacagattttccggagcagcaatcttagactcaaaaatttcaaagtatactcttgccgcgacttcggcattgacgtgctggaatcggacgctaacacatctgttactgattctctgctattgggacatttcgcacacaaggggagtctttgcatgtccagtggtatcaaaactcccaagagatgggagctgatggtatctaatactacatttgtgaactttgacctcattaattgtgtcgctatcaggacatgctctgattgctcccaaggacagggcggtttcacagtgaaaacctcccagctgaaatttactaatagcagcaacctggtggcattcccttttcctcatgcagccattctcgaggacctcgatggatccttatcgggaaagaacaggtcacacatcttagcctcaatggaaactctttctgcctcatgtcttgtgaactccagctttgggcgagttgtacacggaagcgcctgtggagggggtgtgctgttccacaggatgtctatcggccttgccaataccccagaggtcagctacgatttgacgatgaccgacagcaggaataagaccacaactgtgaattatgtcagagacacactgagtaatccgcgaggttggatggctctgctactcgaccaagagacctactctctgcagtccgaaaacttatggattaatagatccctgcagtattcggcgacattcgataactttgctccaggtaactacttgctcctggtacatactgaccttccaccgtatcccgatattctcctccggtgtggctctcgggtaggcctgagcttcccatttctccctagccctgggcagaatcagggctgtgattggttcttcaacagccagctcagacagcttacttaccttgtgtcaggggaagggcaagtccaggtcattctgcgagtgaaagagggcatgccccctacaatttctgcatcaacgtccgccccagaaagcgcgctcaaatggtcactgcccgagacgtggcagggagtggaagagggctgggggggttacaataatacgattcccggaccaggcgacgacgtcttaatcttgcctaacagaaccgttctagtggacacagacttgcccttcttcaaaggtttatacgttatggggacactggattttcccgtggaccgtagcaacgtcctgagtgtggcatgtatggtcatcgctggtggagaattgaaggtaggcacactggagaacccgttggaaaaagaacaaaagctcctgattctgttgcgcgcttctgaaggggtgttctgtgaccgtatgaacgggatccacatcgatccgggaacgatcggggtgtacggcaaggtgcacctgtactccgcttaccccaagaattcatggactcacctcggggcagacattgcatccggtaacgaacggatcattgtcgaggacgccgttgattggcggccacatgacaagatagtcctgagcagctcttcttacgaaccacatgaggctgaagtgctgacagtgaaggaagtgaaagggcaccacgttcgcatttatgagagactgaagcaccgccacattggaagcgtgcacgtgaccgaagacggcaggcacatccgcctggccgctgaagtggggctgcttactcgcaatattcagattcaacctgacgtctcctgtcgcggtaggttattcgtggggtcatttcgtaaatcaagtcgagaggaattttcgggtgtgctccaactgcttaatgtcgagattcagaatttcggctccccactttactcgagcgttgagtttagcaacgtgtcagccggatcctggatcatatcttcaacactacaccagtcctgcggagggggaattcacgccgctgcctcccacggggtgttgctgaacgacaacattgtctttggcactgccggacatggcattgatctggaagggcaagcttatacggttaccaacaacctggtggtgctcatgactcagcctgcttggtctaccatctgggtggccggaataaaggtcaatcaggtgaaggatattaacctccacggcaatgtggtggccggatcagagaggctgggatttcacattcggggacacaagtgctcaagctgtgaactactatggtccgacaatgttgcccatagttctctgcacggcctgcacttgtacaaggagagtgggctggataattgtacccgtatttccgggttcttggccttcaaaaattttgactacggcgctatgttgcacgtggaaaacagtgtggagatcgagaacattaccctggttgataacacaatcgggctactggctgtggtctatgtgttcagtgcaccacagaatagtgtgaaaaaagtacagatagtgctgcgcaacagcgtcattgtcgccaccagctccagctttgattgtatccaggataaggttaagccccacagcgcaaacctgacctccaccgacagggccccttcaaatccacgtggaggcagaatcgggatcctgtggcctgtctttaccagtgagcctaatcaatggccacaggagccatggcacaaagtgcgaaacgaccatagcatttcaggaatcatgaagttgcaggacgtcaccttctcttctttcgtgaagagttgttatagtgacgatttggacgtatgtatcttgccaaacgccgagaacagcggaataatgcatccgatcaccgcggagcggacccgtatgttgaagatcaaagacaaaaacaagttctactttcccagcctgcagccacgcaaagatctgggaaaggtggtgtgtccagaactggattgcgcttcgccgcgaaagtacctgtttaaggacctggatggtcgggctctcggactgcccccacctgttagcgtgtttccaaagacagaggctgaatggacagctagtttcttcaacgcagggacatttcgcgaggagcagaaatgtacttaccagttcctgatgcagggatttatttgcaagcagaccgaccaagtggtgctgatactggactctgcagatgcaatatgggccattcagaagctatatcctgtggtgtccgttacgtccggattcgtcgatgtctttagcagtgtgaacgccaacatcccttgttctactagtgggtcagtctccaccttctatagcatcctgcctattcgccagattacaaaggtatgtttcatggaccaaactcctcaggtcttgcgctttttcctgctgggaaacaagagtacctcaaaactgttgttagccgtgttttatcacgaactgcagtcaccacatgtgttcctcggagaatcctttatcccacctaccctcgtccagtcggccagcttactgctgaacgagagtatcggagccaactattttaacatcatggataatctgctctacgtggtgcttcagggggaggagcctatagaaatccgaagcggcgtgagcattcatctagccttaaccgtcatggtttcagtgctggagaagggatgggaaatcgtgattctggagcgactgacaaattttctgcagatcggacagaaccagatccgcttcatccacgagatgcctggtcacgaggaaaccttaaaagccatcgccgacagccgagctaaaaggaaacgcaactgtccgaccgtgacctgtacctctcactatagacgcgttggccagcgcaggcccctgatgatggaaatgaactcacatcgcgcatcacccccaatgaccgtggagacaatttctaaggttatcgtaattgagataggcgatagtcccactgtccgatccactggcatgatcagctccctatccagcaataaactccagaacctggcacacagggtgatcactgctcaacagacaggcgtcttggagaacgtgctgaacatgaccattggtgccctgcttgtgacgcagagcaaaggcgtcatagggtacggcaatacctcatccttcaagactggaaaccttatatatattaggccctacgccctgtcaatcctggtgcaaccttctgacggcgaagtggggaatgagctgcctgtgcagccacagttagtattcttggatgagcagaatagacgggtggaatctcttggccctccaagcgagccctggacaatttctgcctcactggaaggggcttcagacagtgtactaaaggggtgcactcaggcagaaacccaggacggatatgtgtccttctataacctggctgtccttatatcaggttccaactggcacttcatattcacagtgacgagcccccctggcgtgaattttaccgcgcgatccaagccctttgctgtattgcccgtaacccgaaaagaaaagagcaccataatcctcgctgcatccctttcatccgtcgcctcgtggcttgccctttcttgcctggtctgctgctggctgaaacggagtaaatctcggaaaaccaagcccgaggaaattccggaatcacaaaccaacaatcagaatattcacattcacatcagctcgaagcggagagagagccagggaccgaagaaagaggacaccgtggttggagaagatatgaggatgaaggtgatgctcggtaaggtgaatcaatgcccacatcagctgatgaatggagtttctcggagaaaggtgtctaggcatatcgtccgggaggaagaggctgccgtgccagcccctgggaccactgggatcacttcccacggacatatctgcgctcccggagctcccgctcagcaggtgtatctccaggagactggaaactggaaggagggtcaggaacagctgttacgataccagctggctggccaaaatcaactcctcctgctgtgccctgactttaggcaggaacgacagcagctgcccggtcagtcaagactctcaaagcagtcgggcagcctcggcttatctcaggaaaagaaggcatcatgcggagctactgaggcattctgcctccactccgtgcaccccgagaccattcaggaacaattgtaa

SEQ ID NO: 235384 - DNA, 10190 bp, synthetic construct
  misc_feature 1..10190: note = Description of Artificial Sequence: Synthetic coding sequence
  source 1..10190: mol_type = other DNA
atgactgcatggttgatttccctgatgtccatcgaggtcctgctgcttgctgtgcgccacctaagcctccacatcgaacccgaggagggctccctagcagggggaacatggataactgtgattttcgatggactggagctgggagtgctttaccctaataacgggagtcaactggaaatccaccttgtcaacgtgaatatggtggttcccgcactaaggagtgtgccctgcgatgttttcccagtgtttctcgacctccccgtggtcacgtgtcgaactcgtagcgtgctgtctgaagctcatgaaggcctctatttcctcgaagcatattttggagggcagttggtgagttcgcccaacccaggcccacgcgattcttgtacattcaaatttagcaaggctcagaccccgatcgtgcaccaggtgtatccacccagtggggtgcctggtaagttgattcacgtgtacggatggatcattacaggtagacttgagacctttgactttgatgccgagtacatcgattcccctgtaatccttgaagcccagggcgataaatgggtcactccctgttctctcattaataggcaaatgggcagctgctatccgattcaagaagaccacggcctgggcactctgcaatgtcacgttgagggagactacataggctcacagaacgtaagtttttccgtcttcaacaaggggaaaagtatggtgcataagaaggcgtggctgataagcgccaaacaagacctgttcctgtaccagacccattctgagatattgagcgtcttcccagagaccggcagcctggggggtagaactaacattacaataactggcgattttttcgataactccgctcaggttaccatcgcaggcatcccctgcgacatccgacacgtctctcccaggaaaatcgaatgtactacccgtgctcctgggaaggatgtgcgtcttaccactcctcagcctggcaacagaggtctgttatttgaggttggtgatgccgtggaaggcctggaactaactgaagcaacccccggatacagatggcagatcgtccccaatgcctcaagtccgtttggtttttggagtcaagaaggtcagccattccgcgcacgtctgagcggcttctttgtggccccagaaactaataattacacattctggatacaggcagactcacaggcttccttgcactttagctggtcggaagaacccagaaccaaggtgaaagtggctagcatctccgtgggcacagctgactggttcgatagctgggagcagaatcgggacgagggtacatggcagcagaaaacacccaagctggaattgcttgggggagcgatgtactaccttgaagcggaacaccatggaatcgcccctagtcgagggatgaggataggtgtgcagatccacaatacctggcttaacccggatgtggtgaccacttacctgagggaaaaacatcagatacgcgttcgggctcagagactgccagaggttcaggtgcttaatgtatctggacgcggaaattttttcctgacttgggataacgtgtcctcacagcccatccctgccaacgctactgcccatcttatccaaaccaccatcgaagaactattagctgtcaaatgtaagctcgagcctctgtggtcaaacatcctgcttcgactgggcttcgagagaggaccagaagtcagcaacagcgacggtgacctgacctccggtactgagccattttgcgggaggttctcactgaggcagccacggcacctggttctcacccctccagcagcacaaaaaggctataggctggaccagtatacccatctttgcctggcttataaaggtcatatgaataaaatcctcaagatgatcgtatcatttacgattggttttcaaaacatggtgaaaaacacgacctgtgactggagtttgacacgcacctccccagaatcatggcagttcgattgtactgatctgtgggaaacctgcgttaggtgctttggcgatttacaacccccacctgctaattctcccgtgctagtgcaccagatcaacctactccccctggcccaggagaccggcctgttctacgtagacgagatcatcattgctgacactaacgtgacggtatctcaggcggactccggtacagcccgaccagggggtaatctcgtggagtcagtgagcgtggtcggaagtcctcctgtatactccgtcaccagttggcttgccggatgtggaacagaattgcccctcataacagcacgtagcgtgccaaccgaaggtaccgaagagggatcgggccttgtgctcgtaactacccagcgaagacaacggacctctccgcctctgggagggcacttcaggatccagctcccgaacactgtgatcagtgacgtgcctgtccagatcagtgcccatcatttacaccagctgttacagaacaatgccgatgattttacatcgcgctatctgaatgctagcgatttcacagtgaaggaggatttgtacacctgctatgagcatgtgtggacactaagctggtctacccagattggagaccttcctaattttatccgcgtctcagacgagaacctgacgggtgtcaatcctgccgcagcaacccgagtggtttatgacggcggagtgttcctgggtccaatcttcggagacatgctcgccactgctaaccaacatacacaggtggtggtacgggttaacgatgtccctgcccattgtcccggatcgtgctcctttcagtatttgcaaggatctacaccatgtgtgcactctgtgtggtatagcattgacggagacattaatttgatgatatacattaccggcacaggtttctctggggacagtcagttcttacaagttacagtgaacaagacaagttgtaaagtgattttttctaaccaaaccaacgttgtatgtcagacggatctccttcctgtcggaatgcatcgcatactgatgctggttagaccatccggcctggccatcagcgctacaggtgaggacttgttcctgaacgtcaagccacgcttggatatggtggaaccttcccgagcagctgatatcggaggtctttgggcgacaatacgaggtagctctctagagggagtgtctctgattctatttggatcttactcttgcgctataaacgtagctacatcaaattccagtaggatccaatgtaaagtgcctcctcgcggtaaggacggtagaattgtgaacgtgaccgtgatacggggagattattcggctgtcttgccccgagcattcacctacgtgtccagcctcaacccagtgatcgtcaccctcagccgcaacatctccaacatcgccggtggggagacattagttatcggcgttgcgagactgatgaactatacagatctggacgttgaagtccatgtacaggacgcactggctcccgtgcatacccagagcgcctgggggctcgaggtggcattgcctcccctgccagcaggtctgcacaggatctccgtcagtattaacggcgtcagcatccatagtcagggagtggatttgcatatacagtacctgaccgaggttttttcaatagaaccatgctgcggctcattgctcggtggcaccatcctgagtatctccgggatcggattctctcgcgacccagccttggtttgggttttagtgggcaatcggagttgcgacattgtgaacctcaccgaagccagcatttggtgcgagaccctgccagcccctcagatcccagacgcgggagcccctacagtgccagccgcagtggaggtttgggcaggtaacaggttctttgcgcgaggcccttctccttcacttgtgggaaagggcttcactttcatgtatgaagccgcagctacccccgtggttaccgctatgcagggcgaaatcactaactctagcctgtccttgcatgttggcggttctaacctcagcaacagcgtcatcctgttgggaaacctcaactgtgacgtagagacccagtcattccaggggaatgtcagcctgagcggctgtagtatcccattgcacagcctggaggccggaatctatccacttcaggtaagacagaagcagatgggcttcgccaacatgtctgtagtgctccaacagtttgcagtgatgccgcgaattatggccattttccctagccagggttcggcatgcggcggtacaatactgacagtgcgcggactgctcctgaactctcgacggaggtcggttcgagtcgacctgtccggtccattcacatgcgttattctgagtctgggcgatcacactattctgtgtcaggtgtccctggaaggcgacccgttgcccggtgcctctttcagtctgaacgttacagttcttgtgaatggcctgacatctgaatgtcagggaaactgtacgctcttcattcgcgaggaggccagcccggtgatggatgcactttctacaaacacctccgggtccttaactaccgtacttatccggggacagagactggccactactgccgacgaaccaatggttttcgtggacgatcagctgccttgtaacgtcaccttttttaacgcttcgcatgtcgtgtgccagacaagagacctggcacctggccctcactatctcagcgtcttctatacccgcaacggatacgcctgctctgggaacgtgtctcgtcacttttatattatgccccaggtgtttcactactttccaaaaaatttttccctgcacggcggtagcctgctgaccatcgaggggacaggactccgtggacagaatacgacaagcgtttatattgatcagcagacctgcttaaccgttaatatcggagcggaactcattaggtgcatcgttccgactggcaatggaagcgtggcgctggaaattgaagtcgatggcttatggtaccatatcggcgtgatcgggtataataaggccttcacccctgaactgatcagcattagtcaatccgatgacatcctgactttcgctgttgcacaaatctctggtgccgctaacatagacatcttcatcgggatgtctccgtgtgttggcgtctccgggaaccacaccgtcttacaatgcgtagttccaagtctgccagctggggagtatcacgtgcggggatatgactgcattcggggttgggcatcatcagcactggtcttcacatccagagtcatcataacggcagtgacggagaactttgggtgcctgggtgggagactcgtgcacgtcttcggcgctggcttttcccccggaaatgtcagtgctgccgtatgcggcgctccatgtcgggttttggccaacgcgacagtgtctgcattctcctgtctcgtgctccctttagacgtgtcactggcttttctatgcggcctaaaaagggaagaagatagctgcgaggcggcacgacacacctatgtgcagtgtgaccttacagtagccatggccacagaacagctgttggaatcttggccctacctgtatatctgtgaggagtctagccagtgcctcttcgtccctgatcactgggccgaatcaatgttcccatccttttcagggttgtttatcagcccaaagctcgagcgagatgaggtgctcatctacaacagctcatgcaacatcacgatggaaaccgaggctgagatggaatgcgagacccccaaccagccaattactgtgaagataaccgagataaggaaaagatggggacagaacacacagggtaattttagcctccagttttgtcggagatggtcgaggacccatagctggttcccagagagactgcctcaggacggggataatgttaccgtggaaaatgggcaattgttgctacttgacaccaacacttcaattctgaatctgctgcacattaagggtgggaagcttatttttatggcccctggacctattgagctcagggcccacgccatccttgtgagtgacggaggagaactccggatcggcagtgaggacaaaccattccaaggacgcgctcagattacgctctatggctcatcctactctacccccttttttccatacggcgtaaaattcttagcggtgagaaatggaaccctgagtctccatggctccctgcctgaagtgatagttacttgcctgcgagccacagcgcacgccttggacaccgtcctagccctcgaggacgctgtcgattggaaccctggtgatgaggtggttattatttcaggaaccggggtgaaaggggcaaagcccatggaggagatcgtgaccgtggagaccgtccaggatacggacctctaccttaagtcccctctgcgttactcccataattttactgaaaactgggttgctggggaacaccacatactgaaggctacggttgcactgctgtccaggagtatcactatccaggggaatttaaccaacgagcgcgagaaattactagtttcttgccaagaggcgaatgcgccagaaggaaacctgcagcattgtctgtatagcatgtccgagaagatgctcggctcccgggacatgggcgcacgggtcatcgtgcagtcattccccgaggaaccctcacaagttcaactaaagggagtgcaattccaggtgctagggcaggcgtttcacaaacacctgtcaagccttacattggttggggctatgagggagagtttcattcagggttgcactgtgaggaattctttttcccgagggctcagtatgtgcggtactctgggactaaaagtagactccaatgtgttttataacatcctcggccatgcccttttggttggaacgtgtactgaaatgcgatacatcagctgggaggcaatccatggaagaaaggacgattggtccggacacggaaatatcattcgcaacaatgtaattattcaggtgtctggggctgaagggttatccaatcctgagatgttaacaccgtctggaatatatatttgctctccaactaacgttattgagggcaatagggtgtgtggtgccggttacggatatttcttccacctgatgaccaaccagacatcccaagcacctttgttgtcattcacacaaaacattgcacattcatgcacgagatacggcttgttcgtgtacccgaaattccagcctccctgggacaatgtcaccggaacaacgttgttccaaagctttaccgtgtgggagtctgccggaggcgctcagatttttcgctcgagcaacctgaggctcaaaaacttcaaggtatacagctgccgggattttggtattgatgtcttggaatcggacgcgaacactagcgtcaccgacagtcttttactggggcactttgcacacaagggcagcctctgtatgagctcgggtattaagactccaaagagatgggagctgatggtgagcaacacaactttcgtcaacttcgaccttataaactgtgtagcaattaggacctgttccgactgtagccagggccagggaggattcactgttaaaacgagtcagctgaagtttaccaactcaagtaacctcgtcgcttttccctttccccatgccgcaatcctagaggacctcgatggttcgctttctggtaagaatcgttcccacatactagctagcatggaaacgctttccgcttcttgtctagtgaactcgagctttggccgagtggtgcacggaagcgcgtgtggtgggggtgtgttgttccaccgaatgtcgatcggcttggctaacactcctgaagtatcatatgatttgaccatgactgattcaaggaataagacaaccacagtgaattacgttagggatacactgagtaatccaagaggttggatggccctattgttagaccaggagacctattccctgcaatcagagaatctctggatcaataggtcactgcagtactccgctaccttcgacaatttcgcccctggcaattatctcctgttagtacatacagatctgcccccttacccagatatcctccttcgatgtggttccagggtgggcctctcatttcctttcctgccatcccccggacagaatcaggggtgcgattggttttttaactcccagctgcgtcagctcacgtacctggtgtcaggcgaaggccaggtgcaggtcatcctcagggtaaaagagggtatgccacctaccatttctgcatccacgtccgcccctgagtcagcattaaaatggtctttgccagagacatggcaaggggtggaagagggttggggtggctacaacaatacgataccaggtccaggcgatgacgtactcatcctgcccaaccgaaccgtactcgtggacacagacctccccttcttcaaaggcttgtatgtgatgggtacacttgatttccctgtggaccgttccaacgtgctgagcgtggcctgcatggtcatcgctgggggtgagctgaaagtgggcaccttagaaaatcccctggagaaagaacagaagctcctgatccttctccgagcatctgagggagtcttctgcgacaggatgaatgggatccatattgatcccggtactattggcgtgtatgggaaagtacacctatacagtgcttaccctaaaaatagctggacccacttgggggcagacattgcctcaggaaacgaacgaatcatcgtggaggacgccgtggactggaggccacatgacaaaattgtcctctcttcctcttcctacgaaccacatgaggccgaggtgctgaccgtcaaagaggtaaaaggtcatcacgttaggatctatgagaggctgaagcatagacatatcgggagcgtgcatgtcaccgaagatggcagacatatcaggctagccgcagaggtcggcctcttaactcgaaacatccaaatccagcctgatgtgtcgtgtcggggacggctcttcgtcgggagcttcagaaagtcatccagagaagagttttccggtgtgctgcagctgctgaacgtcgaaatccagaactttggaagccctctctactcaagcgtggaattctcgaatgtatccgccggaagctggattatttcaagcactctacaccagtcctgcggcggaggaatccacgcagccgcatcacacggcgtattacttaatgataacattgtcttcgggacggcgggacatgggatagacctcgaaggacaggcttatactgtgactaataacctagtggtcctcatgacccagccagcctggtccaccatatgggtggccggtattaaagtgaaccaggtcaaggatatcaatctccacggcaatgtggtagccggtagcgagagactggggttccacattcgcggacacaagtgctcttcttgtgagctgctgtggtctgacaatgtggcccactcgtccctgcacggtctacacctgtacaaggagagcgggttggataactgcacaagaatatctggcttcctggcattcaaaaacttcgattatggggcaatgctgcatgtggaaaattcagtggaaatcgaaaacattaccctcgtggataacaccattggcctgctcgctgtcgtgtatgtgttctccgcgccacaaaattcagtgaagaaggttcaaattgttctcagaaatagtgttatagtagcgacaagcagctcttttgactgcattcaggataaagtgaagcctcattccgctaatttgacatctacagaccgggctccctccaatccgcgaggaggacggattggaatcctctggcctgtgttcacatcagagccaaaccagtggccccaggaaccatggcataaggtacgtaacgaccattcaatctctggtattatgaagctgcaggatgttaccttcagctcctttgtgaaatcgtgttattcggacgatctggacgtgtgcattttgcctaacgcggagaacagtggcatcatgcatcccattactgccgagcggacccggatgctgaaaattaaagacaagaacaagttttattttccctcgctgcagccacgcaaagacctcggcaaggtcgtgtgtcctgaactcgactgtgcatcaccaaggaaatacctgttcaaagatttggatggccgagcccttggcctccccccacccgtgtccgtctttccaaagactgaagcagaatggactgcttcgttcttcaatgctggtacgaaagagcagtcaatcgagatcaacgttta

SEQ ID NO: 235385 - DNA, 12732 bp, synthetic construct
  misc_feature 1..12732: note = Description of Artificial Sequence: Synthetic coding sequence
  source 1..12732: mol_type = other DNA
atgggacacctgtggctgcttggaatctggggcctttgtgggctattgctctgtgcggcagaccccagcaccgacgggtcccaaatcataccaaaagttaccgaaatcatcccaaagtatgggtctatcaacggagccacccggcttacgatcaggggcgaaggcttctcccaggccaaccaattcaactatggggtagacaatgcggaactgggaaactctgtccagcttatttcttctttccaatctatcacatgcgatgtggaaaaagacgcttcacactcgacgcagattacttgttacaccagagcaatgcccgaagactcctacactgtgcgggtgtcagtcgatggggtgccggtgacagaaaataatacgtgcaagggtcatattaactcttgggagtgcaccttcaatgccaaatcattccggacacccactattcggagtattactcctctgtctggtacacccggaaccctcataacaatacaaggtagaatttttaccgacgtgtacggatccaacattgctctgtccagcaatggtaaaaatgtgcgcattcttcgcgtttatattggcggaatgccgtgtgaacttttaattccacagtctgataatttatatggcctgaagttggaccatcccaatggggacatgggtagcatggtgtgcaagactaccggcacattcatcggtcaccataatgtgagctttatccttgataacgactatgggcgttcattcccgcaaaaaatggcgtacttcgtctctagcctgaacaaaattgctatgtttcagacgtatgcagaggtgactatgatttttccctcacagggaagcattaggggcggtacgacgttgacaatcagcggtcgtttttttgaccagacagacttcccggtacgagtcctggtaggaggcgagccgtgtgatatattgaatgtaacggagaattccatttgctgtaagacgcctccaaagccccatatcctgaaaacagtgtatcctggaggacggggacttaagttggaagtctggaacaattcgcgccctattcgcttggaggagattctggagtataacgagaagacccctggttatatgggcgctagctgggtggactccgcttcctacatatggctgatggaacaggacacatttgtagcacgcttttctggctttctcgtcgcgcctgactccgacgtctatagattctatattaagggagatgaccggtatgctatctattttagtcagactggcttgcctgaggataaggtgagaatcgcttaccattccgccaacgccaattcgtacttctcttccccaacccagcgttcggacgacatccacctgcagaaggggaaggaatactacatcgagatcctgctgcaggagtacagactgtccgcattcgttgatgttggcctttaccagtacagaaacgtctatacggaacagcagaccggcgacgcggtaaacgaagagcaagttatcaagtcccagtcaactatcctgcaggaagtgcaggtgatcaccttggaaaattgggagactactaacgccatcaatgaggtccagaaaattaaggtgaccagcccctgtgtagaggccaattcgtgctcactgtaccagtatcggctgatctacaacatggagaagactgtttttctcccggctgatgcctccgagtttatactgcagtccgctctcaatgatctttggagcatcaagcctgacactgtgcaggtaatcagaacccagaaccctcaatcctacgtctatatggttaccttcatcagcaccagaggcgactttgacttgttaggctacgaagtcgtcgaaggcaacaacgttaccctggacattactgagcagactaagggcaaacccaacctggaaacattcactcttaattgggacggcatagcatcaaaacccctcacactttggtcctctgaggcagaatttcagggggctgtggaggagatggtaagcacaaaatgtcccccacaaattgccaacttcgaagagggttttgtggtgaaatacttccgggattatgagaccgattttaatctggaacatatcaatcgaggccaaaaaaccgcagaaactgatgcttactgcggacgttattccctgaaaaatcccgctgtcctgtttgactctgccgatgtaaaacccaaccgacggccatatggcgacatacttctgttcccctacaaccagctatgtctggcatataagggctttctggcgaactacatcggtcttaaatttcaatatcaggacaatagcaaaatcactagaagcacagacactcagttcacttacaactttgcctatggcaacaattggacatacacttgcatcgatttgctcgacctagtgcgtacgaaatatactggcacaaatgtatcgctgcagcgaattagtcttcataaagctagtgagagccaaagcttctatgttgacgttgtctatattgggcatacttcaaccataagtacactggatgaaatgcctaaacggagactgccggcacttgccaataaaggaatctttctggagcactttcaggtgaatcaaacaaaaactaacggaccaaccatgacaaaccagtactctgtgactatgacctcctataactgttcttataacattccaatgatggcggttagctttggacagattatcacccatgagaccgaaaatgaattcgtgtaccggggaaacaactggccgggagagagtaagatccatatccagcggattcaggcagcctcccctccactctcaggatcttttgacatccaagcatatggccacatcctgaagggtctgcccgcagccgtcagcgccgcagacctccagttcgctcttcagagtctggaaggtatgggaaggatctcggtgaccagggaaggcacgtgcgccggatatgcttggaacataaagtggcggtccacctgtggaaagcaaaacctactgcaaattaatgacagtaacatcataggtgagaaagcgaacatgaccgtgacaagaatcaaggaggggggtctctttcggcagcatgtactaggtgacctgttgaggactcctagccaacagccgcaggtcgaggtgtatgtaaacggcatccccgcaaagtgctcaggggattgtggcttcacgtgggattcaaatattacccctctcgttctggccattagtccctcccagggatcctatgaggaggggacaatcctgacaattgtcggctctgggttcagcccctctagcgcagttacggttagcgtggggcctgtcggctgttccctactgtcggtcgacgagaaggaactgaagtgtcagattctgaacggttcagctggccatgctccagtagcagtgtctatggcggatgttggcctagcccagaatgtggggggagaggagttctactttgtctaccagtcgcagatttcccacatctggccagactcaggatccatcgcgggtggcacattactcacactcagcggatttggttttaacgaaaattccaaagtcttggtcgggaatgagacatgcaatgtgatagaaggcgacctgaaccgaattacttgccgaacccccaaaaagactgaaggcactgttgacattagcgtgactacaaacgggtttcaagctaccgcgcgagatgccttctcctataattgtctccagacacccatcattaccgatttcagcccgaaggtccgtacaatcctgggtgaagtgaatctgacgataaagggctacaattttggaaatgaactgacacaaaatatggctgtgtacgtcggcggaaagacatgccagatacttcactggaattttaccgacatcaggtgtctgctccctaaactgagcccagggaaacatgacatctacgtggaggtgaggaactgggggttcgccagtaccagggataagctaaacagctcaattcagtatgtcttggaagtcacgtcaatgttcccacagcggggttccctcttcgggggtacagaaatcaccattaggggtttcggtttcagcaccattcccgcagaaaatacagtcctcctcggcagcatcccatgcaacgttacatcatccagcgagaatgtgattaaatgtatcttgcactctaccgggaacatattcagaattaccaataatgggaaagatagtgtccacggcctgggctacgcttggtcaccacccgtgctcaatgtctccgtgggcgatactgtggcttggcactggcagactcatccgttcttaagagggatcgggtaccggatcttctcagttagctctcctggctcagttatttacgacggcaaggggtttacctccggcagacagaaaagtaccagcggaagctttagctaccagttcacgtccccaggcatccactattacagttctggctacgtcgacgaggcccactcgatcttcttgcagggagtgataaacgtgctgcccgctgaaacacggcatatcccattgcacttgtttgttggtcgtagcgaggcaacctacgcttatgggggaccagaaaacctgcatctgggttcttccgtggctgggtgcctcgcgactgagcccctgtgtagcctgaacaatacacgagtgaagaactctaaaagactgctgtttgaggtgagctcctgtttttccccttctatctccaacatcaccccctcaaccgggactgttaatgagctgatcacgataattgggcacgggttttccaacttgccttgggctaacaaggtgactattggctcttatccttgtgtggtagaagagagctccgaggatagcattacatgccacatcgatccacagaactccatggacgttggaatcagagaaacagttaccttgaccgtgtataacttggggactgccattaacaccttgtccaacgaatttgatcgcagattcgtgcttctgcctaacatagatctagtcctgccgaacgctggatccacaacaggcatgacatccgtgaccattaagggctccggctttgcagtcagctctgccggtgtgaaggtactcatgggacacttcccttgcaaggtgctgagtgttaattacaccgccattgagtgtgagacgtcacctgctgcccagcaattagtggacgtagacttactgatacacggggtacctgcgcaatgccagggcaattgcacgttcagctatttggagtccataaccccatatatcactggagtgtttccaaattctgttattggtagcgtcaaagtactgattgaaggcgagggcctgggaaccgttctggaggacattgccgtcttcattggcaaccagcagtttcgggcaattgaggtgaacgagaacaacatcacggctcttgttacccccctgccggtggggcatcattctgtgtcagtcgttgtcggctccaagggcctggccctgggtaacctgaccgtgagcagtcctccagtcgcatctctatcacctactagcggctccatcggaggcggaacgacccttgttataaccggcaacggcttctatcccggaaatacaactgttacgatcggcgatgaaccttgccagatcatttccatcaacccaaacgaggtctactgtagaacgcccgcaggcactacaggtatggtggacgtcaagatcttcgtgaacacaatcgcctatccaccccttctttttacatatgcgttagaagataccccatttctccgcggaatcatcccaagccgaggtccccctgggacagagattgagataaccggaagcaactttggattcgagatcttggagataagtgtcatgatcaacaacatacagtgtaatgttaccatggcgaatgacagtgttgtccagtgtattgtgggggaccacgctggtgggacttttcctgtaatgatgcaccataagaccaaagggtccgctatgagcaccgtggtgttcgagtacccactgaacatccaaaatatcaatcctagccagggtagttttggcggtggtcagactatgaccgtgactgggacaggattcaaccctcagaactcgatcatcttggtatgtggctcagagtgtgcaatagaccggctgaggtccgattacacgactttgctctgtgaaattccttccaacaatggtacaggcgctgaacaagcctgtgaggtgtctgttgttaacggcaaggatttgagccagtcaatgaccccctttacctacgctgtctccctaacacctctgattacggctgtatcaccgaagcggggaagcactgctggcggtacgcggcttaccgtcgtgggatcaggatttagcgagaatatggaggacgtgcacatcaccattgccgaggcaaagtgcgacgtggagtactccaataagacgcacataatttgcatgacagatgctcacaccctctcaggctgggcgcctgtgtgtgttcacattcggggagtggggatggccaaactggataatgctgattttctgtacgtggacgcctggtcttccaatttcagttggggaggcaagagtccccctgaagaaggaagtctggtggttattacaaaggggcaaacaattctgctagaccagagcacccctattctgaagatgctgctcatccagggcggtaccttgatctttgacgaggcagacatcgagctgcaggcagagaatatcctcattacagatggaggcgtcctccagatcggcactgagacatctccatttcaacacaaggccgtgattacgcttcatgggcacttgagaagccccgagttaccagtctacggagccaaaacactggccgtgcgcgaaggaattttggacctccatggcgtgccagtcccagtaacctggactagactcgcccatactgccaaggccggtgaacggatccttatcctgcaggaagccgtgacatggaaacccggagacaatatcgtgatcgcctcgacgggccaccgacactcacagggagaaaacgaaaagatgactatagccagtgtctcagctgacggaatcaacattacattgagcaatcccttgaactacacccacctgggcataacagttacactcccagatggtacactgtttgaagcacgtgctgaggtggggatcctcactaggaatatcctgatccggggtagtgataacgtcgaatggaataataaaatacctgcctgtcccgacgggttcgacaccggagagttcgcaacacaaacgtgcctccagggaaaattcggtgaggagattggaagtgaccaattcggtggctgcgtcatgtttcacgcaccagtccctggcgctaatatggtaacgggcagaatcgaatacgtcgaagtgttccacgccggacaagccttcaggcttggcaggtatcccattcactggcacctgctgggcgaccttcagttcaagtcatacgtcaggggatgtgctatccaccaggcttacaaccgcgctgtgaccatacataacactcatcatctcctagtagagaggaacatcatctatgacatcaaggggggagcctttttcatagaagacgggatcgagcatggaaatatcctacagtacaatctggccgtattcgtgcagcagtcaacatcactcctgaacgatgatgttacgccagctgctttctgggttacaaaccccaacaataccatacgtcacaatgccgtcgcaggcggtacgcattttggtttctggtacagaatgaacaaccatccggacggcccatcttacgataggaatatctgtcagaaaagagttcctttgggtgagttctttaacaatactgttcacagccaggggtggtttggaatgtggatttttgaggaatattttcctatgcagactggcagctgcacgtcgactgtcccggcacctgctattttcaacagcctgacaacttggaactgtcagaaaggggctgaatgggtgaatggaggagcactccagttccacaatttcgtgatggtgaacaattacgaagcaggcatagagactaaacgcattctggctccttatgtggggggttggggagagactaatggtgcggtcatcaagaacgccaaaattgtaggccacttagacgaactgggtatgggtagcgctttttgcacagccaagggtctggtgctgcccttttcagagggtttgacagtgtcatctgtgcactttatgaattttgacaggcccaactgcgtcgcgctcggcgttacctcaatctcaggtgtatgcaacgaccggtgtggcggttggagcgcaaaattcgtcgatgtgcagtactcccacacccccaataaggcaggctttcgttgggagcacgagatggtcatgattgacgtggacggatcccttaccggacacaagggccacactgtcattccacattcatcactgcttgacccatcacactgcactcaagaagccgagtggagcattggctttcccggttcagtttgtgacgcgtccgtgagcttccacagactggcatttaaccaacccagccccgtttccttgttagagaaggacgtcgtgctatctgacagcttcggtactagcattattccttttcagaagaagaggttaacccatatgagcggttggatggcactcatccctaatgcaaaccacatcaactggtacttcaagggagtcgaccatatcactaatatctcttatacttctacattttacggctttaaagaggaggactacgtcataatcagccacaacttcactcagaacccagatatgttcaatatcattgatatgagaaatggcagttctaacccattgaactggaacactagtaaaaacggcgactggcatcttgaggccaatacatctactctctattacctggtatctggccgaaatgatctgcatcagtcacaactgataagtggaaatctcgaccctgacgttaaggacgtggtaataaacttccaagcttattgctgcatactgcaagactgctttcccgtgcatccgccttcgaggaaacccatccctaagaagagacctgccacttataatttgtggtctaatgacagcttctggcagtccagtcgggagaacaattacaccgtcccacaccccggagccaatgtcattatccccgagggtacttggatagttgccgacatagatatgcccagtatggagagactgatcatttggggggtccttgaactggaagataagtacaatgtcggtgcagctgagtcatcttaccgcgaagttgtgctgaatgcgacatacatatccttgcagggtgggagactcataggtgggtgggaagataatccgtttaagggcgacctgaagattgtgctgcgtgggaaccacacaactcaagactgggccctgcccgagggccctaatcaaggtgccaaggttctaggcgtcttcggagagctggatctgcacggaatcccacactctatttacaaaacaaaactcagcgagactgcattcgctggttcgaaggtcttgtcgctgatggacgctgtagactggcaagagggggaggagatagtgatcaccacaacttcttatgactttcatcagaccgagactagatctatcgtaaaaatcctgcacgatcacaagatcctgattttgaacgatagtttgtcttacacccatttcgccgaaaaatatcacgtgccaggcacaggggagagttatactttggccgctgatgtgggaatcctttcccggaacattaagatcgtgggagaggactatcccggttggagcgaagatagcttcggcgctcgcgtgttagtaggctcattcaccgagaacatgatgaccttcaagggaaacgccagaatttctaacgtagaattctatcactcagggcaggagggcttccgagactctaccgaccctagatatgccgtgactttcctgaatctgggccagatacaggagcacggctcaagttatatacgcggatgtgcatttcaccacggtttctctccggctatcggagtgtttggaactgacggcctggacatcgatgataacatcatccattttactgtaggtgaaggtattagaatatggggcaacgcgaatcgtgtgcgcggtaatttgatcgccctgtcggtgtggcctgggacctaccagaataggaaagatttgagcagtaccctgtggcatgccgctatagagataaataggggcactaataccgtgcttcaaaacaacgtggtggcaggattcggcagggccggatacaggatcgacggtgagccttgtcccggacagttcaacccggtggagaagtggttcgacaatgaggcgcatggtgggctctatggcatttatatgaatcaggatggcctgcccggatgttctcttatccagggatttacaatatggacttgttgggattacggaatatatttccaaacaaccgaaagcgtacacatctacaatgtaactctcgtcgacaacgggatggcaattttccccatgatttatatgccggctgccattagccacaagattagttctaagaacgttcagatcaagtctagccttattgtcggatcttcacccggattcaattgctctgatgttttgaccaacgacgacccaaacatcgaacttactgccgctcaccgctcacctcgtagccctagcggcggtaggtcaggcatttgttggcctactttcgcctctgcacataatatggcgccacgaaaacctcacgctggaataatgagttacaatgcaattagcggactgctggatatcagcggctccacatttgtggggttcaagaatgtatgcagtggtgaaaccaacgtgatttttatcacaaatcctctcaacgaggatctgcagcatcccatccacgtgaagaatattaaactggtggacaccacagagcaatccaagattttcatccatcgccctgacataagcaaggtgaatccaagcgactgcgtcgacatggtgtgcgacgccaagcgaaagagtttcctgagagacatcgacggcagctttctcgggaacgctggcagcgtgatcccccaggcagagtatgaatgggacgggaactcacaggtaggcatcggtgattacagaattcctaaagctatgctgacattcctgaatggatcgaggatacctgtgactgaaaaggctcctcacaaagggatcatccgagactctacatgcaagtatctacctgaatggcagagctaccagtgctttgggatggaatatgcaatgatggttatagagagcctcgaccccgacacagaaactaggaggttgtcgcctgtggccatcatgggcaatggttacgtggaccttattaacgggccacaggatcacggatggtgtgcagggtatacttgtcagcgaagactgagtctttttcacagtattgtcgccctgaataagtcttatgaggtctacttcacaggaacttccccccagaatttacgcctgatgctgctgaacgttgaccacaacaaggccgtgctggtgggtatatttttctctacactccagcgcctcgatgtgtatgtgaacaacctcctggtctgtcccaagacgactatctggaatgcccagcaaaaacactgcgaactgaacaaccacctatacaaagaccagtttcttcccaatttagatagtacggtgctgggcgagaactatttcgatggaacttaccaaatgctatatctcctagttaaggggacaatcccagttgaaattcacacagcgacagttatttttgtttcatttcagcttagcgtggccacagaggatgacttttacacatcacacaatctggtcaaaaacttggctttgttcctaaagattcccagcgacaagatccggatttctaagatacgcggaaagtcacttaggcggaagcgctccatgggatttatcattgagattgaaatcggagatccaccgatccagtttatctcaaatggaacaacagggcaaatgcagctgagcgagttgcaagaaatcgccggttctttaggccaagccgtcattctggggaacatctcttcaatactgggttttaacatctcatcgatgagcattaccaacccccttccaagccccagcgattccggatggatcaaagtcactgcgcaaccagtcgagcgctcagctttcccggtacaccacgtcgctttcgtgagtagcttattagtgattacacagccagtcgctgcccagcctggtcagccttttccacagcagccctcggtcaaggccaccgattctgatgggaattgtgtgtccgttggaatcaccgcgcttactctcagggctatactcaaagacagtaacaacaaccaggtcaacgggttgtctgggaatacaaccattcccttcagtagctgctgggccaattatacggatctgacacccctgcgcacaggcaaaaactacaagattgaatttatacttgataacgtggtcggagttgaatcccgaactttttcactgctggctgagtcagtgagttcgagcgggagttcctcctctagtaatagcaaggcgagcaccgtcgggacgtatgcacagatcatgacagtggtcatctcttgcctggtgggtcggatgtggctgctggagatcttcatggctgcagtttctacacttaacataactctcagaagctactat

SEQ ID NO: 235386 - DNA, 6762 bp, synthetic construct
  misc_feature 1..6762: note = Description of Artificial Sequence: Synthetic coding sequence
  source 1..6762: mol_type = other DNA
atgagacctgggcctgctttactcctcctgggggtgggactatccttgtccgttggccgtctccctctccctcctgtccccaggggcgctcaggctgccgtctccggggcaccgggagggcttctgcgcggagctcccggactgggcgtgagaggcggaagggctttgctgtctctgagacctagtgccgtccgcgctggtggcgcagtcctgtctggaagaggttctctctgcttcccccatggcggaacagggaggcggtggtattgcctggacttaagggtgttactgtcagcccagcgcttaccttggccagcggctccggcactggccctggttgacctgcagttgtccgctcgcggagggcgtctgtccctaacctggtctgtcaggctgcccagatcacctggacgcctggcctgggcctttagactgcgacttctcgggcctggggctgctcgcccagcgtctcccgcagcaagagtctcacctcgatctgcagcccctggaccaaggccccaacagggtttcgtcgcaaggaccgagtgtccaacagacggtcccgcacgagtgatgctacaggcagtgaacagctccagtcacagagctgtggagagcagtgtgtcctgtcagatcaacgcatgtgttatccagcgtgtgcgcatcaatactgatcagaagggtgctcccgtccggctcagcatgcaggccgaagccaccatcaatgcttcagtgcagctggactgtccggctgccagggcaatagcacaatactggcaggtcttcagtgttcccgctgtaggccaggctcccgattggactcagcccctggacctacctcaattggagattcgaaactcgcctctttttatccatattccaaacaactccttgcaatggggggtgtacgtatttaactttaccgtttccatcaccactgggaaccccaagatgcccgaagtgaaggattctgacgccgtatatgtttggatcgtgaggagttccttgcaggcagtgatgcttggggacgctaacattacagccaactttaccgagcagctgatcctggacggatcaacatccagcgacccagacgccgactcccccctccaaggccttcagttcttctggtactgtacaacagaccctaggaattatggcggagaccgaattatcctgggctcgaaggaagtgtgtcacccagagcaggcaaacttaaagtggccatgggcttccggcccagttctgactctgctgccagaaacactgaagggagatcacgtttactttttcagaatggtgattcgcaaggattcccgcaccgccttcagcgataaacgagtgcatgtgctccaaggcccaaaggccatcgcccatattacttgcatcgagaattgcgagagaaatttcatcgtgtccgatcgattttccctgtttttgaactgcaccaactgcgccagtcgcgatttctacaaatggtctattctgtcctcaagtggcggagaaatgcttttcgactggatgggggaaaccgtcaccgggcgtaacggggcatacctctccattaaggccttcgcattccggcactttctggaggccgagtttagtatatccttgtatttggcttgctggtcaggcgtgacctctgtgttccgccacagcttcataatcaaccatgggcctcaaatcggggagtgcaaaatcaaccctgcaaagggcattgcactgattacaaaattcgttgtgcagtgcagcaatttccgcgacaaacatgtaccgctaacctacaaaatcattgttagcgaccttcactccgtcggcgagatttcctcggtgaaagaaaacaccttggggacaattttgtatttgggccctcagagcaccgtgccaccctccttcttgcctgttgggatgctggcctcccaatacgggcttaagatctatgcacaggtgtacgattccctgggggcattctcccaggtaacactgcacgccaccgctcaagcacccacagacaagaatagctctaagacagtcctgaaccagctgttatcttttacagtcgggccatcgagcctgctgagtacactgatacagaagaaagattttcttccagccggttatctgctgtatatagttgcctctgtgctgaacaacatgaagacagaacttcccctgagagacgaccgtgtgaacctcagaaagcacctcatcgatcagtcctttttgcttccagtgtccacgcttgttgaaatagggcaagtggtcatgacaataactaagctgacacagaaacctagcgagttcacgtgggacgctcagaagagagctacaatgcgagtgtggcaggccaatcaggctctgcaggaatatcagcaaaaggataaaagattcaggagcgagcagatagagatcgtatcaactgggatccttatgtcactgagtaatatccttaaaatgacttctccgcaccaggtcgtcaaggaccctttctatgtcatcgaaagtctctctgacacaatcctggcgaataaagttcctgggaataaaactacgagcatgcgaacaccgaattttaacatgtatgtgaaaaaggtggagaaatgggggattaaccagcttttcagaaacgaaaagcattgtcggaattgcttttacccaaccctcaacgtctcgagcgtcccaggattgtctgcaaatggtcctatttccaccatgttctgcgacttcaccaacgacttgtttccttggctcaatgatcaagaaaacaccagtgttgaagtgtcaggtttccgaatgactggcgtggctgacaacggatctgtcctggagattacacccgacgtggctgaagtgtatctcgtgcggaaaaaccttacattcgccgcattcaaccttacggtgggaccgaatagtgaagtcgatggtagcttaaagaagacaactggtgggttcagcttccaagtggatagcaccgtgctgagagaagttctggtgcacatcgttactgaagtgatggtgctttttaccgtgctggtctacacaggtagtcaaatcacacccactgcccttgttgcgacctttctcgtgccacatgacataccgccattcgctagccaatccgccttgttcgacccggcttgcaccgttaaaaaggccagagtcgtctgcctgccagtatcactccttcagctaattgcgcagcactctcacagcccccactgcactgtgtctatagtgcttcaagccccacgcttcgtgatgaaactcaatgataaactggtccggatctctatcttttccgttcagtgcctcgacatgtatggcatccagagtgagtggagagaaggttactgtatcctgggagaaaaaacctcatggtatgaagtccactgtatatgcaagaatgtagttcgagcgagaagacagctggggaccattggcttaaccgggatccatctacatacgcactacgtcatggctaaagtgattgttatccctaaccctgtcgatcttcggttaaacataattaaaagtcttcatcagaatcccgttactctgtttaccgtcttgtttatcattctactgtacgtgggacttgctttctgggccctgtaccgcgatgagatggaccaacatctgaggggccacgtgatcgtactccctgacaacgacccctatgacaacctttgttatctcgtcaccatattcactgggagcaggtggggctcagggacgcgggcaaatgtttttgttcagcttcgcggtacagtgtccacgagtgacgtgcattgcctgtcccatccccacttcaccaccctctataggggatccatcaatacgttcttgctgaccacaaaatcagacctcggcgacatccactctattcgggtgtggcataataatgaaggtcgctcccctagctggtatctgagcaggattaaagtggagaacttgttctctcggcatatttggctatttatctgtcagaaatggctgagtgtggatacgactttggatcgaacctttcatgtgacccatcctgacgaaaggttgactcgaaaagactttttctttatcgacgtctcgtccaatctcaggaaaaaccacatgtggttcagcatatttgccagtgttgtcgccaaaacctttaatcggctgcaaagacttagttgctgcttggccatgctactctccagcctcctgtgtaacataatgttttttaatttgaacagacaagaacagaccgagtctcgtgaaaggaagtatatgaggagcatgatgatcggtatcgagtccgtgttaattacaataccagtccagctactcatcacatttcttttcacatgctcccagcggaaaccccaggctgacttaaaagaggtctctcctcagaaacaccccttgatgtccgaggcctcggagcactgggaggaatatctccgcaagtggcatgcctacgagactgcgaaagtccaccccagagaggtcgctaagcccgctagcaagggtaaacctagactccccaaggcatcccccaaggccacatcaaagcccaaacaccgtcaccgcaaggctcaaattaagactccggagaccctgggccctaacacaaactctaataataatatcgaagatgaccaggacgtccatagcgaacagcacccatcgcagaaagacctgcagcaacttaagaaaaagccgagaatcgtgcttccatggtggtgtgtttacgtagcctggttcttggtgttcgcaacttcgtcgatctcctccttctttattgtgttctacggactaacttacggctatgataaaagtatcgaatggttgtttgccagcttctgctctttttgtcagagtgtgctactggtacagccttctaaaataatcctgctctctggcttcaggactaacaagcctaaatactgcaaaaacttaagctggagcactaagtataaatataccgaaatacgactggacggaatgcggatgcacccagaagaaatgcaacggatccacgaccagatcgtcagaattcggggtacccggatgtaccagcccctgaccgaggacgagatcagaatctttaagagaaagaagcgcattaaaaggcgcgctctcctttttttatcgtacatcttaacccacttcattttccttgccctcctgttaattctgattgtgctgcttcgtcatacagattgcttctattataatcagttcatccgcgataggttttctatggacctggccacagtgacgaagctggaggatatctaccggtggctgaactcagtgctgctaccgctgctccacaatgacttgaacccgaccttcctgcccgaatcatctagtaaaattctcggactgcctctgatgcggcaagttcgagccaaaagtagcgagaagatgtgcctgcccgctgaaaagttcgttcagaactctattcgacgagagatacactgccatccaaagtatggaatcgacccagaagacactaaaaattacagcggattctggaatgaagtggataaacaggcaattgacgagagcacaaacggtttcacgtataagcctcagggaacacagtggctgtactattcttacgggctgcttcacacttacgggagcggcggttatgcactgtacttcttccctgaacaacagagatttaattccactctgagactaaaagagctacaggaatcaaactggctggatgagaaaacttgggctgtggtgctagagttgaccaccttcaacccagatattaacttattctgttctattagcgttatcttcgaagtgtcacagctcggtgtggtcaatacctctattagcctccacagtttctcattggctgacttcgacagaaaggcgagcgctgagatctacctgtacgttgccattctaatttttttcttggcatacgtcgtggatgagggctgtattataatgcaagagcgcgcttcctacgtgaggtctgtctacaacctcttgaacttcgccctgaaatgtatcttcacggttctgatagtgctcttcctccggaagcacttcttggccaccgggatcatccgtttttacctatccaacccagaggacttcataccttttcatgccgtcagccaggttgatcacatcatgagaataattcttggctttctgctgtttcttactattctcaagaccctgaggtacagccgcttcttctatgacgttcgcctggctcaaagggcgatccaggctgccctcccaggtatttgccatatggccttcgtggtcagtgtttacttctttgtgtacatggcatttggttacctagtgttcggacaacacgaatggaactactctaatctgattcactcaacgcaaaccgtgttttcgtactgtgtgtctgcctttcagaacaccgaattttctaataacaggatactgggcgtactttttctctcgtcgttcatgctggtgatgatctgcgtcttaattaacctgttccaggccgtgatcttaagcgcttacgaggagatgaaacagcctgtctacgaagaaccttccgacgaggtagaggcaatgacatacctgtgtcgtaaacttcggacgatgttctctttcctcacctcacagtctaaagcgaaggacgaaccagagttctttatcgatatgctgtatgggcagcccgagaagaattcgcaccggtacctgggtctaaagacccggaatatcaatggtaagaagatggtctatctcgtcgtgtac

SEQ ID NO: 235387 - DNA, 12912 bp, synthetic construct
  misc_feature 1..12912: note = Description of Artificial Sequence: Synthetic coding sequence
  source 1..12912: mol_type = other DNA
atgccaccggctgcacctgcgaggctcgcccttgccctaggcctaggcttgtggttaggcgctttggccggaggccctggaaggggatgtggcccttgcgagcctccttgcctgtgcggcccagccccaggcgctgcctgtcgtgtcaactgcagtggaagaggcctgagaacactggggcctgctcttcgcattcctgccgacgctactgcactcgacgtgtcacacaacttgcttagagccctcgatgtaggattactggcgaacttgtcggctctggctgaactggatatttctaacaataaaatcagtacactggaggagggaatcttcgccaatctgtttaatctttcagaaataaacctctcaggaaatccttttgaatgcgattgcgggctggcttggctgccacgctgggctgaggagcagcaagtacgagtggtccagcccgaggccgctacctgcgccggacccggtagtttggccggacagccgcttttgggaatccccttactcgattccgggtgcggcgaggagtacgtcgcctgtctgccggacaacagttcaggcacagttgccgcagtgagcttctcggcggctcacgaagggctgctccagcccgaggcttgctctgcattttgtttcagtactggccaggggctggcggctctctccgagcagggctggtgcctgtgtggcgcagcacagccttcctccgcttctttcgcctgtctctcactgtgttcaggcccaccaccgccacctgcccctacatgtagaggacctactctcctccagcacgtgttcccagccagcccaggggctaccctggttgggcctcatggcccactggcctccgggcaactggctgcctttcacattgcagcccctctgcccgtcaccgccactcgctgggattttggcgatggatctgctgaggtggacgcggcagggcctgccgcttctcatcgctacgtgctgcctgggagatatcatgtaacggcagtgttggctctaggcgcagggtctgcgctgcttggcaccgatgtccaggtcgaggcggctccagcagcactggaactggtttgtccatccagcgttcagtccgacgagtcattagacctttccatccagaacagaggcggatctgggctagaagcagcttacagtatcgtggccctgggcgaagagcctgctagggctgtgcaccccctatgcccctccgacactgagatctttcccggaaatggccattgttaccggcttgtagtggagaaagccgcatggctccaggcccaggagcaatgtcaggcctgggccggagctgctctagctatggtggatagcccagctgtgcagcgcttccttgtttcacgtgttaccagatcattagatgtgtggattgggttctccactgtccagggggtagaggtgggccctgctccgcagggagaggcattttctctcgagagctgccagaattggctgccgggagagcctcacccagcgacggcggaacactgcgtgagactgggcccaacaggatggtgtaacaccgacttgtgctcagcaccacattcctatgtgtgcgaactgcagccagggggtcccgttcaggatgcggagaacttgctggtaggagccccaagcggagacctgcaggggccactcactcctctagcccaacaggacggactgtctgcacctcatgaacccgtggaagttatggtattccccggactcagactcagccgtgaggcatttctcacgaccgcggaatttggcacacaggagcttagacgacctgcgcagttgaggctccaagtgtatcgtttactgagtaccgcaggcacccccgagaatgggtcagagcccgagtcgcggagcccagataatcgcacacaactcgcccctgcttgcatgcctggcggacgatggtgcccaggcgcaaatatctgcttgcctctagatgccagctgccatccccaggcttgcgctaatggctgtacatcagggcctggactgccaggagccccatacgctctgtggcgggagtttctgttctcagtgcccgctgggcctccagcccaatattcagtgactcttcacggtcaggatgtactaatgcttcctggggacctggtaggactccagcacgacgctggccctggcgctctgcttcactgttcccctgccccaggccatcctggtccacgcgctccctatctgtctgcgaacgcctcatcatggctgccccacctccccgcacagcttgaagggacttgggcctgtccggcatgtgcccttcggctcctcgctgccactgaacagttgacggtgctgctcggactgcggccaaaccctggactgcgactacccggacgctatgaagtccgagccgaagtcgggaacggggtctcccgtcataacctgtcttgtagcttcgatgtggtttctccagttgctggcctacgggtcatataccccgctcctcgcgacggaagattatacgtgcccaccaatgggtccgccctggtgttgcaggtggactctggagccaacgcaacggcgacagcccgatggcctggaggctcggtctctgccagattcgagaacgtctgtcctgcccttgtcgcaacttttgtccctgggtgcccgtgggagaccaacgacacactgttcagtgttgtggccctcccgtggctaagcgagggcgagcatgtggttgacgtggtggtggagaacagcgcaagtagggctaacctgtctctcagagtcactgctgaggagccaatctgtggattgagagcgaccccctccccagaggcacgagtgcttcagggcgtgttggttaggtatagccctgttgtggaagccggatcagatatggtgttccggtggacaatcaacgacaaacaatccctgacatttcagaatgtagtgtttaatgtcatttaccagtcagctgcagttttcaagctgtctttaacagctagcaaccatgtgagtaatgtcacagtgaactacaatgtgaccgtagaacgtatgaataggatgcagggcttgcaggtgagtactgtgccagcagtcttgagtccaaatgccactctggccctgacagcgggtgtgctggtggactctgccgtggaggtcgccttcctatggacgttcggtgatggcgagcaagcccttcaccaatttcagcctccatacaacgaatctttcccagtccctgatccctccgtagctcaagtcctagtggaacacaacgtcatgcatacgtatgccgcaccgggagaatatctattgacagtgctcgccagtaacgcctttgaaaatctgacccagcaggtgcctgtctccgtccgcgcatccttgccaagtgttgccgtcggcgtaagtgatggagtactagtcgcaggccgtccagtaactttttacccacatccgctgccctctcccggaggagtgctttatacatgggacttcggtgacggctctcctgtcctgacacagagccagcctgctgctaatcatacgtatgcgtccaggggaacgtaccatgtccggttggaagtgaacaataccgtgtctggtgctgcggcacaggctgatgtacgggttttcgaggaattgagaggcctgagcgtcgacatgtccctggcagtcgaacaaggagcgcctgtggtcgttagcgccgctgtccagaccggagacaacatcacttggacattcgacatgggcgatgggactgttttatccggtccagaggcaaccgtcgagcacgtctatctccgtgcccagaactgtactgtgacagtgggcgcagcgtcccctgcgggtcatctcgcgaggtctttgcatgtgcttgtattcgttcttgaagtattgcgcgtggaacccgctgcttgcattcccacacagccggacgcaagactaaccgcttatgtcacaggaaaccccgcacattatctgtttgactggactttcggagacggttctagtaacacaaccgtgcgtgggtgccccactgtgacccacaatttcacccgctccgggaccttcccactcgctttggtcctgtctagccgagtgaaccgtgcccactattttacctcaatctgcgtggagcctgaagtgggcaatgtcactctccagcccgaaagacaattcgtgcagctgggcgacgaagcttggctggtcgcctgcgcctggccaccattcccatatagatatacctgggatttcgggacagaggaggctgctccgactcgtgcgaggggtcctgaggtcactttcatctacagggaccccggatcgtacctcgtgaccgtcaccgcatctaataacattagcgccgcaaacgatagcgccctcgtcgaggtccaggaaccggttctcgtgacctctataaaagtcaacggctcccttggtttggagctgcagcagccttatcttttttcagcagtcggcaggggtcggcctgcctcctatctctgggacctcggcgatggaggctggttggagggaccagaggtgacccatgcctataattccactggtgacttcaccgtgagggtggctggatggaatgaggtaagtaggagcgaagcctggctgaacgtcacagtaaaaagaagagttcgcggtctggtggtgaatgccagccgaactgtggtgcctctgaacgggagcgtctcattcagtacctctctcgaggccggttctgatgtgcgatattcctgggtgctgtgtgacaggtgcacacccatccccggtggaccaactatttcttacacttttcggagtgtcggtacatttaatatcatcgtgactgccgagaatgaggtgggaagcgcacaagactccatatttgtctacgtacttcagctgatagaggggcttcaggtggtgggcggtggaagatactttcccacgaaccatacggtccagcttcaggcggtcgtccgcgatggaacaaacgtgtcttattcgtggaccgcttggcgagaccggggacctgctctggctggctcaggcaagggattcagtctgaccgtgttggaggctggcacctatcatgtgcagctcagagccacaaacatgctcggcagtgcttgggccgactgtactatggactttgtggagcctgtggggtggctcatggttgctgcctcacctaatccagccgcagtgaatacatctgttacgttaagtgccgaactggcgggaggctctggtgtcgtgtacacgtggagccttgaagagggtctgtcatgggaaaccagcgagcccttcacaacacatagctttcctactccaggactacacttggtcactatgacagctggcaatccacttggaagcgctaacgccaccgtcgaggtggatgtgcaggttcccgtctccgggctttctatcagggcctcggagcctgggggaagcttcgtggctgccggttcatctgtaccattctggggtcaactcgctacggggaccaacgtctcttggtgctgggctgtgccaggcggttcaagtaagcggggtccgcatgtgacgatggtgttcccagatgcgggtaccttcagtattagactgaacgccagcaacgcagtgtcatgggttagtgctacttataatctgactgctgaagagcccattgtagggctggtgctatgggcttcttctaaggtcgttgctcctggccaactcgtccacttccagattctgcttgcagcaggatccgcggtgacattcagactccaggtgggcggtgccaaccccgaagtgctgcctgggccaaggttctcccactcattcccccgtgtgggtgatcacgtggtgtccgtccgcggaaagaatcacgtgtcctgggcccaggctcaggtgcggattgtcgtgttggaagctgtttctggtcttcaggtccctaactgctgtgagcccggaattgccacggggactgagcggaatttcacggcacgagtacaaagggggtcccgtgttgcctatgcgtggtacttctctcttcagaaagtgcaaggtgactccctagtcatcctgtcaggtagagacgtgacatataccccggtcgccgctgggctgctggagattcaagtccgcgcttttaatgcgctggggtctgagaatcgaacgctcgtgcttgaagtccaggacgcagtgcagtatgtggcactacagtccggaccctgtttcacgaatagatccgcacagttcgaagcagccactagcccatccccacggagagtcgcctatcactgggacttcggcgatgggtccccaggccaggacacggatgaacccagggccgagcacagttacctccgcccaggcgattatagggtgcaggtgaacgcttcgaacctggtgtcttttttcgtggcgcaagcgacggtgactgtgcaggttttagcttgcagagaacccgaggtggatgttgtcctccccctccaggtgttgatgagaagatcacagcggaattatcttgaggcacacgtggatctcagggattgtgtgacttaccagaccgagtaccggtgggaggtctacaggacggcttcctgccagcgccctggacgaccagccagggtcgctttgcctggggtggatgtctcaagacctagattagtcttgcccagattggcccttccggtgggccattactgcttcgtatttgttgtgtccttcggagatacaccgctaacacagtctattcaagccaacgtgactgtggctcccgaacgcctggttcctattatagaagggggtagctatagagtatggagcgatacacgcgacctggtgttagacggatccgagagctatgaccccaatcttgaggacggtgaccagaccccccttagctttcattgggcttgtgtggccagcacccagagagaggcaggtggatgcgccctgaacttcggacccagaggcagtagcacggtcactattcctcgcgagagactggcagccggtgtggagtacacattttcactcacagtgtggaaggccggaaggaaagaggaagctacaaaccagaccgttctcattcgatctggtagggtgcctatcgtgagtctggaatgcgtgtcatgtaaagctcaggccgtctatgaagtcagcagatcttcatatgtgtatcttgaaggtcggtgcctgaattgctctagtggcagcaagcgaggcaggtgggctgcaagaacattctcaaacaagacactggtccttgacgaaaccacgacatccacaggtagcgccggtatgcgcttagtgttgcgcagaggagtgttgcgtgatggtgaaggctacacgttcaccctgaccgtgctgggccgttccggcgaagaggagggctgcgcttccatcagattaagcccaaatcgcccacccctcgggggatcttgcagactttttcccctcggcgcagttcatgctctgaccacaaaagtgcactttgaatgtacgggatggcatgatgccgaagatgctggggcacctttggtctatgctctgttgcttcggaggtgtagacagggccactgcgaggagttctgtgtgtataaaggatcacttagttcatacggagcggtgcttcctccaggcttccgccctcattttgaagtggggctggccgtggtggtgcaggaccaactaggcgcagcagttgtggcactgaaccgcagcttagccatcactctcccggaacccaatgggtcagccacggggttaacggtgtggctgcatgggctcacagcgtctgttctccctggactgctgcggcaggccgacccccagcacgttattgagtactctctcgctttggtgaccgtcctcaacgagtatgagcgcgcactggacgtcgccgcagagcctaagcatgaacgccagcatagggcacagatacgcaagaatatcacagagacactggtgtctctccgggtacacaccgtggatgatatccagcaaattgccgcagctctggcacaatgcatgggtcccagcagagaattagtgtgtaggtcttgcttgaagcagactttacacaagcttgaggccatgatgttgatactgcaggccgaaactaccgctgggaccgtgacacctaccgctatcggcgactccattttgaatatcaccggtgatctaattcacttagcctcttccgatgtacgggcacctcaaccatctgagctgggcgcagagagcccgtctcgcatggtggcctcccaggcatacaacctgacctccgctctgatgcgcatcttgatgagaagcagagtgctcaacgaagaaccgctgaccctggcaggggaggaaattgttgcccagggtaagaggtccgatccgagaagcctactgtgttacggtggcgctcctggccctggctgtcattttagcatacccgaggcctttagtggggctcttgccaatctgtctgacgttgttcagctaattttcctagtggatagtaacccctttcctttcggatacataagtaattacacagtgtctactaaagtcgcttccatggccttccaaacacaggctggggctcagattcctatcgaaaggctggcttctgagagagctattacagtgaaggttcccaataacagcgactgggccgcacgcggacacagatcatctgcaaacagcgctaacagcgtcgtggtgcagccccaggcatccgtgggagccgttgtaacacttgattcatcaaatcctgctgctggcctgcacctccaattgaattacaccttgcttgacggtcattatctctcggaggaacccgaaccctacctggcagtttacctgcatagcgagccaagacccaacgagcacaattgttccgcaagcaggcgcatcaggccggagtccttgcagggcgcagatcatcggccatataccttctttataagtcccggatcccgggatcccgctggctcctatcacttaaacctgtccagtcactttagatggtctgctcttcaggtgagcgtcggactgtacacctcgctgtgtcagtatttttctgaagaggacatggtctggcgcacagagggtcttttgcccctggaagagacatcccccagacaggcagtgtgtctgactcgccatctgaccgctttcggcgctagcctgttcgtgccaccttctcatgtgcgcttcgtcttccccgagcccaccgccgacgttaactatatcgtgatgctcacctgtgctgtctgcctggttacctacatggtgatggcggcaatactgcataagctggaccagctcgacgcttcaaggggacgggctatccccttctgtggccagcgagggcgatttaagtacgagattcttgtgaaaacaggctgggggcgaggatccggtacaaccgcacacgtgggtattatgctgtacggagttgatagccgtagtggtcatcggcatttagatggggaccgcgctttccaccggaatagcctcgatatcttcaggattgctactcctcactccctgggttccgtttggaagatccgcgtctggcatgacaacaaggggctgagcccagcatggttcctgcagcacgttatcgtcagggacttacaaactgcccgaagcgcctttttcttggtgaatgactggctttctgtcgagacagaagccaacggcggactggtggaaaaggaggtgttggccgcaagtgatgccgcactcctccgcttccgccgtttgctcgtggccgaactgcagcggggattttttgataaacacatctggctctccatctgggaccgcccacccaggagccgattcacccggatacagagagccacatgctgcgtgcttctgatctgtctgtttctgggagccaacgcggtatggtacggcgctgtaggcgactctgcgtacagcacaggccatgtttcacggctatcccctctaagcgtggatactgttgccgttggcctggtgagctctgtggtggtttacccggtgtaccttgctatcctgttcctattcagaatgtcaaggtctaaagtagcagggtccccgtcgcccacgcccgcagggcaacaggtcctggacatcgacagctgtttggattcctccgttctggacagtagttttcttacattctccgggctgcatgccgaacaggccttcgttggccagatgaaatcagatttattcttggatgattctaagagccttgtgtgctggcccagtggggaaggcacactcagctggcccgacctcttgtcagatccctccatcgtgggtagcaatcttcgccagctggctaggggccaagcaggtcatggtttgggtccagaggaggacggtttttctttggcaagcccgtatagccccgctaagtctttctccgcctctgacgaagatcttatccaacaggtgctcgccgagggggtgtcaagccccgcacctacacaggatactcatatggaaaccgacctgctttcatcgttgtcctctacacccggagaaaagaccgagacgctggccctccagcggctaggcgagttaggtccccctagtcccggtttgaactgggagcagccccaggcggcaaggctatcccgcactggcttggttgaggggctacggaaacggctgttacccgcatggtgtgcttccttagcacatggcttaagtttgctgctagtggccgttgcagtagccgtgagcggctgggttggggcaagcttccctccgggagtaagcgtagcttggctgctgagctccagtgcttccttcctcgccagcttcctaggatgggagcccctgaaagtactgctggaagcactttactttagcctcgtggctaagcggctgcaccccgatgaagatgataccctggtcgaaagtccggctgtaacacctgtaagcgctcgagtgcccagagttcgacctccacatggcttcgccctttttctggctaaagaggaggctcgtaaagtgaagcggttacatgggatgctgcgatcacttctggtgtatatgttgttcctgctggtcacattgttagcctcctacggagatgctagttgtcatgggcacgcgtataggttgcaatcagccatcaaacaggaactgcattcacgagccttcctggctataactcgatctgaagaactgtggccatggatggcccacgtcctgctgccctatgtgcatgggaaccagagttcccctgagcttgggcctccccgacttcgacaggtaaggctgcaggaggctttgtatcctgacccaccagggcctagagtccacacctgtagcgctgctggaggattctccacaagtgactacgacgtggggtgggagagcccacataatggttccggcacttgggcttacagcgccccagatctgctgggcgcatggtcctggggtagttgcgctgtgtacgactccggtggatacgttcaagaactggggctcagcctcgaagaaagcagagacagactgcgtttcctccaactgcataactggctcgataatagatccagagccgtgttcctcgagctgactcgatactccccggctgtcggtcttcatgcggcagtgactctccgcctcgaatttccagccgctgggagggcactggctgccctttccgtccgccctttcgctctgcggaggctgagtgcaggcctgtccctgcctctgttgacttctgtctgtctgcttctgtttgctgttcactttgcagtggctgaggccagaacttggcaccgtgaagggcgatggcgagtgctcaggctcggtgcctgggccaggtggctactggtcgcacttaccgcggctaccgcccttgtacgtcttgcacagctcggtgctgctgaccgccaatggactcgcttcgtgcggggtcgccctcggcgatttacatcctttgaccaggttgctcaactctcttcagcggctagaggcttggcggcaagcctgctgtttcttctgttagtcaaggccgctcaacaactgcgattcgtgcggcaatggtctgtgtttggtaagacgctatgcagggctctccccgaattgctgggcgttaccctagggctggtggtgcttggcgtcgcatacgcccaactcgctatcttactcgtgtcttcctgcgtagattctctctggtcggttgcccaggctctattggtgctgtgtcccggaacaggtctgagcaccctttgtccggctgagtcatggcatcttagccctctcctttgcgtgggtctatgggcgttaagactgtggggcgcactgaggctgggcgcagtgatactgaggtggcgttatcatgctctcaggggtgagctgtaccgaccagcgtgggagccccaggattacgagatggttgagctatttctgagacgtctgcgcctatggatgggcctaagcaaagttaaagaattccggcacaaggtaaggttcgaaggaatggagcctttgccgtctaggtcctcccgcggatcaaaagtgtcaccagatgtgccacctccctctgctggcagcgatgcaagtcatccaagcacatcttcctcccagctagacggactgtcggtctctctcggcaggttaggtacccgctgcgagcctgaaccctcacgcttgcaggccgtgtttgaggccctcttgactcagttcgaccggctgaaccaggctacagaggatgtgtaccagttggaacagcagctccactcactccaagggagaagaagcagccgagctcctgccggtagctctcggggaccgtcaccagggttacggccagctttgccctctagactggctagggcctcccggggagttgacttagccaccgggccatcaagaaccccccttagagccaagaataaagtgcatccttctagtacctat

SEQ ID NO: 235388 - DNA, 10914 bp, synthetic construct
  misc_feature 1..10914: note = Description of Artificial Sequence: Synthetic coding sequence
  source 1..10914: mol_type = other DNA
atgcctcctgccgctccagctcgcctggctctcgccttgggtctagggctgtggttaggcgcactggccggtggcccaggacggggatgcggcccatgcgaacccccatgtctgtgtggcccagctcctggagccgcatgtagagttaactgtagtggcagggggctgcgcaccttgggccctgccttacggattcctgccgacgctaccgctctgaccgctatggcaaaagctgatggagatgtcaaaaaatacggaagcaagcgcggagccctggccctcacacacggccactccctgcttcgggacgtaagccataacctgttgagagccctcgacgtcggcctgctcgctaatttatcagcactggccgaactggacattagcaataataaaatctccaccctcgaggagggcatctttgccaacctttttaacctctcagagatcaacctgtctggaaacccttttgaatgtgactgtgggctggcatggctcccaaggtgggcggaggagcagcaagtgcgcgtggtgcagcccgaagccgcaacctgcgctggacctggctcgctggctggtcaacctctgttaggaataccactccttgacagcggttgtggtgcaaccctggtgggtccccatggccctcttgcctccgggcagcttgcagccttccacatcgcggcaccactgcccgtcaccgccaccaggtgggatttcggagatggatcggccgaagtcgacgctgcgggtcccgctgccagtcaccgttatgtgcttccaggcaggtatcacgtaaccgccgtgttggctctgggcgctgggtcagctctccttggaaccgacgtgcaagtcgaagcagcccctgctgccctggaactggtctgtcccagttccgtgcagagtgacgagtcactggacttgtccatccagaacagaggtggcagcggcctcgaagccgcatacagtatcgttgcgcttggcgaagagccagctcgggctgtgcaccctctctgcccaagcgatacggaaatatttccaggaaacggacactgctatcggctggtggtcgaaaaggctgcttggttacaggcacaagaacagtgccaggcgtgggccggtgccgcactggccatggttgacagccctgccgtacaacgatttctggtgtctcgtgttactcgaagcctggacgtctggattggcttttctaccgtacagggcgtcgaagtgggacctgctcctcaaggagaggctttttcccttgaatcctgccagaattggctccctggggagccacatccagccacggccgagcactgcgtgcggctcggtcctactggctggtgtaacacagacctctgcagcgcgcctcacagctacgtgtgcgagcttcagcccggaggacccgtgcaagatgcagaaaatttgctcgtaggagccccaagtggcgatctacagggaccccttacccctctggcccagcaggacggcctctctgcccctcacgagcctgtcgaagcaggcatggggtccgtggagctgaggcggccacccgctcaccaggtgatggtcttccccggactaaggctatctagagaggcctttttgaccaccgcggagtttggaactcaagaactgagacgacccgcacagttaaggctgcaagtttaccgcctcctttccactgctggtacgcccgagaatggctccgaacccgagtcacggagcccagataaccgcactcagctagccccagcatgtatgccaggtggaagatggtgccccggagccaacatatgcctgcccctggatgccagctgtcatcctcaggcctgcgctaacgggtgcacagagggggagcacgtcgtagacgttgtcgtggagaattccgcatctcgggctaatctcagcttacgggtgaccgccgaagaacctatctgcggtctgagagctacaccttcacccgaggctcgagtgctgcagggcgtgctggtccgctacagcccggtggttgaggctggctcagatatggtgttccgatggaccatcaatgacaaacagtctctcacctttcaaaatgtagtcttcaacgtgatctaccagtcggcagccgtgttcaagctctcccttacagccagcaaccatgtgagcaacgtcacagtgaactataatgtgacagtggagcggatgaatcgcatgcagggcctacaggtcagcaccgttcccgctgtcctaagccctaatgctactctcgccctcacagctggggtgctggtggatagtgcggttgaggtcgcttttctttggacgtttggggatggcgagcaggccctgcaccagttccagccaccctataacgaaagttttccggtcccagatccaagtgttgcccaggtacttgtcgagcacaatgtcatgcacacgtacgccgctccaggggagtatttactgacggtgctggcctcaaacgcttttgagaatctgacccagcaggtgccagtcagcgttcgggcatcattgccttcagtagctgtgggggtgtcagatggcgtcctctctcaaccagctgctaatcacacatatgcctccagggggacctatcacgtgcgactggaggtgaataatactgtgtcaggggcagcggctcaggccgacgtgcgtgttttcgaagagctccggggtctgtctgtcgatatgagccttgctgtggagcagggggcaccagtggtagtctctgcagctgtgcagacgggcgataatatcacatggacattcgacatgggagatggcacagtcctttctgggcctgaagcgacagtggaacacgtatatctccgcgcacaaaactgcactgttactgtaggcgcagcaagccccgcaggacatctggcaagatctctgcacgtgctggtctttgtgctcgaagtgttaagagtggagccagccgcttgtatacccacacagccggacgcacggctcaccgcctacgttacaggcaatcctgcccactaccttttcgattggacctttggagacggttcctcaaatactactgtgcgcggatgccccaccgtcacacacaacttcaccaggtccggcaccttcccactggcacttgtgctctcaagtagggtcaaccgagctcattacttcacctctatttgtgtcgaacctgaagtggggaatgtgacactgcagccagagaggcagttcgtacagcttggtgacgaggcgtggctcgtggcctgcgcttggccgccatttccctacaggtatacctgggactttggcaccgaggaagctgcccctactcgcgctcgtggaccagaggtcacttttatttacagggaccctggctcatatctggtgacagtcaccgccagcaacaacataagtgctgccaacgattctgctctcgttgaagtccaggaacccgtgcttgttacgtccatcaaggttaacggaagcctgggactggagcttcagcagccctatctgttctccgctgtgggcagggggaggcctgcctcttacctgtgggacctcggggatgggggatggctggaagggccagaggtgacacatgcttacaacagcaccggtgatttcaccgggcctgggccaggtcgccagaggcagcgactgctggctcatcgtgaggccggtacttaccatgttcagctaagagccacgaatatgctcggaagcgcctgggcagactgcacaatggatttcgtcgagccggtgggttggcttatggtagctgctagtccaaatccagctgcagtgaacacctccgtcacactaagtgctgagttggccggaggatctggggttgtctatacctggtccctggaagagggattaagctgggagacctccgagccttttactacccatagctttccgactcccggtctgcacctggtcacaatgacagccggaaatcctttgggcagtgctaacgccaccgtggaggtggacgtgcaggttccagtcagcgggctgagtattcgcgcaagtgaacccggtggttccttcgtcgccgctggttctagtgtgccgttctggggtcaattggctacagggactaacgtctcctggtgttgggccgtgccaggcggtagcagcaaaagaggtccacacgttacgatggtttttccagatgccggtacctttagcatccgcttgaatgcttcaaacgccgtaagctgggtctcagctacttacaatctcacggctgaagagcccatcgtaggcctggtgctctgggcaagcagcaaggtggtggctccagggcagctggtgcacttccagatcctgctggccgcaggaagcgctgtgacatttcgcctgcaggacaccgatgagccaagagccgagcactcatacctgcggccaggcgactacagggtgcaggtgaacgcatctaaccttgtcagcttcttcgtggctcaggctactgtcacagtgcaggtgttggcttgtcgcgagcctgaagtggacgtggtgctgcccctgcaggtcttaatgcggaggtctcagagaaactatctcgaagcccatgttgacttgcgtgactgcgtgacataccagaccgaatatcggtgggaggtttatcgcacggcatcttgccagcggcctggcaggccagctcgggtcgccctgccgggagtggatgtgtctcggcctcggttagtactcccgcgactggctctcccggtgggacactattgctttgtttttgtcgttagtttcggggatacgccgctgacccagtctattcaggcaaatgtgacagtggccccagagcgcctagtccctataattgaggggggtagctaccgggtgtggtcggacacacgagatctggtattggacggctcagagtcttacgaccctaatctcgaagacggcgaccaaacaccattgtcgttccactgggcttgtgttgcctccacccagagggaggccggtgggtgtgccctcaattttggacctcgcggaagcagcacggtcaccatcccacgggaacgactcgctgccggagttgagtatacctttagtttaacagtgtggaaggcgggaagaaaggaagaggctactaaccagaccgtgctaatcagatctgggagggtccccatagtgtccttagagtgcgtcagctgcaaagctcaggccgtctacgaggtatcacgatcgtcatacgtgtacctcgaaggtagatgtctgaactgcagctctgggagtaagcgcggacgctgggctgccagaactttctcaaacaagaccttagtcttggacgagactaccacaagcaccggatccgcagggatgcgcctcgtgttgcgtcggggagttctcagagatggagagggatacacattcactctgactgtcctcggcagatcaggggaagaggagggatgtgcttccatccgtctcagccctaatcgcccacccctcggcggatcttgcaggctctttcctctgggggctgttcacgctctgacaacgaaggtacatttcgagtgtacggggtggcacgatgccgaagatgccggagctcccctcgtctacgcccttcttctccgtagatgcagacagggtcattgcgaggaattctgtgtttacaaggggtccctgtccagttatggagctgtgctcccacccggattccggcctcactttgaggtcggactggcggttgtggtccaagaccagctcggtgctgctgtggtggctcttaatcggtcattagcgataacgcttccagaaccaaatggaagcgccaccggactgacagtgtggctccacgggctcactgcatctgtcttgccagggcttctccgccaggctgacccccaacatgtaatcgaatattccctcgccctagtgacagtcctgaacgagcatcgcgctcagatccgcaagaacattacagaaacattggtgtctctgcgcgtgcataccgtggatgatattcaacagattgccgctgctttagcccagtgcatgggaccctcaagagagcttgtctgtagatcttgccttaagcagaccctccacaagcttgaagccatgatgttaattctgcaggccgagacaaccgccggaactgttacccctaccgcgatcggagattccatcctgaatatcacgggtgatttgattcacctggccagtagcgacgtcagagcccctcaaccatccgaactcggagctgagtcgccgtccaggatggtggcctcacaggcctataacctcacgtccgccctcatgcgcattttgatgcgcagcagggtactgaacgaagaaccccttacactggcaggcgaagagatcgtggcccagggcaaacggagcgatcctcggagcctgctttgctacggcggagccccagggccagggtgtcatttcagcattccagaggcattcagcggtgcactggccaacctgtcagatgtggtccagctcatatttctggtggattcaaaccctttccccttcgggtacatctccaactacacagtatcaaccaaggtcgcatctatggcctttcagacacaggctggagcccagattcctatcgagcgactggcttcagaaagggccatcacggtgaaagtcccaaacaattcagactgggcagcgagaggccaccgatcgtcagcaaactccgcaaattcagttgtggtgcagccccaggctagtgtgggagccgtggtgacgctggactctagtaaccctgccgctggactacatctgcaattaaactatacgctactggacggccattatctgtcagaggaacccgaaccctatcttgcagtgtacttgcatagcgaacctcggccaaacgagcacaactgtagcgccagtagaagaattcgaccagaatccctacaaggtgctgatcataggccctacacgttttttatcagtccaggctccagggaccctgccggatcataccacctaaatctgtcgtcacatttccgctggtccgcccttcaggtgtcagtgggactgtatacttccctctgtcagtatttttctgaggaagacatggtctggcgtactgaaggactgctgcccctggaggaaacctcccccagacaggccgtctgcctgaccaggcatctaacagcattcggggcttcgctcttcgtccctccctcacacgtaagattcgtattccccgaacctaccgccgacgtgaactacatcgtgatgttgacatgcgccgtctgcttggtcacgtacatggtgatggccgcaattttacataaactcgaccaacttgacgctagtcggggtagggctataccattttgtggacagaggggacggtttaaatatgagattttagtcaagacaggatggggcaggggctcaggcacgactgctcatgtgggcataatgctgtacggcgtggattctcgaagcgggcaccggcaccttgatggcgatcgcgctttccaccggaactccctggacatcttccgaatcgctacccctcatagcctgggatccgtctggaagattagggtttggcatgacaacaaggggctcagccccgcttggtttttgcagcacgtcatcgttagagatctgcagacagcacgatcggcattcttcctggtgaatgattggctatctgttgagaccgaggccaatggaggtttagtggaaaaggaggtgctggctgcgagtgatgctgctttactgcgattccgccgactgttggtcgctgagctgcagcggggtttttttgataagcatatctggctgagcatttgggatcggcctccgaggagccggttcacccggatccaaagggcaacttgctgtgttctattaatatgtttattcctaggcgctaacgctgtgtggtatggggctgtgggggacagcgcttattccactgggcacgtgagccgattgtcccctttatcggtcgacaccgtcgcggtgggtcttgtgagctcggtcgttgtttaccccgtatatctggccatcttgtttctgtttcggatgagccgcagcaaggtggctgggagcccttcccccacgcctgctggccaacaggtactggacattgacagttgcctggacagttctgtcttggactctagctttctgaccttttcaggactgcatgctgaggccttcgttggccagatgaaaagcgacttgttcttagacgattctaaatcactggtttgctggccttctggggagggaacactctcctggccggacctgctctcagatccctccatcgtcgggtcaaatctgcggcagctggccagaggccaggctggtcatggcctgggaccggaggaggatggtttctctctggccagtccttattcacccgcaaagtcattcagtgcctcagatgaggatctgatacagcaggtgctggctgagggcgtgagttcaccagcacctactcaggatacccacatggagactgacctgctcagcagcctgagctcaacaccaggggagaaaacagagacactcgccctgcagcgtttaggagagctcgggcctccgtctcctggcctgaattgggaacagccccaggctgccaggctatcgcggaccgggctggttgaaggcttacggaagaggctccttccagcctggtgtgcatcactggcccatggtttatccctgttgttggttgccgttgctgtggcggttagcgggtgggtgggtgcctcattcccaccaggtgtgtctgttgcgtggctcctgtcctcaagcgctagttttttggcttctttccttggatgggagccactcaaggtcctgctcgaagcactttacttctccctcgtggcaaagcggttgcacccagacgaagatgacactctggtagaaagcccagcggttactcctgtcagtgcccgagtaccaagagttcgcccaccgcacggcttcgctctgttccttgccaaagaggaagcaagaaaagtgaagagactccacgggatgctccgaagcctgcttgtgtacatgctgtttcttctggtcaccctcctggcctcttacggtgatgcgagttgccacgggcacgcataccgcctccagtcggcaataaaacaggagttacactcaagagcttttctcgccataactaggagtgaggaactgtggccatggatggctcacgtactgctcccctacgtgcacggtaaccagtcaagcccagagctcggccctcccaggcttcgacaagtacggctccaggaagctctgtaccccgacccccctgggcctcgggtccacacttgttcagcagccggaggtttctcaaccagcgactatgatgtggggtgggagtcgccccacaacgggtcaggaacgtgggcttatagtgctccggaccttttaggcgcttggtcatgggggtcctgcgctgtttatgacagtgggggatatgtgcaggaactcggcttatcattagaggaatctcgtgaccgtttacgctttctgcagcttcataactggttagataaccgatcccgagctgtgttcctggagctgacccgatactctcctgccgtgggcctgcacgccgctgtgacactccgcttggaatttcctgccgcaggaagagctctggccgcattaagtgtccgtccgttcgcacttagacgcctctcggcgggtctcagcctgcccctgctgacttctgtctgtctgcttttgtttgccgtgcacttcgccgtggctgaagcaaggacttggcaccgcgagggtcgctggcgcgtgctgcgattgggcgcatgggcgcgatggttgctcgttgcattgactgctgcgacagccttggtccggctggcccagctgggagcagccgatcgtcagtggacccggtttgtgcggggtagacccaggcgctttacatcttttgaccaagtggctcagctgtcatcggcagcaaggggtctggctgcgagcctgctgtttctattgctcgtgaaagcggcacaacagctgagattcgtccggcagtggagcgtattcggtaagacgctgtgccgagccctgcccgagctgctaggcgtgactctcggccttgttgtactgggagtagcatatgcccagttggccattctactggtcagtagttgcgtcgacagcctgtggtctgtcgctcaggccttgctggtattgtgccctgggactggcctgtctactttgtgtcccgctgagtcatggcacctgagtcctctcctgtgtgtgggtctttgggccctacggttatggggggcactcaggttgggcgcagtgatccttagatggcgataccacgccctgcggggagaattgtataggcctgcctgggagccccaagattatgagatggttgaacttttcctgaggaggcttaggctttggatgggcctgtcaaaggttaaggagtttagacacaaggtaaggtttgagggcatggagcccctgccgtcacgcagtagtcggggtagcaaagtctcgccagatgtgccgcctcctagcgccggaagtgatgccagccaccccagcacaagttcatcccaactggacggattgagtgttagcctcgggaggcttggcaccagatgcgaaccggagccctccaggctgcaagcggtgtttgaggctttgttaacgcagtttgacaggctcaaccaggcgaccgaggacgtctaccagctggagcagcagctgcactcacttcaaggtagaagaagttctcgagcaccagccggatcaagccggggtccttcccccggattacggcctgcgttgccctctcggcttgctcgtgcctcaaggggcgtggatttagctactggcccaagccgtacacctcttcgagcaaagaataaggttcacccatccagcacctag

SEQ ID NO: 235389 - DNA, 3692 bp, synthetic construct
  misc_feature 1..3692: note = Description of Artificial Sequence: Synthetic coding sequence
  source 1..3692: mol_type = other DNA
atggtggctgcatcccctaatccagccgcagtgaatacatccgtcaccctgagcgccgaacttgcagggggtagcggtgtagtgtatacatggtcccttgaggaggggttgagctgggagacatcggaaccttttaccacacacagttttcccacgcctggattgcacctggtgaccatgactgctggaaacccactgggtagtgccaacgctaccgtggaagtggacgttcaggtaccggtaagcgggttgtctatcagagcgagtgaacccggtgggtcatttgttgccgctggatctagtgtgccattctgggggcagctcgccacggggaccaacgtcagttggtgctgggccgtaccaggcggttcgtccaagaggggccctcacgtgacgatggtatttcccgacgcaggtacattcagtattcggttgaatgccagcaatgccgtgtcatgggtgtctgctacctataatctcacggctgaagaacccatcgtaggactagtactttgggcgagctccaaggtggtcgcccctggacagctggtgcatttccagatactgctggctgcgggtagtgccgttacatttcgactgcaggttgggggagccaatcctgaggtgctacccggaccacgtttcagccattctttcccaagagtgggcgatcacgtggtgtctgtgcgcggaaaaaaccacgtctcctgggcccaggctcaagtgcgaatagttgtgttagaggccgtttcagggctccaagttcctaattgctgcgaaccaggaatcgcaacgggaactgagcggaactttaccgccagagtccagcgtggttcgagagttgcatatgcatggtacttttcccttcagaaggtgcaaggtgattcattagttattttatccgggcgagatgttacctacaccccagtggccgctggcctgctagaaatccaggtgagagctttcaacgcgctgggttccgaaaaccggacactggtgctcgaggtccaggatgctgtgcagtatgtggcactccagtccggcccatgctttaccaaccgcagtgctcaatttgaagcagctacatcacccagtcccagacgagttgcttaccactgggatttcggagacggttcacccggtcaggatacagatgagccacgcgctgaacattcctacctcaggcccggagactatcgagtacaggtcaacgcatccaaccttgtatcattctttgtggcacaggcaactgtgaccgtccaagtcctcgcatgtcgcgagcctgaggtggacgttgttctacctctgcaggtgcttatgaggagaagccagcgaaattatctggaggctcatgttgacctccgagattgcgtcacatatcaaacagagtaccggtgggaagtgtatcgcactgcttcctgtcagaggcccggacggccagcaagagtcgcattgcctggagtggatgtctctaggcccaggttggtcctgccgaggcttgcactgccggtaggacattactgttttgtgtttgtagtgagctttggagatacccccctcacacaatctatccaggcaaacgtcacagtggcacccgaaagactggttcctattattgagggcggaagctaccgcgtgtggagtgacacaagggacttggtgctcgacggtagtgagtcatacgacccaaatctcgaagatggcgatcagactcctcttagttttcattgggcttgtgtcgcttctacgcagcgcgaggccggaggctgcgctttgaattttggcccacgcggttcaagcacggtgactatccccagggagcgcttggcagccggtgtggagtacacgttttctctgacagtctggaaagcgggacgaaaagaagaggccacaaaccaaactgtgctcatccgtagtggcagggtccccattgtttccttggagtgtgtctcctgtaaggcccaggcagtttacgaagtatccaggagctcatatgtgtaccttgaagggagatgtctgaactgttccagcggcagcaaaagaggacgatgggccgctaggacattttcaaataagacactagtgttggatgagactaccacttctactggaagtgcaggtatgaggttggtcctgcgacgaggcgtcttgagggatggagaaggctataccttcacgctaactgttctcggtcggagcggcgaggaagaaggatgtgcttcaatccggctttcccctaacaggcccccattgggaggaagttgccggctctttcccctcggagccgtgcacgccctcaccacaaaggtgcacttcgagtgcacggggtggcacgacgcagaagatgcaggcgctcctctggtctacgccctgctgctgcgcagatgtcgacaggggcactgcgaggaattctgcgtctacaaaggctcactgtcatcctatggcgctgttttaccccctggtttccgcccacatttcgaagtgggactggccgtggtcgtgcaggaccagctcggcgcagccgtggtggccctgaatagaagcctggcaataaccctgcctgagcctaacggttccgcaacagggctaacagtgtggctgcacggacttaccgcttctgttttaccgggtctcctgaggcaggccgacccacagcacgtaattgagtactcattggccttggtgactgtgttaaacgaatatgaaagggccctcgatgtggctgctgagccaaagcacgaaagacagcatagggcgcaaattcgcaaaaacataactgaaacactcgtgtcccttagggttcacactgtggatgatattcaacaaatagctgcagcgctcgcccaatgcatgggtccctcacgtgagttggtttgccgaagctgcttgaagcagacccttcataagttagaggcgatgatgctaattctgcaggcggaaaccactgcaggaacagtgacccctactgctatcggcgattcaatcctgaacattaccggggacctgattcaccttgcgagcagtgatgttagggctccgcagccaagcgagcttggcgctgaatcacccagtcgcatggtagctagtcaggcctacaacctaaccagcgctctgatgaggatcctgatgagatctagggtgcttaatgaggaacctttgactttggcgggagaggagatcgtagcccagggaaagagatcagacccaagatctctcctttgttatggaggcgctcctggccctggctgtcacttcagtatccccgaagcgttcagtggggctttagctaacctgagcgatgtggtgcagctaattttcttagttgattctaacccttttccattcggatacatctcaaattatactgtgagtactaaggcaccccctacacctcctacccccctgtggtccagtccaagaccgccttcagtcctttggagcccatggacagcagccactctacgcccaggctgcatctgctcatcaaccattcgctgctggactgctacaacctgcctgcgtaacttaagtccaacatggcaaagtacctatacacgatcacccggacccatgagcactactgccagactagctggaggctccgcacagagccattcccgagtgttgaccacagggcctacccccagtagttttcctagaggggctgaaacccagaggggtgtgacaattta

SEQ ID NO: 235390 - DNA, 12909 bp, synthetic construct
  misc_feature 1..12909: note = Description of Artificial Sequence: Synthetic coding sequence
  source 1..12909: mol_type = other DNA
atgccacccgctgctccagctcgcttagctcttgccctgggacttggactttggctgggggcactggcgggtggccctggccgaggctgcggtccatgtgaacccccttgtctttgcggccctgcaccgggtgccgcttgcagggtgaactgtagcggcagggggctgagaactctcggtccagcactgcggatacccgctgatgcgacggcattggacgtttctcacaatctgctccgcgctctggacgtcggtctgttggctaacctgtccgctctggctgagctcgacatcagcaacaataaaatttccactttggaggagggaatatttgccaatctcttcaatctttctgagatcaatctatctggaaaccccttcgaatgcgattgtggcctcgcttggctgcccagatgggctgaggagcaacaggtgagggtggtccagcctgaggccgcaacttgcgcgggtcccggatcactggccggacagccactgcttggcatcccactgcttgattccggctgtggagaggaatatgtggcatgcctacccgataatagctcaggtacagtcgccgctgtctccttcagcgccgcacatgaggggcttctgcaacccgaggcttgttccgcgttttgcttttctaccggccagggcctggctgctctcagcgaacagggttggtgcctttgtggagccgcacagccctccagtgcaagcttcgcctgtctctctctatgtagcggcccacctcctcccccagcaccaacctgccgcggaccaacattactgcagcacgtgtttcccgcttctcctggcgctacattagtcggtcctcatgggccattagcttccggacaactggccgcatttcatatcgcagctcccctgccggtcaccgcaaccaggtgggactttggtgacggaagtgctgaagtagacgccgcaggccctgccgcttctcaccgttatgtgcttcccggaagatatcatgtgaccgctgtgctggctctgggagccggtagtgcactcctgggaaccgatgtccaggtggaggcagctccagccgctctggagctcgtatgcccttcctccgtgcagtcagacgaatctctggacttaagtatccagaacagaggaggcagcggactggaggctgcatacagcatcgtagctctgggagaggagccggcacgagcagtgcaccctctgtgcccatcagatacagaaattttccccggtaatggtcactgttaccgtttagttgtcgagaaggccgcatggctgcaggctcaggagcagtgtcaggcttgggcaggagctgcccttgccatggtagactcaccagccgtgcagcgattcctggttagtcgggtgacccggtctttggatgtttggatcggtttttcaacggttcaaggggttgaagtgggacctgcccctcagggcgaggcttttagcctggagtcatgtcagaactggcttcccggtgagcctcaccctgccacggccgaacattgtgtgaggctgggcccaacgggatggtgtaatactgacttgtgcagtgcccctcactcatatgtatgcgagcttcagccagggggtccagtgcaagacgcagagaatctgctggtgggtgccccatccggtgacttgcagggcccattgacgcctcttgctcagcaggatgggctcagcgctccacacgagcctgttgaagtgatggtgttccccggtctgaggctaagtcgtgaggcctttctgactaccgccgagttcgggacccaggaactcagaagaccggcacaactgcggctccaggtgtaccggctgctgtccacagccggtacccctgaaaatggatcggaacccgaatcacggtccccggacaatcgaacccagctcgcacccgcttgtatgcccggtggtcggtggtgtcctggtgcaaacatttgcctgccgctggatgcctcctgtcacccccaagcttgtgcaaacggatgcacctccggtccagggctgcccggagcaccatatgcactctggcgcgaatttcttttttcagtgcctgccggaccaccagcccaatatagcgtcaccctgcatggtcaggatgtgctgatgctgcctggggacttagttgggttacagcacgatgctggcccaggagccctccttcattgttctcccgcacctggccaccctggacctcgcgcaccctatctgtccgctaatgcctcctcctggcttccacaccttcccgctcagctggagggtacctgggcatgccctgcatgtgctctccggttactggccgctaccgaacagctcacagtactgctgggcctcagacctaatcccggactacggctgcctggtcgctacgaagtgagagctgaagtcggtaatggggtaagtcgccataacctctcttgttcttttgacgtggtcagccctgtcgcaggcctgcgcgtaatatatcctgcccctcgggatgggagactgtacgtgcccacaaatggaagtgcccttgtccttcaggtggactccggcgctaatgctaccgctactgcgaggtggcctggcggttccgtgagcgccagatttgaaaacgtgtgtccggctctggtcgccactttcgtccctggctgcccttgggaaaccaatgacacactgtttagtgtggtggccctgccatggctaagtgagggagaacatgtggtagacgtggtcgtcgagaactctgcctcgagagccaacctttccctgcgcgtaacagctgaggagcccatatgcgggttacgagccacaccatcccctgaggcccgagtactccagggagtcctcgttaggtactccccggtggtagaggcgggttccgacatggtgttcaggtggaccatcaacgacaaacagtctttgacctttcagaacgtggtcttcaatgtgatttatcagagcgccgctgtgtttaagctttcactaaccgccagcaaccacgtatctaatgtgactgtgaattacaatgtgacagtggaaagaatgaatcgcatgcagggactgcaagtctctaccgtgcctgcagtcctatctccgaatgctacactggctcttactgctggtgtgctggttgattctgctgtcgaggtagcatttctgtggacattcggtgacggggagcaggctctgcaccagtttcagccaccatacaatgagtcttttccggtgcctgatccgtccgtggctcaggttctagtggagcacaatgtgatgcatacatatgcagcgccaggtgagtatctgttaaccgtgctggccagcaatgcgttcgaaaacctgacccagcaggtgccagtttctgtccgagcctcattgccaagcgtcgccgttggggtatcagatggggtgcttgtggcagggagacctgtcactttttaccctcacccactcccctctcctggcggagtgctgtacacttgggatttcggagatggttccccggttttaacccagagccagcctgctgcaaaccatacttatgcaagccggggaacctatcatgtgagactggaggtgaacaacacagtgagtggggctgctgctcaggctgacgtgcgggttttcgaagagctgcggggattatccgtggacatgtcacttgccgtggaacagggcgcaccagtcgtagtctcagcggctgtgcaaactggagataatatcacttggactttcgacatgggggatggaaccgtgcttagcggcccagaagccacagttgagcacgtttacctgagggcgcagaactgtactgtgacagtgggtgctgccagtcccgctggccaccttgctcgtagcttacacgtcctcgtctttgtcctcgaggtcttgcgtgtggagcccgctgcttgcatcccaacccaacccgatgctcgcctcaccgcctacgtgaccgggaaccccgctcattatctgttcgactggaccttcggggatgggagctcgaacaccaccgtgcgaggctgcccgacggtgacccacaactttacacgaagtggcacatttccactggcccttgttctctcctcacgagtcaaccgggcacactactttaccagtatttgtgtagaacccgaagtggggaatgtgaccctgcagccagagcgtcagtttgtgcaattgggggacgaggcctggctcgtggcctgcgcctggcctccttttccctatcgctacacgtgggacttcggtaccgaagaggctgcacctactagagctcgtggacccgaggtaacctttatttatcgggacccaggttcgtacctggtgaccgtgacggcatccaataatattagtgcggcaaacgactccgctttagtggaggtgcaggagcctgtgctggtgacatccattaaggtcaacggctccctcggactagagctccaacagccatatcttttcagtgccgtcggtcgcggacgaccagcctcatatctttgggacctgggagatggcggatggcttgaagggcctgaagtgacccatgcctataattccacaggagattttacagttagagtggccggttggaatgaagtatctaggtcggaggcctggctcaatgtgacagtgaaaagaagggttcgtggtctggtggtgaatgctagtcggactgtcgtgccgctgaacgggagcgtgtcattctctacttcccttgaagcgggtagcgacgtgcgctacagctgggttctctgtgatcgatgcacccccatacctggaggcccaacaatctcctacacttttaggtccgtgggtacattcaatataattgtaacggccgaaaacgaagtgggcagcgcacaggactcgatctttgtttacgtgctgcaactcattgaaggactgcaagtggttggtggcggaaggtacttccccacaaatcacactgtgcagctgcaagcagttgtccgggacgggaccaacgtgtcttacagctggacagcttggcgggacagaggacctgcattggctggatctgggaaagggttcagtcttacagtactggaagccggtacataccatgtgcagctcagggccacaaatatgttgggctccgcatgggctgattgcaccatggatttcgtggaaccggtaggctggctgatggtggcggcttccccgaatcccgctgccgttaacacatctgtgactcttagtgccgaactggccggtggatccggagtggtgtatacatggtccctggaggagggcttaagctgggaaacaagcgaaccatttacgacccactcctttccaacacccggtctgcacttggtcactatgacggcaggaaaccccctaggctccgcaaacgccacagtggaggtagatgtgcaggttccagtctcaggactgagcatccgggctagcgagcctgggggaagttttgtcgccgctggctcctccgttccgttctggggccagctcgccaccggaactaacgtcagttggtgctgggccgtcccaggcggatctagtaagaggggccctcatgttacgatggtatttccagatgctggtactttctccattcgattaaatgcaagcaacgccgtgtcctgggtgagcgccacctacaaccttacggccgaggaacctattgtaggtctagtgctatgggcctctagcaaggttgttgccccagggcagctggtgcatttccagattctgttggctgctggctcagccgttacgttccgtctgcaggtagggggagccaatcctgaggtcctccctggccctagattttcgcatagtttcccgcgtgtgggagaccatgtggtgagcgtgcggggaaagaaccacgtatcgtgggcccaagctcaggttaggatcgtggtgttggaggccgtgtctggactgcaggtgccaaactgttgcgagcccggaattgccactggaacagagcgtaactttactgcgagggtgcagcgcggatctagagtagcctatgcctggtatttcagtttacaaaaagtgcagggtgacagcctcgtaatcttatccggccgtgatgttacctacacacccgttgccgctggtttgctggagattcaggtgcgcgctttcaatgccctgggaagtgagaataggaccttggtgctggaagtgcaggatgccgttcaatacgtcgccttacagtccggcccatgtttcactaatagaagtgcacagttcgaggccgctacctctccctccccgagaagagtagcctatcattgggacttcggcgacggctcaccaggccaagatactgatgagcccagagccgagcattcctacctccgacctggagactatagagtgcaggttaacgcctcaaatcttgtgagtttcttcgtagcccaggctacagttactgtgcaggttctcgcctgcagagagcctgaggtggatgtagttctcccattgcaggtgcttatgaggaggtcacagaggaactatttagaggcacacgttgacctcagagattgcgtcacataccaaacagagtatagatgggaagtttacagaactgcttcatgccaacgccctggtcggcctgctagagtagcccttccgggtgtcgacgtctctaggcctagactggtgctccccagactggctctccccgttggccattattgcttcgtcttcgtcgtgtcattcggggacactcctcttacccagagcatacaggctaacgttacagtggcaccagaacgcttagtgccaataattgaaggaggcagctatcgggtctggagtgacaccagggacctggttttagacggaagcgaatcctatgatcccaacctcgaagatggtgatcagacccccttaagtttccactgggcatgtgttgcttcaacacagagagaagcgggaggatgcgcgctgaatttcggaccacggggaagcagcactgtgacaatccctagagaaaggctggctgctggagtcgagtatactttttcgttgaccgtgtggaaagccggtagaaaggaggaggcaacaaatcagacagtgctgatccggagtggcagggtgccgatagtctcattagaatgtgtgtcttgtaaggcccaggcggtctatgaggtctcacgcagctcctacgtgtacctggagggccgatgcctgaattgttcctccggaagcaagcgcggtcgttgggccgctcggacattttctaataagacactggtgttagatgaaactactacaagcaccggttctgccggtatgcgcctagtgctgagacgcggagtgttaagagatggcgaaggctacacgtttaccctcacagtgctcggtagaagcggcgaggaggaaggctgcgcatctatccgcctgagtccaaatcgccctccgttgggtggttcatgtcggctttttcccttaggcgcagtacacgctcttacaactaaagtgcactttgagtgcaccgggtggcatgacgccgaggacgccggtgcacccctggtatatgccctgctactgcgccgatgtaggcaggggcattgtgaggagttttgcgtttacaaggggtctctgtcctcctatggggcagtgcttccgccagggttccgccctcactttgaagtaggactggccgtcgtagtgcaggatcagttgggcgctgcggtcgtggccctcaatcggtcgctggccataacactacctgagccaaacggatccgccaccgggcttacggtgtggctacatggcctcactgcttccgtactaccgggattattgcggcaagccgacccccaacacgtgatagaatatagcctcgccttggtgaccgtgttgaacgagtatgaaagggctctggacgtggccgcagagcccaaacatgaacgacagcaccgtgcgcagatcagaaagaatatcaccgaaaccctcgtgtccttgcgtgtccacacagtggatgacatacaacagattgctgctgccttagcccagtgcatggggcctagtcgcgaactcgtctgtcgcagctgcttaaaacagacgttgcacaagctggaagctatgatgcttatcctgcaggctgagaccacggccggtaccgtcacaccaactgccattggagacagtattctcaacataaccggcgatctgattcacctcgcgtcttctgacgttcgggctccccagcccagcgagttaggcgcagagtcgcccagcagaatggtggctagccaggcctacaatctgacttcagccctgatgagaatcctcatgaggtctagagtcctgaacgaagagccactgaccctcgcgggagaagagatcgttgctcaaggcaaaagatcagatccacggagtctcctgtgctacgggggagctcctggacccggttgtcactttagcatccccgaggcattttcaggggcactagccaatctaagtgatgtcgtgcagttaattttcttagtagactctaatccgttccccttcggttacatctcgaactacacggtgtcaaccaaagtggccagcatggcatttcagacacaggcaggtgcacagattcccattgaacgattggccagcgaacgcgctatcactgtgaaggttcctaacaattcagactgggctgccaggggtcaccgaagctccgccaattccgctaatagtgttgtagtccagccacaagcaagtgtcggcgcagtggtgactctggattccagtaatccggcagccggtctgcacctccagttgaattacacactgctagacggccattacctctctgaggagccagaaccttacctggctgtgtatctacactctgagccaagaccaaatgagcataattgctcagccagtcggagaattcggcctgaaagtctgcagggcgctgaccacaggccctatacgttctttatttctccgggatctagagatcccgcagggtcataccaccttaacctcagcagccattttaggtggtcagctctgcaggtctccgtggggctgtacacatcactttgtcaatatttcagcgaggaggacatggtgtggcgaacagagggactcctgcccctcgaagaaacaagtcctcggcaggccgtgtgtctcaccagacatcttacggcctttggcgcatctctgttcgtgccaccgagccatgtgcgcttcgtgtttccagagcctaccgcagacgttaactatatcgttatgcttacatgcgcggtatgcctggtgacttatatggtcatggctgctattctgcataaactcgaccaactcgatgctagccgtggcagagctattcctttctgtggccagcgcggaagattcaaatacgagatcttggttaagaccggctgggggagaggaagtggaacaactgcccacgtcggaataatgctgtacggagtggactcgcgctctggccatagacacctagatggggatagagcattccacaggaatagcctggatatctttcgcatcgccactccccacagtctcggatctgtgtggaagataagagtgtggcatgacaataagggcctttctcccgcatggtttcttcagcacgttatcgtgcgcgaccttcagacagctcgctccgcatttttcctagttaacgactggcttagtgtggagaccgaggctaatggtggactggtggagaaagaagtgctggctgctagcgatgccgcattactgcgatttcgacgcctgttggtggccgagctgcaacgaggctttttcgacaagcatatctggctctccatctgggaccgaccccctaggtcacgattcacaaggattcagcgagccacttgttgcgtgctgttgatctgtctgtttctgggggctaacgccgtgtggtatggcgcagtgggggactcagcctactcaaccggacacgtatcccgcctcagccctctgagtgtggacacagtggctgtgggcctcgtctcttctgtcgtggtgtatcctgtgtacctcgccatactgtttctattccgcatgtctaggagcaaggtagccggttcgccctcccccacaccggcaggtcagcaagtgctcgacatcgatagttgtctggatagttcagtgctggattcaagcttcctcactttttccggcctgcatgccgaggcttttgtgggccaaatgaagtcagatctgttcttggacgactcgaaatccttggtctgctggccctctggcgaaggcactctttcatggccggatttactctccgacccttccatcgtgggatccaatcttagacagttggccaggggacaggctggacatggactcgggcctgaggaagatggatttagtctggcctccccatatagcccggctaaaagtttttcagcgagcgatgaggacctgatccaacaggttttggccgagggagtgtcgagccccgctccgacacaagacacacatatggagacagatctcctatcttccctttcctctacacccggagaaaagacagaaacactcgccctccagcggctcggggagttaggtccaccgagtccaggccttaattgggagcagccacaggctgctaggctctcaagaactgggctggtggagggcctccgaaagcgcctgttacctgcttggtgcgcttctctcgcccatggactttcccttttgctggttgcagtcgctgtggccgtgagtggctgggtaggcgcatcattcccccctggtgtctccgtcgcatggctcctttcatctagtgcttcatttctcgcgtcatttctggggtgggaacccttaaaggtgcttctggaagctctgtacttctccttagtagctaagcggttacacccagacgaggatgatacactcgttgaatcacccgcagtcactcccgtgtctgcaagggtgccacgggtacgcccaccccacggctttgcactcttccttgccaaagaagaggctaggaaggttaaaagattacacgggatgctgcggagcctcctcgtgtacatgctcttcttattagtgaccctcctagcatcttacggcgatgcgagctgtcacgggcacgcatacaggctccagtcagcgatcaaacaagagttgcactcccgagcattcctagcaattacacgatcagaagagctctggccctggatggctcacgttctgctcccttacgtacacggaaaccaaagctctccagagcttgggccacctagactgagacaggtcagactccaagaggctttgtacccagacccgcctggccctcgcgtacatacatgctccgccgcaggaggcttcagcacgtctgattacgatgtcggatgggagagtccccacaatgggagtgggacctgggcttattctgctcctgacctcttaggcgcatggtcatggggcagctgcgctgtatatgacagtggaggatacgtgcaagagctggggctgtccctcgaggagagtcgggaccgcctccgctttcttcagttgcacaattggctggataacaggagccgagctgtgttcctcgaattgacacgctactccccagcagtaggccttcacgcagcagtgactcttcggctcgagttccctgccgcaggacgcgcactcgctgccttgagtgtgcggcctttcgccctgagacggctatccgccggtttgagtttgccccttttaacttctgtttgcctgctgctgtttgctgttcactttgcagtagctgaagctcgcacctggcatagggagggcaggtggagagtccttaggctgggggcatgggcccgatggcttctggttgctctgacagccgctacagcacttgtcagattagcacagctcggtgcagccgaccgccaatggactcgtttcgtgcgaggtaggcctcggagattcaccagctttgatcaggtggctcaactctcctccgccgctcgcggactggccgcttccctgctttttctgctgctcgtcaaggctgctcaacagttacgtttcgtacggcagtggagtgtgtttggcaagacactgtgtcgtgctctgcctgagctccttggcgtaacactgggtttggtcgttctgggggtggcctacgctcagcttgctatcctcctcgtaagcagttgtgtggacagcttgtggtctgttgcacaggcccttttggtgctttgtcctgggacaggtctgagtaccctgtgtccagccgagtcctggcatctatctcctctgctatgcgtgggtctttgggccctccggctttggggcgctctgcgactgggggcagtaattcttcgttggagatatcacgctctgaggggcgaactgtatcgcccagcttgggaacctcaggattacgaaatggtcgaactgtttttgcgccgactgcgcctatggatggggctgtctaaggtgaaagagttccggcacaaggtacgtttcgaaggcatggaacccctgccctctcggtcctcccggggttcgaaggtgagtcccgacgtgccccctccatccgctggctccgacgcctctcacccttctacttcctcttcccaactagacggactgtccgttagtctggggaggctcggcacccgctgcgagccagaacccagcagattacaggctgtgtttgaggctctgttgactcagttcgatcgcttaaatcaggccaccgaagacgtgtaccagctcgagcagcaactgcactcccttcagggcagacgatcttcccgagctccagccggatcaagtcgtggtccttcccctggactgcgcccagccttgcccagccgactggcaagggcctcgcggggagttgatctggcaacgggcccatcgcgtaccccactccgcgctaaaaacaaggtgcacccctcttctacctag

SEQ ID NO: 235391 - DNA, 8550 bp, synthetic construct
  misc_feature 1..8550: note = Description of Artificial Sequence: Synthetic coding sequence
  source 1..8550: mol_type = other DNA
atggctgaggaggcagcacaaaacattagtgacgatcaggaaaggtgtctgcaggccgcatgctgtttgagctttggcggagagctgtcagtcagtacagataagtcttggggtctgcacctgtgctcctgctctcctcctggtggcggactttgggtcgaggtgtatgctaaccacgtgttgctcatgtcagatggcaaatgcggctgcccatggtgcgccttaaacgggaaggccgaagatagggaaagccagagccccagttcatctgcctctcgtcagaagaacatctggaagacaaccagtgaagctgctctctcagtggtgaatgagaaaactcaggcggtggtgaatgaaaaaacacaggcacctttagactgtgataacagcgcggaccggatcccccacaaacccttcatcattatagcccgtgcctggagtagcggcggtcctaggttccaccatagacgtctgtgcgcaacgggcaccgccgactccactttttctgctttgttgcagctccagggcactacctccgccgcagccccatgtagtctgaagatggaggccagctgttgtgttttgcgtttactctgctgcgccgaggacgtggctacaggattgctgcccggaacggtcacaatggaaacccctacaaaggtggccaggcccactcagacctcaagtcaaagggtgccgctctggcccatatctcatttcccaacatctccaaggtcaagccacggcctaccccctgggattccccgaacgccaagcttcacggcgtcacagtcgggctcagagattctgtatccccctactcagcatccccctgtggccatcctggcacggaattcggacaacttcatgaatcccgtgctgaattgttctttggaagtggaggccagggccccacccaacctaggcttccgggtgcatatggctagcggagaagctctctgcctgatgatggatttcggggactcctcaggagtggagatgaggcttcacaacatgagtgaggctatggctgtgacagcttatcaccagtactcaaagggcatctttttccacctcctgcactttcagttagatatgtcgacctataaggaggccgaaacccagaatacaaccttaaatgtctacctgtgccagagcgagaattcatgcctcgaggattccgacccaagcaatctcggctatgaattaattagcgcctttgtgaccaagggcgtgtacatgctgaaggctgtgatctataatgagttccatggcacggaggttgagctgggtccttattacgtggagatcggtcatgaggcggtgtccgcctttatgaactccagtagtgtgcacgaggacgaggtgctggtcttcgctgatagccaggtgaaccagaaaagcacagttgtaattcatcattttcccagcattccttcttataacgtgtccttcatctctcagactcaagtgggcgactctcaagcgtggcacagtatgacagtttggtacaagatgcaaagcgtgtctgtctacaccaacgggactgtatttgctactgatactgacattactttcactgctgtcacaaaagaaacgattcccctcgagttcgagtggtacttcggagaggatccgcctgtacgcaccacctcccggtctatcaaaaagagactgagcatcccacagtggtatcgtgtgatggtgaaggccagcaatcgaatgtcatctgtcgtctctgaaccccacgtgattcgcgtccaaaagaagatcgtggcaaatcgcctgactagtcctagttcagctttagtcaacgctagcgtggcattcgagtgctggatcaacttcggtacagatgtcgcttatctttgggattttggagatggcaccgtgtccttaggcagttcttcatccagtcatgtgtattctcgcgagggcgaatttacagtggaggtcctcgcatttaataatgtctccgccagtacacttcgtcagcaactgtttatagtatgcgagccctgtcagccccctctggtcaaaaatatgggccctggcaaggtgcagatatggaggtcccagccggtacggttaggggtcacattcgaagctgccgtgttttgtgacatctctcagggcctgagttacacatggaatctcatggacagcgagggcctccccgtgagtctccctgctgcagttgacacgcaccggcaaaccctgattcttcccagccacacactggagtatggcaactacacagcgctggcaaaggtacaaatagaggggtctgtcgtgtactctaactattgtgtgggtttggaagtccgtgcccaggcacctgtaagtgtgattagcgaggggacacacctgtttttctcgaggactactagctcgccgattgtcttgcggggaacccaaagcttcgaccccgatgacccaggtgctacattgcggtaccactgggagtgcgccaccgcaggcagcccggctcacccgtgtttcgacagcagcacagctcatcaactggatgccgctgccccaactgtctcttttgaggcccagtggctgagcgatagctacgatcaatttctggtgatgctgagagtttcgagtgggggtcggaacagttctgagaccagggtgttccttagcccttacccagatagtgccttccggtttgtacacatctcgtgggttagcttcaaagatacatttgtgaattggaatgacgaactgtctttacaggccatgtgcgaggattgcagcgagattccaaacctctcctactcatgggacctgtttctagtcaatgcaaccgagaaaaatagaattgaagttccattttgtcgggtcgttggcctgttgggttctctggggctcggagctatctcagaatctagccagttgaaccttttacctaccgaacccggaacagctgatcccgacgctacaaccacaccctttagcagagaaccctcacccgtcactctgggccagcccgcaaccagcgcccctcggggaacgcctacagaaccaatgaccggggtgtactggatcccgcctgctggagactctgccgtcctgggtgaggctcccgaagagggctcattagatctggagccaggcccacagagcaaaggctccttaatgaccggtaggtccgagagaagccagcctactcacagtccagacccccatctctctgattttgaggcctactatagcgacatccaagaagccatcccctctggcggtcgccagcctgcgaaagataccagcttccccggttctgggcctagtttgtccgcggaggaatcaccgggtgatggcgataatctggttgatcccagcctcagcgctggcagagcagagcccgtgcttatgatcgactggccaaaagctctgctcggtcgtgctgttttccagggatattcttctagtggaataaccgagcagaccgtcaccatcaagccttacagtctgtccagtggcgagacctacgtcttacaagtcagcgtggcctcaaaacacggcctgctagggaaggcccagctctacttgaccgtcaatcccgctccacgtgatatggcctgtcaggtgcagcctcaccacgggctcgaagcacataccgtgttttctgttttttgtatgtcgggtaaaccggacttccattatgagttttcttaccaaattggcaataccagtaaacataccttgtatcatggcagagacacccagtactacttcgtcctgccagcaggagaacatctggacaattacaaagtcatggtttccacagaaattacagacggtaagggttccaaagttcagccctgcacagttgtcgttacagtgttgccacgttaccatggcaacgactgcttgggagaagacctgtacaatagctcacttaagaacttatccacccttcaactgatgggatcctacactgagattcgcaactacataaccgttatcacacgcatacttagtcgtttgagtaaggaggacaagaccgctagctgcaatcagtggagcagaattcaagatgccctgatctcttctgtctgtcggctcgccttcgttgaccaggaggagatgattggatcagtgttgatgctgcgggatctggtgtcctttagtaataagttaggcttcatgagtgcagtgctcatcttaaaatataccagagcccttctggcgcagggtcagttcagcgggccattcgtgatagacaaaggagtgcggctagagctgattggattgatctcgagagtctgggaggtgtcagagcaggagaactccaaagaagaggtctatagacatgaagaaggcatcaccgtgatttcggatttgctgctgggatgcctcagcctgaaccatgtgagcaccggtcaaatggaatttaggactctcctgcactacaacttgcagagctctgtccaaagcctgggcagtgtgcaggttcacctgcctggagatctggctggacactctcccgcaggtgccgagacacagtccccgtgttatatctctcagctcatccttttcaagaaaaacccataccccggatctcaagccccaggccagattgggggagtcgtgggcttgaacctctatacctgttcaagccgcagaccaattaatcgccaatggctcaggaaaccagtcatggtggagttcggagaggaggacggtctagataaccgtcggaataagacaacatttgtgctcctccgggataaggtgaatttacaccagtttacagagctcagcgaaaatccccaggagtccttgcagattgagatcgaattttcaaaaccggtgacaagagcattccccgttatgttgttggtgcgtttcagcgaaaaaccaacccccagtgacttcctcgtgaagcagatctacttttgggacgagagtatagtccagatttacattccggcagcttcccaaaaagatgcatcggtagggtacctgtccttactcgacgccgattatgaccggaaaccccctaaccgctatctggccaaggcagtgaactacacagtccatttccagtggatcaggtgcctcttttgggataagagggaatggaagagtgagaggttttctcctcagcccggaacttcacctgagaaggtcaactgttcataccacaggctcgccgcttttgcactgctccggcgtaagctgaaagcatcctttgaggtcagtgatatttccaaacttcagtctcatcctgagaacctgctcccatccatctttatcatgggcagcgtcatactatacgggtttttggtggccaagagccggcaagtggaccatcatgagaaaaaaaaggctggatacatatttcttcaggaggcgtctctgcctggacaccagctctacgcagtggtgatagacaccgggtttagggctcccgctaggctgaccagtaaggtgtacatcgtgctctgcggggacaatgggctgtccgagacaaaggaactgtcctgtcccgagaaaccactcttcgaacgaaacagccgtcacacttttatcttatcagcacccgctcagctgggcctactgcgtaaaatcaggctatggcatgactcccggggaccttctcccggatggttcatcagtcacgtgatggtgaaagagctgcacactggacaggggtggttcttccccgctcaatgttggctttcagccggacggcacgacggcagagtagagagagagttgacctgcttgcaagggggactcggttttcggaagctgttttattgcaaatttactgagtatctagaagatttccacgtttggctgagcgtgtatagtcgaccgtcttcctctcgctatcttcacacaccacggctcacagtttcttttagcttgctttgtgtctacgcctgtttgaccgcgctggtggccgcaggaggccaagagcagcctcacttggatgtgagcccaacattggggtcattccgtgttggcctcctctgtaccctgctcgctagcccaggggctcagctcttgagcctgctctttcggctttccaaggaggcccctgggagcgcgagagttgaaccacactctccccttcgcggaggtgcacaaaccgaagcaccccatgggccaaacagttgggggagaattccagacgcacaagagcctcgaaaacagccggcttctgccatcctcagcggaagtggacgggctcaaaggaaggctgcttccgacaatggcactgcctgtcctgcgcctaagcttcaggtccacggtgccgatcactctcggacgagcctgatgggaaaatcccactgctgcccgccacacacacaggctcctagctcaggtctcgaaggtcttatgccacagtggtcccgagcactgcaaccgtggtggtcttccgcagtttgggccatttgcggaactgcatctctcgcttgctccttaggtaccggcttcctcgcctatagattcgggcaggaacaatgcgtccaatggcttcaccttctctcattatccgtggtgtgctgcatcttcatcacacagcctcttatggtgtgtctgatggcccttggcttcgcctggaagaggcgagcagataaccacttttttacagaatccctctgtgaagctacccgtgacttggactcagaactggccgagcgaagttggacccggcttccctttagctcttcctgctctattcctgactgcgctggcgaggtagagaaagttttggctgcgaggcagcaggctaggcatctgcggtgggcacaccccccttcaaaagcccaacttcggggaacacgacaacgcatgagacgggagtccagaactcgtgctgccctcagagatatctccatggatatcctcatgttgctcctgctgctttgcgtcatttatggcagattctcgcaagacgaatactcccttaatcaggccatccgaaaagaatttacccggaatgcgagaaattgtctcggagggctgcggaacatcgccgattggtgggattggagtctcaccactctgctcgatgggctatacccagggggaacgccctccgcgagagttcctggagcccagcccggagccttgggcggaaagtgctacctgatcggttcttccgtgattcgccagctgaaagtttttccaagacacctctgcaaacctcctaggccgttttctgccctgatcgaagactccatccctacgtgctctcccgaggtgggaggccctgagaatccatatttgatcgaccctgagaatcagaatgtcacactcaacggtcctggcggatgcggaacccgcgaggattgtgtgttatctttagggagaactcgcactgaagcccataccgctctgtccaggctgagagcctccatgtggatcgataggtccactcgcgctgtcagtgtgcactttacgttgtacaatcctccaacgcaactgttcacgagcgtgtccctccgtgttgaaatcctgccaactggctccctcgtgccttcatctctggttgagtcattcagcatatttagatcggacagcgccctgcagtatcatctcatgctccctcagctggtattcttagcactctcactgattcacctctgtgttcagctgtacaggatgatggataagggcgtcctatcctactggaggaaaccgaggaactggctggagctcagtgtggtgggagtaagtctgacatactacgctgtgtcaggacatttggtgaccctggctggcgatgtcacaaaccaatttcacaggggcttgtgcagagcttttatggatcttaccctgatggcgagttggaaccagagagccaggtggctgagaggcatactgctgttcctgtttaccctgaaatgcgtctatctgccgggtattcagaacacgatggcatcctgtagcagtatgatgaggcattccctcccctctatcttcgtagccggactggtcggagctctcatgctggctgcattgtctcacctccacaggtttttactgagcatgtgggtcttgcccccaggaacattcactgatgcattccccggtttgttgttccacttcccacgccgatcgcagaaggactgcctccttgggttgtccaaaagtgatcaacgggctatggcgtgctactttgggatcttactgattgtctctgctacactttgtttcggaatgctccgaggttttttgatgactcttccccagaagcgcaagtcttttcaaagcaaatcttttgtccgattaaaggacgtcaccgcatacatgtgggaaaaagtactgacttttcttcggctggaaacccccaagctggaggaggcggagatggtagaaaatcacaactattatttggatgagtttgcaaacctcctcgacgaattgctgatgaagataaatggcttaagcgactccctgcagttgccactgctcgagaaaacctcaaacaataccggtgaagctaggactgaagaaagccccttagttgacatatctagctatcaggccgcagaacccgcagatatcaaagatttttag

SEQ ID NO: 235392 - DNA, 495 bp, synthetic construct
  misc_feature 1..495: note = Description of Artificial Sequence: Synthetic coding sequence
  source 1..495: mol_type = other DNA
taggtcgggggacctgagaatccttatctgattgacccggagaaccaaaacgtaacactgaatgggcctgggggatgtgggacgcgtgaggattgtgtcctaagcctggggcgaactcgcactgaggcacacaccgctttgtcacggctcagagctagcatgtggatcgaccgttctactcgtgcagtctctgtccattttaccctgtacaatcctcctacccagttgttcacgtctgtgagcttgagggttgagatcctgcctacgggttctctggttccaagcagtctggtagaaagtttttctatattcaggtccgatagtgctttgcagtatcatctaatgcttccacagctggtctttctggccctgagcttgatccacctgtgtgtgcagctttatagaatgatggacaagggtgtgctttcatattggcggaaacccagaaattggctggaagttgcatccttggtgagcttctcttttgaaaagtag

SEQ ID NO: 235393 - DNA, 2907 bp, synthetic construct
  misc_feature 1..2907: note = Description of Artificial Sequence: Synthetic coding sequence
  source 1..2907: mol_type = other DNA
atggttaattcaagccgggtacagccacagcagcccggtgatgccaagaggcctcccgcacctagagccccagaccctggcagactgatggccggttgtgctgccgtcggtgcttcactagctgcccctggtgggctgtgtgagcaaagagggttagaaattgaaatgcagagaatccgacaagctgctgcacgcgacccccctgccggtgcggctgcctcaccttcacctcccctgtcctcttgttccagacaggcgtggtcccgcgataatccagggttcgaagctgaggaagaagaggaggaggttgaaggagaggaaggaggtatggtcgtcgagatggacgtggagtggcgacctggatcaagaaggtctgcagccagtagtgccgtaagctccgttggcgctaggtcaagaggtctcggagggtaccacggagctggccatccttccgggcgtcggagacgaagagaggatcaggggcctccttgccccagcccagtgggagggggagatcccctgcaccgccacctaccactggaggggcagccaccgagagttgcttgggcagaacggctggtccgcggtcttcgcggtttatgggggaccaggttgatggaagagtcctctactaatagagaaaagtatcttaaaagcgttctgcgggagctcgttacatatctcttgttcttaatagtgctgtgcatccttacttacggaatgatgtcgagtaatgtatactactatactaggatgatgtcccagctgtttcttgacacccccgtgtcaaaaaccgagaagaccaattttaagacactgagctcgatggaggatttttggaagtttacagaagggtccttgctggatggcctttattggaaaatgcagcctagcaatcagacggaagctgataatcgcagcttcattttctacgagaatctactcctcggggttcccagaatccggcagctcagggtcaggaatggatcttgcagcatcccacaagacctaagagatgagattaaggaatgctacgacgtctatagcgtttcaagcgaggaccgtgcaccgttcggaccacggaacggaaccgcctggatatatacctccgagaaagacttgaacggatcttcacactggggcatcatagccacctactcaggcgcaggctactacctggacctgtcaaggactagggaagagaccgcagctcaggtagcttctctcaaaaagaatgtgtggctggaccgaggcacacgtgctaccttcatcgatttttctgtgtacaatgccaatatcaatctgttctgcgtcgtacggttgctggtggaattccccgcaactggcggagtgattccttcttggcagttccagccgctcaaacttatcaggtacgtgaccacctttgacttctttttggccgcttgcgagatcatcttctgtttcttcattttttactatgtagtggaggaaatcttggaaataaggattcacaagctgcactactttcgaagcttctggaactgcctagatgtcgtcattgtcgtgctctccgtggtcgcaatcggcataaacatttaccgaactagtaatgtggaggtcttactgcagttcctggaggatcagaatacttttccaaactttgagcacctggcctactggcagatccaattcaacaacattgcggcagttaccgtcttctttgtctggattaaattgtttaagtttataaattttaacagaaccatgagtcaactgtccactaccatgagtcggtgcgctaaagatctcttcgggtttgcaattatgttcttcatcatctttctagcatatgctcagctggcctacctggtttttggaacccaggttgatgacttctcgactttccaggaatgtatattcacgcagttccgaatcattttaggtgacataaatttcgccgaaattgaagaggccaatagagtgttgggaccaatctatttcaccaccttcgttttttttatgttttttatactgttgaatatgtttctggcaattatcaacgatacatacagtgaagtgaagtctgatctggcacagcagaaagcagagatggagctcagcgacctgataaggaaagggtaccataaggcattagtcaaattaaagctaaagaaaaatacagtggacgatatatctgagtctctgcggcaaggaggaggcaagctcaacttcgacgagctccgccaagatcttaagggtaagggtcacacagatgctgagattgaggcaatatttaccaaatatgatcaggacggagaccaggagttgacagagcatgaacatcagcaaatgagggacgatttagaaaaagaaagagaagaccttgatctggatcactcctcattgcccaggccaatgtcgagtagatcattccccagatctctggatgattcggaggaggatgatgatgaggattcaggacattccagccgcaggaggggaagtatttcttccggcgtgagttatgaggagttccaagttctggtgagaagagtggacagaatggaacactccataggaagcattgtgtcaaagatagatgcagtgatcgtgaagctggaaattatggagagagccaagctgaaacgcagagaagtgcttggccgattattggatggagtagctgaggacgaacgcctcggcagggattccgagattcaccgggagcaaatggagcgactggtgagggaagagcttgagagatgggaatctgacgacgctgcgtcccagatctcgcacggactgggcacccctgtgggattgaacggacagccacgtcctaggagcagcaggcctagttcctcacagagcactgaggggatggaaggagccggtggaaacggttccagtaatgtccatgtgtag

SEQ ID NO: 235394 - DNA, 1161 bp, synthetic construct
  misc_feature 1..1161: note = Description of Artificial Sequence: Synthetic coding sequence
  source 1..1161: mol_type = other DNA
atgagtcagctctccactaccatgagtcgctgcgctaaggatctgttcggcttcgcaataatgttttttatcattttccttgcatacgcacagctggcatacctcgtgttcgggacgcaggtggatgacttttccacgtttcaagaatgcatttttacccagttcagaatcattcttggtgatatcaatttcgctgagattgaggaagccaaccgggtactggggcctatatattttaccacattcgtattctttatgttttttatcctcctgaatatgtttttagccatcataaacgatacttatagcgaggttaaatcagacctcgcccagcaaaaggcggaaatggaattgtctgatctcattcggaagggataccacaaagccctagttaaactcaaacttaagaagaacactgtcgatgatatcagcgagagtctgcggcagggaggaggcaagcttaatttcgacgaactgaggcaagatctgaaaggcaagggtcacacagacgctgagattgaggctatatttaccaaatatgatcaggatggcgatcaagagcttaccgagcacgaacatcagcaaatgcgagatgacctagaaaaagaaagagaggatttggacctggaccactcctccctgccaagaccaatgtctagtcgcagcttcccacgcagcctggatgactccgaggaggatgatgatgaggacagcggccactcttcacgccgtcgcggaagcattagctcaggggtctcgtatgaagagttccaagtcctcgtgcggagggtcgatagaatggaacactctatcggaagtattgtgagcaaaatagacgccgtgattgtgaaactggagataatggagagggccaagctgaaaagacgagaagtccttggcagactcctggatggggtggcagaggacgaacgcctaggcagggatagtgaaattcaccgagagcagatggagcgtctcgttcgggaggagctggaaagatgggaatcagatgatgcagcgagccagatttctcatggacttggcacacccgtggggctcaacggacagcctcggccacggagctcccgcccatcttcttcccagtccaccgagggtatggaaggcgcaggcggaaatggatcctcaaatgtacatgtctag

SEQ ID NO: 235395 - DNA, 1161 bp, synthetic construct
  misc_feature 1..1161: note = Description of Artificial Sequence: Synthetic coding sequence
  source 1..1161: mol_type = other DNA
atgagccagttgtcaaccactatgagtcggtgcgccaaggatcttttcgggtttgcaattatgtttttcatcattttccttgcctatgcccagcttgcatatttggtcttcggaacccaggtggatgacttctctacattccaggagtgtattttcactcaattcaggattattctcggcgatataaactttgcggagattgaggaggctaatagagtgctcggacctatctatttcactacattcgtgttttttatgttttttattctgctcaacatgttcctggctattattaatgatacctatagcgaggtaaagtcagatctcgctcaacagaaggcggaaatggaactctcagacttgattaggaagggatatcataaggcactggtcaaactgaagctaaaaaaaaacaccgtggacgatatcagtgaatccctgagacaaggcggagggaagttgaatttcgatgagctccgccaggacctaaagggtaaaggccacacagatgccgaaatagaggccatattcaccaaatacgaccaggatggagaccaagaactcaccgagcacgagcaccagcagatgcgagacgatctggagaaagaacgggaagatctcgacttagaccattcatcactgcctcggccaatgtcctccaggtcctttcctcgaagcttggatgactctgaggaggacgatgatgaagactcaggacatagttctcggagaaggggctccatctcctctggagtctcctacgaagagttccaggtgctggtgcgtcgggtggatcgcatggagcatagcattggctctatcgtctcaaaaatcgacgccgtgatcgtcaaactggagattatggaacgggcaaaacttaagagacgagaggtcttgggaagactgctcgacggagtcgccgaggatgagaggctaggcagggacagcgaaatacaccgcgagcagatggaaagactggtacgcgaggaactggaaagatgggaatctgacgatgcagccagccagatcagccacggactcgggacccccgtggggctcaacggacagcccagacccaggagctccaggccatctagcagtcagtctacagagggtatggagggggcagggggtaatgggtccagtaacgtgcacgtttag

SEQ ID NO: 235396 - DNA, 2418 bp, synthetic construct
  misc_feature 1..2418: note = Description of Artificial Sequence: Synthetic coding sequence
  source 1..2418: mol_type = other DNA
atgaatgctgtcgggtcccctgagggacaggagttacagaagttgggctccggtgcatgggataatcctgcttacagcggcccacccagtccgcacggaactctgcgggtgtgcaccattagtagcacaggccctctgcagccacagcccaagaagcctgaggacgagcctcaggagactgcatatagaacccaggtgtcctcatgctgtctacacatctgtcaggggattagaggcctgtggggcactaccttgacggagaataccgcggagaacagggagctgtacatcaaaaccacccttagagaactgctggtgtatattgtttttctcgtcgacatctgtcttctgacatatgggatgacctcaagtagtgcctactactataccaaggtgatgagcgagctttttctccataccccttccgataccggggtgagctttcaggcgatctctagcatggctgacttctgggactttgcccaggggcctctactcgattctctgtattggacaaaatggtataacaatcagtcacttggccacgggtctcacagcttcatatactacgaaaacatgctgcttggtgtccctcgtctgaggcagctgaaagtgcgaaacgactcatgtgtggtgcacgaagatttcagggaagatatcctgagttgctacgacgtgtacagccctgataaagaagaacagttgccgttcgggcctttcaatggcactgcatggacctaccatagccaagacgagctggggggtttctcccactggggccgtttgaccagctatagcgggggtggatattatctggatttgccagggtcacggcagggaagtgccgaggccttaagggctctccaggaaggcctgtggctcgataggggtacaagagtagtgtttatcgatttcagcgtgtataatgccaatattaacctgttctgcgtcctaaggctggtagtggagttccccgctaccgggggagcgatcccctcatggcagatccggactgtcaagttaattagatacgtgagtaactgggattttttcatcgtaggatgtgaagtgatcttttgcgtattcatattttattatgtcgtggaagaaattctggagttgcacattcacaggctgagataccttagctccatatggaatattttggacctagtcgtaatcctcctctccatcgttgcagtgggttttcacatttttcgaacactagaggtgaatagactgatggggaagttactgcagcagcctaatacgtacgccgacttcgagttcctagccttttggcaaacccagtacaacaatatgaatgcagtgaacctgttcttcgcctggatcaaaatattcaagtacatctccttcaacaaaacgatgacccagctgagcagtactcttgctcggtgtgccaaagatattctgggctttgccgtcatgttctttatcgtgttttttgcttacgcacagctgggatatctgctgtttgggacccaggtagaaaacttcagtaccttcattaagtgcatctttacccagttcaggattattcttggggatttcgattacaacgcgatcgacaatgccaaccgtattctgggcccagcgtactttgtgacctacgtcttcttcgtcttctttgtgcttctgaatatgtttttggcgataatcaatgacacttattccgaagtgaaagaagaattggcgggtcagaaggacgagcttcaattgagcgacttactgaaacagggctataacaagaccctcttacgtctgaggcttcggaaagagcgcgtttcagacgtgcagaaagtcctccaaggcggtgaacaggagatacagtttgaagattttactaacacactcagagagctggggcacgccgaacacgagatcaccgagctcacggcaacattcactaaattcgacagagatgggaatagaattctggatgagaaggaacaggaaaagatgagacaagacctggaggaagagcgggttgcactgaacactgagatcgagaaactgggcaggagtatcgtgagttccccacagggaaagagtggacccgaggcagctcgcgctggcggttgggtctcaggagaggaattttacatgctaactaggcgagtcctgcagttagaaacagtcctggagggagtcgtgagccagattgacgctgttggaagtaagttgaagatgctagagagaaagggctggttggcaccatcccctggggtgaaagaacaggccatctggaaacacccacagccagcccctgctgtgaccccggacccctggggagttcagggtgggcaggagtcagaggttccgtataagcgggaggaggaagctctggaagaacggagattgtctcggggagaaattcctactctccagagatcatag

SEQ ID NO: 235397 - DNA, 2193 bp, synthetic construct
  misc_feature 1..2193: note = Description of Artificial Sequence: Synthetic coding sequence
  source 1..2193: mol_type = other DNA
atgaacgcagtagggagtcctgagggacaggaactgcagaagctcggaagcggggcatgggacaatcctgcctattcaggccctccatctccccatggcacactgagagtttgtacaatttccagcaccggacccctccaaccacagccaaagaagcccgaggacgaaccccaggagacggcctacagaacccaggtgtcttcttgctgtctgcatatatgccagggcattcgaggcctgtggggcacaacgctgaccgagaacaccgctgaaaatagggaactctacataaagacaactctgagagagctcttagtgtatattgtcttcctggtcgacatttgtctgctgacatatggtatgaccagttcatccgcgtattattacactaaggtcatgtcagagttgttcttacacacacccagcgataccggtgtaagttttcaggcaatctcttctatggcagacttttgggattttgcacagggtccccttctggattccctctactggaccaagtggtacaacaaccagtctctcgggcatggatcccactctttcatatattatgagaatatgttgctgggtgtacccagactgaggcaactgaaggtacgcaacgattcctgcgtcgtccacgaagattttcgtgaggatattctgtcctgttatgatgtctattctcctgacaaggaggagcagctgccgttcgggccatttaacgggaccgccttggtcgtggagttccccgctaccgggggagcaatacctagctggcagattcgaacggtcaagcttataagatacgtttctaactgggatttcttcattgtgggctgtgaggtgattttttgcgtctttattttctactacgtagtggaagaaatcctcgagctgcatatccacaggctgaggtatctcagtagtatctggaacatcttagatcttgttgtgatcttgctcagcatcgtggccgtcggctttcacatattcaggactcttgaggtgaatagactcatgggtaaactccttcagcagcccaacacatacgccgacttcgagttcctggcattctggcagactcagtacaataacatgaacgctgtaaatctcttctttgcctggataaagatatttaaatacatcagcttcaataaaaccatgactcagctgagctccaccctagccaggtgcgcaaaagatattctcggattcgccgtaatgttctttattgtcttcttcgcgtacgcccaactgggctacctccttttcgggacacaagtggaaaactttagcactttcattaagtgcattttcacccaatttcggataatactgggggacttcgattataatgctatcgacaatgcaaaccggatcctggggcctgcctacttcgttacatacgtcttttttgtgttcttcgttctgttaaacatgttcctggccattattaatgatacctattccgaagtgaaagaggaattggcgggacagaaagatgagctacagctttccgatctcctcaagcagggatataataagactttgctgaggctgcgtttgagaaaggaacgcgtttctgacgtccagaaggtgttacaggggggtgagcaggaaattcagttcgaggacttcaccaacactttacgagaactaggacatgctgagcatgagataactgagttgaccgcaacgttcacaaagtttgatcgggacgggaaccggattcttgacgaaaaggagcaggagaaaatgcggcaggatctcgaagaggaaagggtggccctgaacacagagattgagaagctaggtaggtccattgtgtcctcacctcagggaaagtccggacccgaagccgcaagggcgggtgggtgggtatcgggggaggagttttatatgctcacccgccgagtcttgcaactcgaaactgtccttgaaggcgtggtgtctcagattgatgctgtcggtagcaaactcaaaatgttggagcgcaagggctggctagctccaagtcccggtgtcaaagaacaggctatctggaagcacccccagccagcgcctgcggtgacccctgacccctggggggtacaggggggacaggagagtgaggtcccatataaacgtgaggaagaggctctcgaagagcgccgactgtcgcgcggagaaatcccaactctccagaggagttag

SEQ ID NO: 235398 - DNA, 2328 bp, synthetic construct
  misc_feature 1..2328: note = Description of Artificial Sequence: Synthetic coding sequence
  source 1..2328: mol_type = other DNA
atgaatgccgtgggttcaccagaagggcaggagctgcagaaactggggtccggagcctgggacaatcctgcttatagtggacctccatcccctcacggcacattgagggtgtgcacaatttctagcaccgggcctctccagccacagccaaagaagcctgaggacgagcctcaggaaacagcctatagaacccaagtatctagctgctgtcttcacatttgccaaggtatcagaggactctggggcacaacactcaccgaaaacacggctgaaaatagagaactgtatattaaaacgacacttagggaactgctcgtctatatagtctttctggtggacatctgccttctcacatatggcatgaccagttctagcgcctattattatactaaagtgatgtcagaactattcctgcatacccctagcgacacgggtgtgagctttcaggctataagctctatggcagacttttgggactttgcacaaggtccactgttggatagcctgtactggactaaatggtataataatcagagcctggggcacggctctcacagcttcatatattacgagaatatgcttcttggcgtgccgagacttcgccagcttaaagtcaggaacgactcctgtgtggtccacgaggacttccgtgaagacatcctttcatgttatgatgtgtattccccagacaaggaggaacaactaccattcggaccatttaacgggaccgcgtggacctatcattctcaagacgaacttggagggtttagtcattggggacgtcttacttcctacagcggaggcggatattatctggatttgcccggatccaggcagggatccgcggaagccttgagagcactgcaggagggactgtggttggaccgaggtacccgggttgtcttcatagacttttctgtttacaacgccaacatcaatttattttgcgttctccggttggttgtggaatttccagccaggagatgtcaccccatcttagccaatcctcactcacaggccgatcccctctgccagcaactattcttcatcgtcggctgtgaggtgattttctgtgtgtttatcttttactatgtggtggaagaaatcctcgagctgcatattcatagactcaggtacttatcttcaatctggaacatactcgatctggtggttattctgctttccatcgtggccgtgggattccacatattccggaccttagaggttaatcgccttatgggtaagctgttgcagcagcccaacacctacgccgacttcgagttccttgccttctggcagacccagtacaacaacatgaacgctgtgaacctgtttttcgcttggatcaagattttcaaatatatcagctttaacaagaccatgacccaactttcgagcacactggccagatgcgctaaggacattctggggttcgctgtgatgttcttcattgtattctttgcctacgctcagctaggttatctcttattcggaacccaggtagagaacttttctaccttcatcaaatgtatttttactcagttccgtatcatcctgggcgattttgactacaatgctattgacaacgccaaccgaattctgggcccagcctactttgtgacatatgtcttttttgtgtttttcgtgctgctgaacatgtttttggcgataattaacgatacctacagcgaggtgaaggaggaactggcaggccagaaagatgagcttcagctgtctgacctcctcaaacaaggctataacaagactctactgaggcttagacttcgtaaggagcgcgtgagtgacgtgcagaaagtgcttcagggaggcgagcaggaaatccaattcgaagacttcacaaataccctgagggaactgggtcacgccgaacacgagattaccgaattaacagcgacttttactaaatttgatagagatggcaacagaattctcgacgagaaagaacaggagaagatgcgccaagacttagaagaggaacgcgtggctctcaatacggaaatcgagaagctgggccgttctattgtttcttcacctcagggcaaaagcggtcccgaggccgctcgggctgggggttgggtgagtggcgaggaattctatatgctcacacggcgtgtgttgcaactcgaaactgtgctggagggggtggtttctcagatcgatgccgtcggatcaaaactgaaaatgctcgagagaaaagggtggcttgcccctagccccggagtgaaggagcaggccatttggaagcacccacagcccgcacccgcagtgacccctgatccttgggggccaggctgggcgggagagtag

SEQ ID NO: 235399 - DNA, 2283 bp, synthetic construct
  misc_feature 1..2283: note = Description of Artificial Sequence: Synthetic coding sequence
  source 1..2283: mol_type = other DNA
atgaatgcggttgggtctccggagggacaggaattacaaaagcttggctcaggcgcatgggataacccggcatactctggcccaccatctccccacgggaccctaagagtatgcacaataagctctacgggacctctgcaacctcagcctaagaagccggaggacgagcctcaagaaaccgcctacagaacccaggtgtcttcctgctgtttgcacatctgtcaaggtattagggggctgtggggtacgacccttaccgagaataccgccgagaatagggagctgtatatcaagacaaccctgcgcgaactgctcgtgtacatcgtattcctggtggacatctgccttttgacctacggaatgacgtcaagcagtgcatattactataccaaggtgatgagcgagctcttcctacacacccccagcgacaccggcgtgtcatttcaggcgataagctctatggccgatttctgggattttgcccagggccctctcttggactctctctactggactaagtggtataacaatcagtccttgggtcatggtagccactccttcatctattatgagaacatgctgctgggcgtcccacggctccggcagttaaaggtgcgtaatgactcgtgcgtggtgcatgaagattttcgcgaggatatcctgagctgctacgacgtatacagcccggataaggaggagcaactcccatttggccctttcaacggaacggcctggacatatcattctcaggatgaactgggcggttttagccattggggcagactgacaagttatagcggcggaggatattaccttgatttgccaggatccaggcaagggtcggctgaagcattgcgcgctctccaagaaggtctgtggctcgatagaggcacacgggtcgtgttcatcgacttctctgtctataacgcaaatattaacctattctgcgtgttgaggctagtcgtggaattcccagcaaccggaggggcaatcccctcatggcagattcggacagttaagttgataaggtacgtctcaaactgggatttcttcattgtcggttgtgaggtcatattctgcgtgtttattttttattacgtggtggaggagattctggagctacacattcacaggctgcgttacctgtcctccatctggaatattctcgacctcgtggtgatactgttgagtatcgtggctgttggtttccacatattccggacactggaggttaatcgattgatggggaagctactgcaacagcctaatacttacgcagactttgagttcctcgccttctggcagactcagtataataatatgaacgcggttaacctcttctttgcatggatcaagatctttaagtacatctcgtttaataaaaccatgacccagctctccagcaccctggcccgatgcgctaaagatattctgggcttcgctgtgatgttctttatagtttttttcgcttatgcacagcttggctatctcttatttggcactcaagtggagaacttctccacatttatcaagtgcatcttcacccagttccggatcattctcggggatttcgactataatgctattgacaacgctaatagaattctggggccagcgtatttcgtgacatacgttttttttgtcttctttgtgctcctgaacatgttccttgcaatcattaatgatacttatagcgaggttaaggaagagttagcgggacagaaagacgagctccagctctccgacctgctgaagcagggctacaataagaccctactccgtctccggctgcggaaggagcgggtctccgatgtgcaaaaagtgctccagggcggtgaacaggaaatacagttcgaggatttcacaaatacgctgcgggagctggggcacgccgagcatgagattaccgaacttacagcaacttttactaagtttgatagggatggtaaccggatactcgacgaaaaagagcaggaaaagatgaggcaggaccttgaggaggagcgggtcgctttaaatactgaaatcgagaagttgggtagaagtattgtgagttctccccagggtaagtccgggccagaagccgctcgcgctgggggatgggttagtggggaggaattttacatgctgacacggcgtgttctgcagttagaaacagtgctggagggggtcgtgtctcagattgatgccgtcggatccaaactgaaaatgctggagagaaaagggtggctggctccaagtcctggggtgcgctttcccattaaagagaagcgcaaaccgtag

SEQ ID NO: 235400 - DNA, 1842 bp, synthetic construct
  misc_feature 1..1842: note = Description of Artificial Sequence: Synthetic coding sequence
  source 1..1842: mol_type = other DNA
atggctgaggccagccggtggcacagaggaggcgctagtaaacacaaattgcattatcggaaggaagtcgaaatcaccacaaccctccaggagctgttactgtacttcatctttctcatcaatttgtgtattctgacatttggaatggtgaacccacacatgtattacctgaataaagtgatgtcttctctgttcctggacacgagtgttccaggagaggagcgcacaaacttcaagagtatcaggagtatcaccgacttctggaagttcatggagggccctttgctcgaaggcctctattgggactcttggtataataaccagcagctgtataatttgaaaaattctagccgcatatattacgagaatatcttactgggtgttcccagggtcagacaactaaaggtgcgaaacaatacatgtaaagtgtactctagttttcagtccctgatgtcagagtgttatgggaagtacacctcagcaaatgaagatctctccaattttgggctgcagatcaataccgaatggcgctactctacttccaatactaatagtccttggcattggggctttctcggagtctaccgcaacgggggttatatcttcacattatcaaaatccaaatctgagacaaaaaataagtttattgacttacgcctgaactcctggattacgagaggcacaagggtgattttcattgatttcagtctctacaatgccaatgtcaatctcttttgcatcattaggctcgttgccgagttccccgctaccggtggaattctgacttcctggcagttctacagcgtgaagttgctccgctatgtctcctattatgattactttatcgccagttgtgaaattacattttgcatcttcctgtttgtgtttaccacacaagaagtaaaaaagatcaaggagttcaaatccgcctacttcaaatcaatttggaattggctggagctgctccttctcttgctctgtttcgtggccgtgtcatttaacacatactataacgttcaaatctttcttctgctgggacagctcctgaagagcacagaaaagtatagtgacttttacttcctggcttgctggcatatctattataataacatcatcgcaatcacaattttttttgcgtggattaagatcttcaagtttattagctttaataagactatgagtcagctgtcaagcaccctgagccgatgcgtaaaagacattgtgggattcgccataatgttttttataattttttttgcctatgcacagctcggattcctggtgtttgggtcccaggttgatgactttagtacatttcaaaattcgatttttgcacagttcagaattgttttgggggatttcaactttgcagggatccagcaggccaatccgatcttgggccctatatatttcatcacttttatcttttttgtgttcttcgttctgcttaacatgtttttagcaatcatcaatgacacatatagcgaggtgaaggccgattatagcatcggccgacggctcgactttgagctcggaaaaatgattaagcagagttacaagaatgttctggagaaattccgattaaagaaggcacagaaagacgaggacaagaaaactaagggatctggagacctggcagagcaggcacgccgtgaggggtttgacgaaaacgagattcagaatgccgagcagatgaagaagtggaaggagagactggagaagaaatactatagtatggaaattcaggatgattatcagcccgtgacacaggaggagttccgcgatggcacgaccaccaagtacaaaatgaggtttagcgaatgcctgacaaaaagaatttag

SEQ ID NO: 235401 - DNA, 1773 bp, synthetic construct
  misc_feature 1..1773: note = Description of Artificial Sequence: Synthetic coding sequence
  source 1..1773: mol_type = other DNA
atggctgaggcaagcaggtggcataggggtgtaaccttcggtatggtgaacccacatatgtactacctgaataaagtcatgtctagtctgtttctggacacatccgtgcctggcgaagagcgaactaattttaaatctattcggtcaatcacagacttttggaaatttatggagggccctctgctggaaggtctgtactgggattcttggtataataaccagcagttatacaatcttaagaatagctccaggatatattatgaaaatatcctgctcggcgtacctagggtgagacaactgaaggtgagaaacaacacctgtaaggtgtattccagcttccagagcctcatgagtgagtgctatggaaagtatacctccgccaacgaggatctgagcaacttcggcctgcagatcaataccgaatggaggtattctacttcaaacaccaacagcccttggcactggggatttttgggagtctatcggaacggtggctatatcttcacattgagtaaaagcaaatcagaaactaaaaacaagtttatcgacctgcgactaaattcctggattacacggggtaccagggttatctttattgacttctccctgtacaatgccaatgtgaaccttttctgcatcattagactcgtagccgagtttccagcaaccggcggaattctaacctcctggcaattctattctgtgaaacttttgcgctatgtctcctattacgactacttcatcgctagttgtgagattactttctgtattttccttttcgtcttcaccacacaggaggttaaaaaaatcaaagagtttaagtcagcctactttaagagtatttggaactggctggagctactcctactgttactgtgttttgtggctgttagtttcaatacctactacaatgtccagatctttctacttctcgggcagcttctgaagtccactgagaagtatagcgacttctatttcctcgcatgttggcacatctactataataatatcatcgcgatcacaatcttttttgcatggatcaaaatatttaagtttatatccttcaacaagacaatgagtcaactgtcctcgactctatcccgctgcgttaaagatatagtcgggtttgccattatgtttttcattatttttttcgcttacgcacagctgggcttcctggtattcggctcccaagttgatgactttagtacattccagaacagtatctttgcccagtttagaattgtacttggtgacttcaacttcgccggaatacagcaagcaaaccctatcctgggcccaatctatttcattacgtttattttcttcgttttctttgtgctgctgaatatgtttttagctatcattaacgacacatattctgaggtgaaggccgactactcgattggaaggaggttggactttgaacttgggaaaatgatcaagcagagctacaaaaatgttctcgaaaaattccgccttaaaaaggcacagaaggatgaagacaaaaagaccaagggctctggagatttagcggagcaagctagaagggaagggttcgacgagaatgaaatccagaatgccgaacagatgaagaagtggaaggagcggctcgaaaaaaagtattatagcatggagatccaggacgactaccagccggtaacacaggaagagttccgggagctttttttgtacgccgtggagctcgagaaggaacttcactatatcaacctgaagctaaaccaagtggtgaggaaggttagcgctctatag

SEQ ID NO: 235402 - DNA, 1875 bp, synthetic construct
  misc_feature 1..1875: note = Description of Artificial Sequence: Synthetic coding sequence
  source 1..1875: mol_type = other DNA
atggcagaggcttcaaggtggcaccggggaggtgcgagtaagcataagttgcattataggaaggaggtcgagattaccactactctacaggagctcctcctctatttcatctttctgataaacctctgtattttaacctttggcatggtcaaccctcacatgtactatcttaataaagtaatgtcttcgttattcctcgacactagcgtacccggagaggaaagaactaatttcaaatctatccgatctattaccgacttctggaagtttatggagggccctctgcttgaggggctttactgggatagctggtacaataatcaacagctgtacaatttgaagaatagctcgcgcatttattacgaaaatatcctccttggagtgcccagggtcaggcagcttaaggtgcgcaataatacttgcaaggtgtattcttcttttcaaagtctaatgtccgaatgctatggcaaatatacgtccgccaacgaagatttaagtaatttcgggctccagatcaacacggagtggaggtattctacatctaacacaaattccccttggcactggggctttctcggagtctaccgaaacggcggatacatcttcactctgagcaagagtaagagcgaaaccaagaacaaatttattgacctccggttgaacagctggataactaggggtaccagagtgatctttatcgatttttctttgtacaatgcaaatgtgaacctgttctgtatcattcgcctcgtggccgagtttcctgctacgggaggcattctcacaagctggcagttttatagcgtcaaattattgaggtatgtttcctattacgactactttatcgcctcatgcgagatcaccttctgcatcttcctcttcgtgtttacgacgcaggaggtgaaaaagatcaaagaattcaagagtgcctacttcaagtcaatttggaactggttagaactcctactgttgctcctatgtttcgtggctgtgagctttaacacttattataacgtgcagatctttcttctgttaggccaacttcttaagagcaccgagaagtattccgatttttactttctcgcatgttggcatatctattataacaacatcatcgctattacaatatttttcgcatggataaagatttttaagtttatttccttcaacaaaaccatgagccagctgtcgagcactctttcgcggtgtgtgaaggacatcgtaggattcgctattatgtttttcatcatcttcttcgcatacgctcagctgggcttcttagtctttggcagccaagtcgacgatttcagcactttccagaatagcatctttgcccagttcagaatcgttctgggtgacttcaacttcgcaggaatacagcaggccaacccaatattagggccaatctacttcattacctttattttttttgtgttttttgtgttactcaacatgtttctcgccatcatcaatgacacatactccgaggtgaaggcagactactctatcggccgacgcctggactttgagctggggaaaatgatcaaacaatcgtataaaaacgtcctagagaagtttcgcctgaagaaagcacagaaagatgaggacaagaaaaccaaaggatctggcgacctggcagagcaggcacgacgggaaggctttgatgagaatgagatacaaaatgccgagcagatgaaaaagtggaaagaacgcctcgagaagaaatactactccatggagatccaagacgactatcagccggttacacaagaggaatttcgtgaattgtttctttatgcagtcgagttggagaaggagctgcattacatcaatctcaagctgaaccaggtggtgaggaaagtttccgctttgtag

SEQ ID NO: 235403 - DNA, 1809 bp, synthetic construct
  misc_feature 1..1809: note = Description of Artificial Sequence: Synthetic coding sequence
  source 1..1809: mol_type = other DNA
atggccgaagcctctcgctggcatcgcggaggggcatcaaagcataaacttcactatcggaaggaagtcgagatcaccaccacgctgcaggaacttttgctttacttcatcttcctcatcaacctgtgcattctgacgttcgggatggtgaaccctcacatgtactatctgaacaaggtaatgtcgtctctgtttctggacaccagtgtgccaggagaagaaagaacaaattttaagagtatccgctcaattactgatttttggaaatttatggaaggaccgctgttggaaggactgtactgggactcctggtataataaccagcagctgtataacttgaagaattcatccagaatttattacgagaacatcctactaggtgttccaagagtccggcagttgaaagttcgaaacaacacctgcaaagtgtactcttctttccagtcacttatgagtgagtgttacgggaaatatacttccgccaacgaagacttatccaattttggacttcagattaatactgagtggcgatattccaccagcaataccaattctccctggcactggggcttcctcggggtgtacagaaatggcggatatattttcacccttagcaagagcaaaagtgagaccaagaacaaattcattgatttgagattaaactcttggatcacccggggaacacgcgtcatattcatcgacttctctttgtacaacgctaacgtcaatcttttttgtattattcggctggtggccgaatttcctgcgacagggggtatcctcacctcttggcaattctacagtgtgaagttgctgaggtacgtgtcatactacgattacttcatcgcatcatgcgagattactttttgcatcttcctgtttgtgttcaccacacaggaggtgaagaaaatcaaagagtttaagagcgcctatttcaagtccatctggaattggctggaattattactgctgcttctgctgaagagtaccgaaaaatacagcgacttctacttcctagcgtgctggcatatttactacaacaatattatagccattacaatttttttcgcatggatcaaaattttcaagttcatctcttttaataaaacaatgtctcaactgagcagcaccctgtctcgttgtgtcaaggacattgtaggattcgccatcatgttctttataatattcttcgcttacgcccagctggggtttctcgtgttcggttcccaggttgacgacttttccaccttccagaactccatctttgctcaattccgaattgtactgggagatttcaatttcgctggtatccagcaggctaatcctattctgggacctatttattttatcacctttatcttcttcgtgtttttcgttcttctcaacatgtttctcgcaattatcaacgatacctactcagaagtaaaggcagactacagcataggcaggcgcctggactttgagctcggcaagatgattaagcagtcctataagaatgtgctggagaaatttagacttaagaaggcacagaaggatgaggataagaagacgaaaggctccggggacttggcagagcaggctcgccgagagggattcgatgagaatgaaatacagaatgccgaacaaatgaaaaagtggaaggaacggcttgagaagaaatattactcaatggagatccaagacgactatcagcctgtaacccaagaagagttccgcgaacttttcctgtatgcagtcgaactggagaaggagttgcactacatcaatttgaagcttaaccaagtggttaggaaagtctctgcactgtag

SEQ ID NO: 235404 - DNA, 1572 bp, synthetic construct
  misc_feature 1..1572: note = Description of Artificial Sequence: Synthetic coding sequence
  source 1..1572: mol_type = other DNA
atggctgaggcctcgcgctggcataggggaggggcttccaaacacaagcttcactaccgaaaggaagtagagatcacgacgaccctgcaggagctcctattatactttattttccttatcaacctgtgcatcctgacctttggcatggtcaatccccacatgtattaccttaataaagtcatgtcaagtctgttcttagacacaagcgttccaggcgaggagcggactaatttcaagtccataagatcgatcacagatttttggaaattcatggagggacctctcctcgaaggcctgtattgggattcatggtacaacaatcagcagctgtataacctgaaaaactcatcgcgcatttattacgaaaatatcctcctaggggtacctagagtgcgtcaattgaaagtgcgaaataacacctgtaaggtgtattcctccttccaatccctgatgagcgagtgttatggcaaatacacttcggctaatgaagaccttagtaactttggcctccaaattaatacagagtggaggtactctacttctaatacaaacagtccctggcactggggttttctcggagtatatcgcaacggcggttacatctttacgctgtccaaatccaagagcgaaacgaaaaacaaatttatcgatctgcgactgaactcctggatcactcggggtacacgggtgatcttcatcgatttttctctctataatgctaacgtgaatcttttttgtattatacgcctcgtagctgaattccccgcaacgggaggtatcctgacttcatggcagttttactcagtgaaactgctgcggtatgtttcctactacgactactttatagccagttgcgaaatcaccttttgcatctttctcttcgtgtttaccacccaggaggtgaagaagataaaagagttcaagtccgcgtattttaagagtatttggaactggctggagctgctcctgttgttgctgtgtttcgtggccgtctccttcaacacctactataacgtgcaaatttttctgctgctgggccagctgcttaaatccaccgaaaaatattctgacttctactttctagcgtgttggcacatttactacaacaacataatcgccatcaccattttctttgcttggatcaaaaacatgttcctggcgatcataaacgatacatattctgaggtgaaagccgattattccataggacggagactggacttcgagctgggaaagatgattaaacagtcctacaagaacgtgctggagaagtttcgtctgaaaaaagcgcagaaagatgaggataaaaaaacaaaagggagcggtgacctagccgaacaagccaggagggaggggttcgacgagaacgagatccagaacgccgagcaaatgaaaaaatggaaggagagactggaaaagaagtactattcgatggaaatccaggacgattatcagccagtaacacaggaagaatttcgcgagctgtttctatatgcagttgagctggagaaagagcttcactacattaatctgaagctcaaccaggtagttcgaaaggtatctgccttatag

SEQ ID NO: 235405 - DNA, 1836 bp, synthetic construct
  misc_feature 1..1836: note = Description of Artificial Sequence: Synthetic coding sequence
  source 1..1836: mol_type = other DNA
atggaggaactcgtcgtagaggtgagggggagtaacggagccttttataaagcctttgtgaaggacgttcatgaagacagtatcacggtggcttttgagaataattggcagcctgatcgtcagatacccttccacgacgtgcggtttcctcccccagtgggttacaataaggacattaatgagagcgatgaggtggaagtctatagtcgggcaaacgaaaaagagccatgctgttggtggctggcgaaggtgaggatgataaagggcgagttctacgtgattgaatatgccgcttgcgatgccacttacaacgagatcgtaacaatagagaggctacgcagcgttaatcccaataagcccgcaaccaaggatacctttcacaagatcaaattggacgttcccgaagatctacgccagatgtgcgccaaggaggccgctcacaaggactttaagaaggctgtgggagctttctccgtcacgtacgaccctgaaaactaccaactggttatcctctcaattaatgaggttacatcaaaacgtgcacacatgctcattgatatgcatttcagaagccttcgcaccaagttgtcattgattatgcgcaatgaagaagcgtcgaagcaacttgagtcctccaggcaattggcctcacgctttcatgagcagtttattgttcgagaagatctgatgggtctggccatcggcacacacggggctaacatccagcaagcgagaaaggtacccggtgtgacagccatagacctggacgaagacacttgtaccttccacatctacggcgaagaccaggatgcggtcaaaaaagcacgatcattcttagaatttgctgaggacgtcatccaggtccctcgcaatttggtgggcaaggtgattgggaagaatggaaagcttatccaggagatcgtggacaagagcggagttgtgcgagtccgaatagaggcagagaacgaaaagaacgtgcctcaggaggaggagatcatgccacccaatagtctgcctagcaataattcccgggtcgggcctaacgcgcctgaggagaagaagcatctcgacatcaaggagaattcaactcacttttcacaacccaattccaccaaggtgcagaggggaatggtaccctttgtcttcgtgggaactaaagatagcattgcgaatgccactgttctgctagattaccatctgaactacctgaaggaggtggatcaactgcggctagaaaggctccaaatcgacgagcagttgaggcaaattggcgcatcctcaaggcccccacctaaccgcactgataaagagaaatcatatgtaacggacgacggtcagggaatgggcagaggaagcaggccctatcggaatagggggcatggcagaaggggccctggctatacctcggggaccaatagcgaggcaagtaacgcatcagagactgaatcggaccacagggatgagctgagcgattggagcctcgcaccaaccgaagaggaacgcgagagctttctccgtagaggcgacggtcggagacgaggcggaggcggtcgcggacaaggaggcagaggtaggggtggcggtttcaagggtaatgatgaccatagccgaacagacaataggcccaggaacccaagggaagcaaagggcagaactaccgacggttcgttacagattagagttgattgtaataatgaacggagtgtgcatacaaaaactctgcagaacacttcttccgagggttccaggcttcggacaggaaaggatcgcaaccagaaaaaggaaaaaccggactcggtagatggccagcaacctcttgtgaacggtgttccgtag

SEQ ID NO: 235406 - DNA, 513 bp, synthetic construct
  misc_feature 1..513: note = Description of Artificial Sequence: Synthetic coding sequence
  source 1..513: mol_type = other DNA
atgccactgcccgtggctctgcagacaaggctggcgaagagagggattctaaagcatttagaacccgaacctgaagaagaaattattgccgaagactatgacgatgatcctgtggattatgaagctactaggctcgaaggcctacccccatcctggtacaaggttttcgatcctagctgcggtctgccctactattggaatgctgataccgacctggtctcatggctctctccccatgatcctaactcagtggtgactaaatcggctaagaagttgcggtctagcaacgcagccgttagtagaaaagatgaggaattagatccgatggatccttcatcatactctgatgcaccaaggggcacatggtctacaggcctacccaagcgcaacgaggctaaaacaggggcagacacaaccgcggcaggaccgctgttccagcagagaccttatcccagccctggcgctgtgctgcgggcaaacgccgaggcctcacgcaccaagcagcaggattag

SEQ ID NO: 235407 - DNA, 204 bp, synthetic construct
  misc_feature 1..204: note = Description of Artificial Sequence: Synthetic coding sequence
  source 1..204: mol_type = other DNA
atgccattgcccgtcgctctgcagacgcgtctggctaagcgcggtattctgaagcacctggagcctgagccagaggaggaaatcatcgctgaagattacgacgatgaccccgttgactacgaagctaccaggctggagggccttccaccaagctggtacaaggtttttgacccttcctgccccggttggagcgcgatggtgtag

SEQ ID NO: 235408 - DNA, 798 bp, synthetic construct
  misc_feature 1..798: note = Description of Artificial Sequence: Synthetic coding sequence
  source 1..798: mol_type = other DNA
atgccactcccagtggcacttcagactcgactggccaagcggggaatcctcaagcacctggagccagaaccagaagaagagataatagccgaggactatgacgacgatccggtagactacgaagccacacggcttgaaggattaccccctagctggtacaaggtcttcgaccccagctgtggactcccgtattactggaatgcagacactgatctggtttcttggttgagcccacacgatccgaatagtgttgtaaccaagtcagcaaagaaactacggagttcaaatgcggacgctgaggagaagctagataggtctcacgataagtctgacagagggcacgacaagtcagataggtcgcatgaaaagctggatcggggtcatgataaaagtgacagaggacacgacaaatcagatcgagacagggaacgaggctacgataaagtagacagggaacgggagagggatcgcgagcgggaccgcgaccggggttacgacaaggcagaccgcgaagaaggaaaagagagacggcaccatagaagggaagaactggccccttacccaaaatccaagaaggcagtgagtagaaaagatgaggaactggatccgatggacccctcttcctacagcgatgctcccaggggcacttggagcaccgggctcccgaaaaggaacgaggccaagactggggcagacactaccgctgccggaccgctctttcaacagcggccatacccaagtccaggcgcagtcttgagagccaatgcggaggcctcaaggacaaagcagcaggactag

SEQ ID NO: 235409 - DNA, 513 bp, synthetic construct
  misc_feature 1..513: note = Description of Artificial Sequence: Synthetic coding sequence
  source 1..513: mol_type = other DNA
atgccgctcccagtagcactgcagacccgtctggccaagcgcggaatccttaaacatctggaacctgagcctgaagaggaaattatcgcagaagattatgacgatgaccctgtggactacgaggccacgcgcctcgaggggttgcccccaagctggtacaaagtgtttgatccttcctgtggtttgccctattattggaacgctgacacagatctggtgagttggctttctccccatgaccctaattccgtggtcaccaagtctgctaaaaagctccggtcttccaatgcagccgtttcacggaaggatgaagagctggatcctatggacccatcatcctactccgatgcccctagaggaacctggagcactggcctccccaagcgtaacgaggctaaaaccggggcagacactacagctgcagggcctttgtttcaacagcggccatatccaagtccaggcgctgttctgcgggctaacgctgaggcaagcaggacaaagcagcaggactag

SEQ ID NO: 235410 - DNA, 798 bp, synthetic construct
  misc_feature 1..798: note = Description of Artificial Sequence: Synthetic coding sequence
  source 1..798: mol_type = other DNA
atgcctctaccggtcgcacttcaaacccgactcgcaaagcgaggcattctgaaacatttggagcctgagccagaagaggagatcatcgccgaagattacgatgacgacccagtggattatgaggccacaagactggagggcctcccgccaagctggtacaaggtatttgacccgagctgcggcctcccttattattggaacgctgacacagatctggtgagttggttgtctcctcacgaccccaacagcgtagttaccaaatccgccaagaaactgcggtcatccaatgcagatgctgaggaaaaactggataggtcacatgacaaatctgatcggggtcatgacaagtctgacagatcacatgaaaagctggacagagggcacgataagagcgaccgcggacacgacaagagcgatcgggatagagaaagggggtatgacaaagtggacagagagcgggagcgtgaccgcgaacgcgatagagacaggggttacgacaaggccgatcgagaggagggcaaagaacgcagacaccaccggagggaggaactggctccttatccgaagtcgaaaaaagccgtttcacgcaaagacgaggagcttgatcctatggacccaagtagctacagcgatgctcccaggggcacatggtcgactggcctgccaaagaggaatgaggccaaaactggtgcggatactacggcggctggacccctgttccagcaacgcccttatccgtccccgggagccgttcttagagccaacgccgaagcatcccgtactaagcagcaggattag

SEQ ID NO: 235411 - DNA, 642 bp, synthetic construct
  misc_feature 1..642: note = Description of Artificial Sequence: Synthetic coding sequence
  source 1..642: mol_type = other DNA
atgccgctgcccgtagctctgcaaactcgcctcgctaagaggggaattctgaagcaccttgagcctgagccggaggaggagatcattgccgaagactatgatgatgatcccgtggattacgaggccactcggctggaaggccttccgccaagctggtacaaggttttcgacccttcatgcggcctgccatattattggaacgccgacactgacttggtgtcctggctgtccccccatgatcctaattctgtggtgacgaagtcagcgaagaagctgcgcagttccaacgccgatgcagaggagaaactggatagaagccacgataaatcagatcggggacacgacaagagcgatcgcagtcacgaaaagcttgaccggggacacgataagtccgatcgcggacatgataaatctgacagagacagagaaagagggtatgataaggtggatcgcgaaagagagagagacagggagcgtgatcgagacagggggtacgataaagcggaccgagaggaaggcaaagaaaggcggcatcaccgacgggaggagctggctccttaccctaaatctaaaaaagcagtgagccgcaaggacgaagaattggaccccatggatccttctagttactcggatgccccatag

SEQ ID NO: 235412 - DNA, 798 bp, synthetic construct
  misc_feature 1..798: note = Description of Artificial Sequence: Synthetic coding sequence
  source 1..798: mol_type = other DNA
atgcccctgcccgtggcgctgcaaacaaggctcgccaaacgaggcattctgaaacatctcgagcctgagccggaagaagaaatcatagccgaagactatgacgacgaccctgtggactacgaagccacgaggctggaagggctgccccctagctggtataaagtttttgaccccagttgtggattaccatactattggaacgcggatacggatctcgtgtcttggctgtcaccacacgatccaaattccgtggtaactaagtctgccaagaagttacggagcagcaatgccgacgccgaggagaagctggatcggagtcatgacaagtctgatcgcggtcatgacaaatctgatcgctcccacgagaagctcgataggggacatgataagagtgaccggggtcatgataagtccgatcgggaccgggaacgcggatatgataaggttgatcgagagcgagagcgggatagagagagggacagagatcggggatacgataaggcagatagggaggaagggaaggagcgacgacatcatcgacgggaagaattagctccctatcccaagtcaaaaaaagctgttagccggaaggatgaggagttggacccaatggatccaagctcatatagcgacgccccacggggtacgtggtctaccggcctgcctaaaagaaacgaggctaagacgggagccgacacgacggccgctgggcctctctttcaacagcgtccctacccttctccaggcgcagtgctcagggccaacgccgaggcctctcgcactaaacagcaggactag

SEQ ID NO: 235413 - DNA, 453 bp, synthetic construct
  misc_feature 1..453: note = Description of Artificial Sequence: Synthetic coding sequence
  source 1..453: mol_type = other DNA
tgaattgccacctacctcctgcacctcctggtgcagcccgaggaggagataatcgcagaagattatgacgatgaccctgttgactatgaggcgacccggctggagggtctgccaccctcatggtataaagtgtttgatccatcctgcggccttccatactattggaatgctgataccgacttggtgtcctggctctctccccatgaccctaactccgtagtaaccaagtccgcaaagaagcttagaagctctaatgccgcagtatcccgaaaagacgaagagctcgaccccatggatccgtcctcatattctgacgctcctcgcggtacttggtcaactggcctcccaaagcgtaatgaggctaagactggtgcagacaccactgcagcagggcctttgtttcagcagaggccttaccccagccctggcgctgtacttcgagcgaatgcatag

SEQ ID NO: 235414 - DNA, 699 bp, synthetic construct
  misc_feature 1..699: note = Description of Artificial Sequence: Synthetic coding sequence
  source 1..699: mol_type = other DNA
atgggatcagtcttgtcaactgactccggaaaaagtgccccagcatctgccaccgcacgcgctctcgaaaggcgcagggatcctgagctcccggtgacatccttcgattgtgcagtgtgtctcgaggtactgcaccagcctgtgagaactagatgtgggcacgtgttttgtcgtagctgcatagccacaagcttgaaaaataataagtggacttgtccctattgtcgggcttacttgccttctgaaggggtgcctgctactgacgttgccaagcggatgaagagcgagtacaagaattgcgccgagtgtgatactttggtatgtctgtctgagatgcgggcacatatccgtacgtgccaaaaatacattgacaaatacggccctttgcaggagctggaggagaccgccgctcggtgtgtgtgcccattctgccagcgagagctgtatgaggactcattactagaccattgtattacccaccataggagcgagcgaaggcctgtattttgccccctctgccggctgatccccgatgaaaacccctcttctttctcggggtctctaatccgccatctgcaggtcagccacactcttttctatgatgatttcatcgattttaacatcatcgaggaggccctaataaggcgagtgctagatcgatccctcctagaatatgtgaatcatagtaacacaacatag

SEQ ID NO: 235415 - DNA, 1986 bp, synthetic construct
  misc_feature 1..1986: note = Description of Artificial Sequence: Synthetic coding sequence
  source 1..1986: mol_type = other DNA
atggaaaaactgggagtggaacctgaggaagaggggggaggcgatgatgacgaagaggacgcggaagcatgggctatggaactcgccgacgttggcgctgctgcttcttcccaaggggtgcacgatcaggtcttacctacgcccaatgcatcctctcgcgtaatcgttcacgtggatctggattgtttctacgcccaggtggagatgatttcgaatcccgaactcaaagacaaacccctgggagtccagcagaaatatctggtcgtaacttgtaactacgaggctagaaaactgggggtcaagaaattaatgaatgtgagagacgcaaaagagaagtgtccccagctcgtactcgtcaatggcgaggatctcaccaggtatcgggagatgtcatacaaggtgacggagctgctcgaggagtttagcccagttgtggaacgcttaggctttgacgagaactttgtggacctcaccgagatggtcgaaaagcgcctccaacagcttcaatctgatgaattgagcgcggtcactgtcagtggacacgtgtataacaaccagtgtatcggctataaaaccgccaaatgtctggaggcactggggatcaacagcgttcgcgacctgcagacgttctctccgaaaattcttgagaaggaattggggatcagcgtagcccaacgcatccagaaactctcctttggcgaggacaatagccctgtcattttaagcggtccaccccaaagttttagcgaggaggattcctttaaaaagtgctcttccgaggtagaggcaaaaaataaaattgaggagttactggcctctctgctaaaccgcgtgtgccaagatgggaggaaaccacataccgtgagactgatcatccgcaggtacagcagcgagaaacattatggcagagagtcccgacaatgcccaatccctagccacgtgatacagaaattgggcactggcaactatgatgttatgactccgatggttgacattctgatgaaactcttccggaatatggtgaacgttaagatgccatttcatctgactttgctatccgtttgcttctgcaaccttaaagccctcaatacggcaaagaaagggctgattgattattacctgatgccatccctctccaccaccagcaggtccgggaagcattcatttaagatgaaggacacacatatggaggactttccaaaggataaggagactaacagagatttcttgcccagcggccgaattgagtctacccgcactagggaatcccctctggacaccaccaatttctctaaagaaaaggatatcaatgagtttcccctgtgcagccttcctgaaggcgtagaccaggaagtcttcaagcagctgcccgtggatattcaggaagaaattctcagtggtaagagcagagagaagttccagggcaagggctctgtgtcctgcccactccacgccagccgcggagtgctcagcttcttctctaagaagcagatgcaggacattcctattaatccacgggaccacctgtcctcatccaagcaagtgtcttctgtaagcccctgtgagcctgggacttctggtttcaactcctcaagtagttcctatatgtcttcccaaaaggactattcctactaccttgacaatcggcttaaggacgagagaatatcacaggggccaaaagaaccacaaggctttcattttaccaattccaacccagcagtctccgccttccattcattccccaatttacagtctgagcagctgttttctcggaatcatacaactgactcccataagcagaccgtggcgacggattctcatgaaggtttaacggagaaccgcgagcccgatagtgtcgatgagaaaatcaccttcccatcagacattgatcctcaagttttctatgagctgcctgaagccgtgcagaaggagctcctggcagaatggaaacgggcaggttccgactttcatattgggcataagtag

SEQ ID NO: 235416 - DNA, 2223 bp, synthetic construct
  misc_feature 1..2223: note = Description of Artificial Sequence: Synthetic coding sequence
  source 1..2223: mol_type = other DNA
atggaaaagctgggggtggagccagaggaggagggcggaggtgatgatgatgaggaggatgctgaggcctgggccatggaactggcagatgtaggagccgctgcttccagccagggagtccacgaccaggtcctccccacacccaatgcctcctcgcgtgtgattgtgcacgtggacctggattgtttttacgcccaagtcgagatgatcagcaaccccgaacttaaggacaagcccctgggggtgcagcaaaaatacctggtggtgacttgtaattacgaggccaggaagctaggcgtcaaaaaacttatgaacgtgagagacgccaaagagaagtgtcctcagcttgtactggttaacggcgaagacctgactaggtacagagagatgtcctataaggtgactgagctactcgaggagttttcacctgtggtcgagagattgggattcgatgaaaacttcgtggatctgaccgaaatggtggaaaaacggctccagcagctgcaatcagacgaactctctgcggtgaccgtgtccggacatgtgtataacaaccagtcaattaatctactcgacgtgctccatatccggctcttggtcggatctcagatcgccgctgaaatgagagaggcaatgtacaatcagctgggtctcaccggatgtgctggcgttgcttccaataagcttctggctaaattagtgtcaggagttttcaagcccaaccaacagactgtcctgcttccagagtcttgccagcatctgatccattctctcaaccacatcaaagaaattcctggtatcgggtacaagacggcgaaatgtctggaagccctcggaattaacagcgtgagggatctgcaaactttttcacccaaaatcttagaaaaggaactcggcatttcagtagctcaacggatccaaaagctctctttcggagaagacaactcccccgttattctgtcagggccaccacagtccttttcagaagaagactccttcaaaaagtgttcttctgaagtcgaggcaaagaataaaattgaagagcttctggcgtcactgttaaatcgcgtgtgccaggatgggaggaaacctcacaccgtgcggctgataatccgaagatactcatccgaaaaacactatgggagagagtctcgacaatgccctatcccttcccacgtcatacaaaagctgggaactgggaattatgacgttatgacgccaatggtggacatcctgatgaagttgtttaggaatatggttaacgtgaagatgccattccatctgactctgctcagcgtgtgcttttgcaacctcaaggctctcaacacagccaagaaggggcttatcgactactacctgatgccttccctatctactaccagccgctcaggaaagcatagtttcaagatgaaggatacacacatggaggattttccaaaagacaaggaaaccaacagagactttctcccgtcaggcaggatcgagtctactagaactcgagaatctcccctcgatacaacgaactttagcaaagaaaaagacattaatgagtttccgctgtgttccctgcctgaaggggtcgaccaggaagtcttcaagcagttaccagtggacatccaggaagaaatcctctctgggaaatctcgcgaaaaatttcaggggaagggctctgtgagctgtcctctgcatgcatcaaggggagtcttgagctttttttccaagaagcagatgcaggacatcccgataaatccacgagaccacctcagcagttctaaacaggtgtcatcagtatctccgtgcgaacctggtaccagtgggtttaacagctcctcttcaagctatatgtcctctcagaaggattacagttactatctggataaccgactcaaggacgagcgcatatctcaggggcctaaggagccacagggattccactttaccaacagcaacccggctgttagtgcgttccactccttccctaacctgcaatctgagcagctcttctctagaaatcatactaccgattcacacaaacaaaccgttgcaactgattcacatgagggtttgaccgaaaatagagaaccagactccgtggatgagaagattacattccccagcgatatcgacccacaagtgttctacgagctgccagaggccgttcagaaggagctgctcgcagaatggaagcgtgccggatcagactttcatataggccataaatag

SEQ ID NO: 235417 - DNA, 2613 bp, synthetic construct
  misc_feature 1..2613: note = Description of Artificial Sequence: Synthetic coding sequence
  source 1..2613: mol_type = other DNA
atggacagtaccaaggagaagtgtgacagctacaaggacgatcttctgctgcggatgggactgaacgacaacaaagccggaatggaggggcttgacaaggagaaaattaacaagatcattatggaggccaccaagggctccagattttatggcaacgagttaaaaaaagaaaagcaagtgaaccaacgcatcgagaacatgatgcaacagaaagcccagattacctcccagcagctgcgcaaggctcagctgcaggtggatcgatttgctatggagctagagcaaagcaggaacctcagcaacactattgttcacattgacatggacgctttttacgccgctgtagaaatgcgggataacccggaactcaaagataagcccatcgcagtcggcagcatgagcatgctgtccacaagtaattatcacgccagacgtttcggcgtgcgcgcagccatgccaggctttatcgccaagagactgtgcccacaattgatcatcgttcctcctaattttgacaaataccgggcagtcagtaaggaggtgaaagagatcctggctgattatgacccgaatttcatggccatgagtttggacgaggcttatctgaatatcaccaaacatctggaagaacgtcagaattggccggaggataaacggagatacttcatcaagatgggatcctccgtggagaacgataatcccggaaaagaagttaacaagttgagtgaacacgagcggagcatttctccactcctgtttgaggaaagcccttctgacgttcagcccccaggcgatccttttcaagtgaactttgaggaacaaaacaacccacagatcttgcagaacagtgtcgtcttcggcacctcggctcaagaagtggtgaaggaaatccggttccgaatagagcagaaaacaacgctcactgcatccgctgggatcgcccctaacacaatgctagcgaaggtctgttctgataagaataaacctaatggacaatatcaaatactgcctaacaggcaagcagttatggatttcatcaaggatcttccgattcgaaaggtgtctgggatcgggaaagtgaccgagaagatgcttaaggcgttgggtataattacatgcaccgaactctaccagcagcgggctctgctttctctgctgttttctgaaacctcatggcactatttcctgcatatctccctgggcctgggcagcacacacctgacacgggacggcgagcgaaaaagcatgagcgtagagaggaccttcagtgagatcaacaaggcggaggagcaatattcactgtgccaagaactgtgctcagagctggctcaggacttgcagaaagaacgtttaaagggaagaactgttactataaagctgaaaaatgtaaactttgaggtgaagactagagccagtaccgtgagctccgttgtcagcaccgcggaagagattttcgccattgccaaagaactgctgaaaactgaaatcgatgctgatttcccccacccattgcggctccgcctgatgggcgtacgcatctctagcttccctaacgaggaagatcgcaaacaccagcaacggagcatcattggttttcttcaggcaggaaaccaggccctgtccgccaccgagtgcaccttggagaaaaccgacaaggacaaattcgtcaagcccctggagatgagccacaaaaaaagcttctttgataagaaaagatctgagagaaagtggtcccatcaggatacttttaaatgcgaggcggtgaataagcagagtttccagacatcacagccctttcaagtactgaaaaaaaaaatgaacgagaatctggagatcagtgagaacagcgacgactgtcagatcctcacatgccctgtatgcttcagggcccaggggtgtatttccctggaagcgttgaacaaacatgtcgacgagtgcctggacggccctagtatttccgaaaattttaagatgttctcatgttcacacgtctccgccactaaggtgaacaagaaagagaatgttcccgcttccagtctctgcgagaaacaggactacgaagcccacccgaaaatcaaagaaatctctagcgtggattgcatcgcactggttgataccattgacaattccagcaaggctgaaagtatagatgccctgagcaataaacatagcaaggaagagtgcagttcactccctagcaaatcctttaatatcgagcactgccatcaaaattcctccagcacagtgtccctggaaaacgaggatgtaggtagctttcgccaggaataccggcagccgtacttgtgcgaggtaaaaaccggccaggctctcgtttgccctgtttgcaatgtggagcaaaagaccagcgatctcacgctgtttaatgtccacgtggatgtgtgccttaacaaaagctttatccaggagctacgaaaggataagtttaatcctgtgaaccagcctaaggaaagtagcaggagcacgggttcttcttctggtgtacagaaagccgtgaccagaacaaagcgtcctggtctgatgaccaagtactctacttctaagaagatcaagcctaataacccaaagcatactttggacatcttctttaagtag

SEQ ID NO: 235418 - DNA, 2019 bp, synthetic construct
  misc_feature 1..2019: note = Description of Artificial Sequence: Synthetic coding sequence
  source 1..2019: mol_type = other DNA
atggactcgaccaaagagaagtgcgattcgtataaagatgatctcctactccggatgggcctgaacgataacaaagcaggcatggaaggcctggataaggaaaagataaacaaaatcattatggaagcgactaagggcagccgcttctatgggaatgaattgaaaaaggaaaagcaagtgaatcaacgcattgagaacatgatgcagcaaaaagcccagatcaccagtcagcagctgcggaaggcacagcttcaagtggataggttcgccatggagctggaacagtctcgcaatctgagtaacacaatagtccatatcgacatggatgcattttatgcagctgtggagatgagggataaccccgagcttaaagacaagccaatcgccgtcgggtcaatgagcatgctgagtacctcaaactaccatgcaagaagatttggagttcgggctgctatgccagggtttattgccaaacgattgtgtccgcagttgatcattgtgcccccaaatttcgacaagtaccgggcagtgtcaaaggaggtgaaagagatccttgcagactacgaccccaatttcatggcaatgagcttggacgaagcttatttaaacatcacgaagcatttagaagaaagacaaaactggcccgaggataaacggaggtattttattaaaatgggatcaagcgtggaaaacgacaacccaggaaaggaagtcaataagctgtctgaacatgaaagaagtatctccccgctgctgtttgaggaaagtcccagcgatgtacagccgccaggggaccctttccaggtaaacttcgaagagcaaaataacccccagattctgcagaactcggtagtgtttggcacatcagcgcaggaggttgtgaaggaaatcagattccgcattgagcaaaaaaccactctcacagcaagtgccggagtgcgtatttcctcttttcctaacgaagaggatcggaaacatcagcagcggtcgatcattgggtttttgcaggctgggaaccaggcactatccgccacagagtgcaccttggagaaaacagacaaagacaagtttgttaagcctctggagatgagccataagaagtcatttttcgacaagaaacgatcggaaagaaaatggagccatcaggataccttcaagtgtgaggccgtgaataagcagagcttccaaacctcacagccgtttcaggtgctgaagaagaagatgaatgagaacttggaaatctccgagaactcagacgactgccaaatcttaacctgcccagtgtgttttcgagcccagggatgtatttccctggaggccctgaataaacacgtcgatgagtgcttagatggcccttctatctccgagaattttaaaatgttctcttgttcccatgtgtctgcgacaaaggtaaataaaaaggaaaatgtccccgcttcgtctctttgtgagaaacaggactatgaagctcacccaaaaatcaaagagataagtagtgtagactgcatcgccttggttgacaccatcgacaattccagtaaggcagaatccatcgatgccctgagcaacaagcactcgaaagaagagtgcagctccctcccctctaagagctttaatatcgagcattgccaccagaactcatcctccactgtgtctttagagaatgaggacgtgggctcctttagacaggagtataggcagccttatctctgtgaggtgaaaaccggccaagcattggtctgcccagtctgcaatgttgaacagaagacatccgacctaaccctcttcaacgtacacgtggatgtctgtctgaataagtcatttatccaggagttgagaaaggacaagttcaaccctgttaatcagccgaaagagtccagccggtccactggctcaagctccggagtgcaaaaagcggtgaccagaaccaaacgcccaggactgatgactaagtactcaacatcaaagaagattaagccaaataaccctaaacacactctggacatcttctttaaatag

SEQ ID NO: 235419 - DNA, 2343 bp, synthetic construct
  misc_feature 1..2343: note = Description of Artificial Sequence: Synthetic coding sequence
  source 1..2343: mol_type = other DNA
atggaactagagcagtctcgcaatctgtcaaacaccatcgtgcacatcgacatggacgccttctacgccgcagttgagatgcgcgataacccagagctgaaagataagccaatcgcagttggcagcatgagcatgctaagtacatcgaactaccatgcccgaaggttcggtgtaagggcagcaatgcccggtttcatcgccaaacggctatgtcctcaactgatcatcgtgccccctaacttcgataaataccgagcagtttctaaagaggtgaaggagatactcgccgattacgacccgaactttatggctatgagcctggacgaggcctacttgaatataacaaaacacctggaggaaaggcagaactggccagaagacaagaggcggtatttcatcaagatgggtagttcggtcgaaaacgacaaccccggtaaggaggtgaataagttatctgagcacgaacgctctatctctcccctcctatttgaggaatccccttcggatgtccagccccctggagatcccttccaggtaaattttgaagaacaaaataacccacaaatcctgcagaatagcgtcgtgttcggaacttcggctcaggaggtggtgaaagagatcaggtttcggatcgaacagaagactacactcactgccagcgcaggtatcgctcccaacactatgctggccaaagtgtgcagcgataagaataagccgaacggccaatatcaaattctgcctaaccggcaggctgtgatggatttcatcaaagatttgcctatccgtaaggtatccggaatcggaaaagtcaccgaaaagatgttgaaggctctgggcatcattacctgcaccgagctttaccagcagcgcgctctcctatcgctccttttctctgaaacatcttggcattattttctccacatttcccttggcctgggcagtacacacttaacgagagatggagagcgaaaatcaatgtctgttgaacgcactttcagtgagatcaacaaagctgaagagcagtactccttgtgtcaggagttatgctcagaactggcccaagatctgcagaaagaaaggctaaaagggaggacagtgaccattaaactcaaaaacgtgaattttgaagtgaaaacccgcgctagtacggttagcagtgtagtctccacagccgaggagatttttgctattgccaaggagctgctgaagactgagatcgatgccgacttccctcaccccctccgacttcgcttgatgggggtgcggatctcctctttccctaatgaagaagaccggaagcaccaacagcgttcaatcattggctttctgcaggccggtaaccaggccttaagcgccacagagtgcacattggagaaaaccgacaaggataagtttgtgaaacctctggagatgagtcataagaagtcttttttcgacaagaaacgctcggagaggaaatggtcccaccaggacacgtttaagtgcgaggccgtgaacaagcagtcattccaaacttcccagccatttcaggtgttaaaaaagaaaatgaacgagaatctagagatctccgaaaattccgacgattgtcagattctaacctgtcccgtctgtttcagggcccagggctgcatcagcctggaagccttgaacaagcacgtggatgaatgcctggacggcccttccatctccgaaaattttaagatgttttcctgctcccatgtgtcggccacgaaagtcaacaaaaaggaaaatgttccagcctcaagcttatgtgagaagcaggactacgaggcccatccaaaaattaaagagattagctccgtggactgtatcgctctggtggataccattgataacagctcaaaggctgagagtattgacgctctgtcaaataagcacagcaaagaagagtgctcaagcctgccgagtaagtcttttaacatagaacattgtcatcaaaattccagctcaaccgtgtccctggagaatgaagatgtgggctcttttagacaggagtatcgccagccttacttatgtgaggtgaaaacaggccaggcccttgtatgccccgtgtgcaatgtcgagcagaagaccagtgacctgactctgttcaatgtccacgttgacgtgtgcctcaataagagctttatacaagagttgagaaaagacaaattcaaccccgtgaatcagcctaaggagagcagccggagtaccggatcttcatctggcgttcagaaggccgttacccgtacaaaacgaccgggtctcatgaccaagtacagcacatctaaaaaaatcaagcccaacaatcccaagcatacattggatatattctttaagtag

SEQ ID NO: 235420 - DNA, 1386 bp, synthetic construct
  misc_feature 1..1386: note = Description of Artificial Sequence: Synthetic coding sequence
  source 1..1386: mol_type = other DNA
atggattctacaaaggagaagtgcgactcttacaaggatgacctgctcctgaggatgggcctgaatgacaataaggccggaatggaagggctcgacaaggagaagatcaacaaaataatcatggaggccacaaaggggtctcgattctacggcaacgagctcaagaaagaaaaacaagtgaaccagcggattgagaacatgatgcagcagaaggcccaaatcacctcacaacagcttcggaaggctcagctgcaggtggataggtttgcaatggagctcgaacagtcgaggaatctgtccaacactatcgtgcacattgacatggatgccttctatgcggcagtcgagatgcgcgataatccagaactgaaggataagccaattgctgttggtagcatgtccatgttgtctacctcaaactaccacgcacggaggttcggagttagggccgcaatgccagggtttattgcaaagagattgtgccctcaattgatcatcgtgccccctaactttgacaaatacagggccgttagcaaggaagtcaaagagatacttgccgattatgatcccaactttatggcgatgagtctcgatgaagcatacttgaacatcacaaaacacctggaagaacgccaaaactggccagaagataagaggagatatttcatcaagatgggctccagtgtcgaaaatgacaaccctggcaaggaggtgaacaagctcagcgaacatgaaagatcgatcagccccctgctcttcgaggagagcccctccgatgtccagcctcccggagatccgtttcaggtgaacttcgaggaacagaataatccgcaaatcctgcagaattcagtggtgttcggcacatcggctcaggaagtggttaaagaaatcaggtttcggattgagcagaagacgacacttacagctagcgccggaattgcacccaacacaatgctggcgaaagtttgcagtgataaaaacaagccaaacggccagtaccagatacttccgaataggcaggccgtcatggatttcatcaaggatctccctattcgcaaagtgtctgggatcgggaaggttacagaaaagatgctgaaagccctggggatcataacttgcactgaactgtatcagcagagggccctgctgtcactccttttctctgaaacttcctggcactacttcctccatatatcactcggactcggctctacgcatttaaccagagacggcgagagaaagtccatgtcagtcgagagaacctttagtgagatcaacaaggctgaggagcagtatagtttgtgtcaggaattgtgttctgaacttgcccaggatttgcagaaggaacggttgaaggtcgcccaggtggagtacagacggctgtag

SEQ ID NO: 235421 - DNA, 2019 bp, synthetic construct
  misc_feature 1..2019: note = Description of Artificial Sequence: Synthetic coding sequence
  source 1..2019: mol_type = other DNA
atggactctaccaaagagaaatgcgatagttacaaagatgatctcctgctcaggatgggtctcaatgacaacaaggccggtatggagggactcgataaggagaagattaacaagataatcatggaagcgaccaagggcagtagattctatgggaatgaactcaagaaagaaaagcaggtgaatcaacgaattgagaacatgatgcagcagaaagcacagattacctcgcagcaattgagaaaggcccagctgcaagttgatcggttcgccatggagctagagcagtcacgaaatctctccaatacaattgttcatattgacatggatgcgttttacgctgctgtggagatgagagataatccggagttgaaagacaaacctatcgcagtgggttcaatgagcatgttgtccacgagcaattaccatgcaagaaggttcggcgtgagggcagccatgcccggattcatcgctaagcgactgtgcccccagctcattatcgtgccacccaatttcgataagtaccgagccgtctcaaaagaggtgaaggagattctcgccgattatgatccgaactttatggccatgagtctcgacgaggcatacctgaacattactaaacacctggaggaacgccagaattggccggaagataaaagacggtattttatcaaaatgggctcctcagtggaaaatgacaaccccggtaaggaagttaacaagttgagtgaacacgaaaggtcaatatcaccgcttctatttgaggaaagcccatcggacgtgcagcccccaggagatccgtttcaagtgaacttcgaagaacagaataacccccagattctgcagaactccgtagtgttcggcacgtctgcccaggaagtggtgaaagaaatccgatttagaatcgaacagaaaaccacacttactgcctcagccggagtacggatcagcagtttccctaatgaggaggatcggaagcatcagcagaggtcaattatcggcttcctccaagccggaaatcaggctctttcagcaacagagtgtaccctggagaagactgacaaagacaagtttgtgaagccactggagatgagtcataaaaagagctttttcgacaagaaacggagcgagaggaagtggtcacaccaggacacgttcaagtgtgaggccgtcaataagcaatcatttcagaccagccagccatttcaggtcctcaagaaaaagatgaatgagaatcttgagattagcgagaactccgacgactgccagatattgacctgccctgtgtgctttagggcacaaggctgcattagcttagaagcattgaacaagcatgtagacgagtgtcttgacggcccatctatttccgagaatttcaaaatgttctcgtgtagccacgtgagcgcaaccaaggtaaataaaaaagaaaatgtccctgcctcttccctttgcgagaagcaggactacgaggcacatccgaaaataaaggagatcagctcagtggactgtatcgcactagtcgacaccatcgacaactcctcaaaagccgagtctattgacgctctgagcaataagcatagcaaggaggaatgttcttccctgccttccaaatcttttaacatagagcactgtcatcagaattccagtagcactgtatcccttgagaacgaggacgtgggcagctttcgacaggaatatcggcaaccttatctgtgtgaggtcaagaccggtcaggcgcttgtctgtccggtttgtaatgtggaacagaagacttccgacctgacactgttcaacgtgcatgttgatgtttgtctcaacaagtcttttatccaagaactccggaaagacaagttcaatcctgtgaatcaaccaaaggagagttccaggtctacgggttcgagcagcggtgtgcagaaggccgtcacgagaactaaacggcctggactcatgactaagtactccacttctaagaagattaagcctaataacccgaaacataccctggatatcttcttcaagtag

SEQ ID NO: 235422 - DNA, 1470 bp, synthetic construct
  misc_feature 1..1470: note = Description of Artificial Sequence: Synthetic coding sequence
  source 1..1470: mol_type = other DNA
atggattcaactaaggagaaatgtgactcatataaagacgacctgctcctgcgcatgggtttgaacgataacaaagcgggtatggaaggtctggataaggagaagattaataagattatcatggaagccaccaagggaagtaggttctatggcaatgagctcaagaaagagaaacaggtaaatcagcggatcgaaaatatgatgcagcagaaagcccagattacctcccagcagctcaggaaagcacaacttcaggttgaccgcttcgctatggagttggagcagagtcgcaatttgtcgaacacgatcgtccatatcgacatggatgccttttatgctgcagtggagatgagagacaaccccgagctgaaggacaaacctattgcggttggatcaatgtccatgctgagtacatcaaactaccacgcaaggcgatttggcgttagagcagctatgccaggttttattgccaaacgtctctgccctcagctgattatcgtgcctcctaattttgacaaatatcgtgcagtaagcaaggaagtcaaagagatactggcagactacgatcctaatttcatggccatgtctcttgacgaagcctatctaaacatcacaaagcatcttgaggagaggcagaactggcccgaggataaacgtagatatttcatcaagatgggatcaagtgtggagaacgataaccccggaaaggaggttaataaactgagtgagcacgagcgaagcatatctcctctcctgttcgaggaatctccttctgacgtccagccgcctggggatccattccaggttaacttcgaggagcagaacaacccccagattttgcagaactctgttgttttcgggacatcagcacaggaagttgtaaaagagatcagatttaggattgagcagaaaacaacgctgaccgccagtgccggaattgccccaaatacaatgttagctaaggtctgcagcgataaaaacaagccgaacggacaatatcaaattctgcccaatcgtcaggccgtgatggacttcataaaagatctcccgattaggaaagtgtcagggatcggcaaggtgactgagaagatgctgaaagccttaggcattataacttgcacagagctttaccagcaaagagctctgttaagtctgctgttttctgagacatcctggcactactttctccacatctccttaggcttaggaagcacacacctgacccgcgacggggagagaaaatccatgagcgtggaacgcacgttctccgagatcaataaggccgaagagcaatacagcttgtgtcaggagctatgttctgaattggctcaggacctacagaaggaacgccttaaggtatttgggtacctggtcttccctatgaagaggactggcaacaccaataagggagcccttcttgctttttaccgtttagaaaccaaaccgtgccaaccactcagtgttcattag

SEQ ID NO: 235423 - DNA, 426 bp, synthetic construct
  misc_feature 1..426: note = Description of Artificial Sequence: Synthetic coding sequence
  source 1..426: mol_type = other DNA
atggattccactaaggaaaagtgtgactcctataaggatgatctgctgctgagaatgggattaaacgacaacaaagccggaatggaggggctcgataaggagaaaatcaataagattataatggaggccactaaagggtctaggttctacggtaatgagttgaaaaaagagaaacaagtgaaccagcgtatcgagaacatgatgcaacagaaggcacagattactagccagcagctcaggaaggctcagttgcaagtggataggttcgctatggagctggagcaatctcgcaacctctccaatacgatcgtgcatatagacatggatgccttctatgccgctgtcgaaatgagggataatcctgagctgaaagataagcctattgcggtggggtccatgagcatgctgtcaaccagtaattactag

SEQ ID NO: 235424 - DNA, 1419 bp, synthetic construct
  misc_feature 1..1419: note = Description of Artificial Sequence: Synthetic coding sequence
  source 1..1419: mol_type = other DNA
atggatagtaccaaggaaaaatgcgactcttataaagacgatctcctgctccgaatgggcctcaacgacaacaaagccggtatggaagggctcgataaagagaagataaacaaaataattatggaagctacaaaggggtccaggttctacgggaatgaactgaagaaggaaaaacaggtcaatcagaggatcgagaacatgatgcagcagaaggctcaaataacttcacagcaactcaggaaggcacagctccaggttgatcggttcgcaatggagctcgagcagtcccgaaatcttagtaatacaattgtgcatattgatatggacgcgttttatgcagctgtcgaaatgcgggataatccggagcttaaagataaaccaatcgccgtgggctccatgtccatgctgtccacgtccaattatcacgccaggcgttttggagtgcgggcagccatgccaggcttcatagcaaagcgcctgtgccctcaactgataatagtgccgccaaatttcgataaataccgagctgtgtctaaggaggttaaggagattctggcagattacgatcctaacttcatggccatgagcctcgatgaagcctacctaaacatcacaaagcacttggaagagaggcagaattggccagaagacaagaggaggtacttcatcaagatgggaagctccgtagagaatgacaatccgggtaaggaggtgaacaagttgagtgaacacgaaaggagtatcagtccactcctcttcgaagagtcgcctagtgacgtccaaccaccaggtgaccccttccaggtgaacttcgaggaacagaacaatccccaaatactccagaatagcgttgtgttcggaacaagcgcccaagaagttgtgaaggagattagattccgaatagaacagaaaactactttaacagcgtctgccggtattgccccaaataccatgctggcgaaggtctgttccgataagaataagccaaatggccagtaccaaatactgcctaataggcaagcggtgatggattttatcaaagacctgcccatacggaaggtctcgggaatagggaaggtcacggagaagatgttgaaagctttagggataataacctgcactgagctttatcagcagcgcgcactactttccctgcttttctccgagacatcctggcactatttcctgcacattagtcttggcctgggctccacccacctgacacgcgacggagaacggaaaagcatgagcgtagaacgcactttttcagagatcaacaaggcggaagaacagtactcactgtgccaggaactgtgcagtgaactggctcaggacctgcaaaaggagcgcctcaaagtgctgtactttgatatggtgtcgctggtgttcaagttctttaacagcaagatgctgccgtag

SEQ ID NO: 235425 - DNA, 1911 bp, synthetic construct
  misc_feature 1..1911: note = Description of Artificial Sequence: Synthetic coding sequence
  source 1..1911: mol_type = other DNA
atgaagtgtaagtgtcccgtgatctgcttcaacgcgaaggactttgtgcgaatcgtgttgcaatttttcggcaatgatggctcttggaagcatgtagccgacttcattggcttggaccccaggatcgccgcttggttaatcgacccgtccgatgccacaccctccttcgaggatctcgttgaaaagtactgcgaaaagtccattacggtcaaggtaaactcaacatatggcaatagttcgcgaaatatcgtgaatcagaacgttagagagaatctgaagactctgtacagattgactatggacctctgttccaagcttaaggattacgggctgtggcaactgtttcggactcttgagctgcctctgatccccattcttgcagtgatggagtctcacgcaattcaggttaacaaagaagagatggagaagaccagcgcattactaggagcgcgactcaaggagctggagcaagaggcccactttgtcgcgggtgagcgtttcctgatcactagcaacaaccagcttcgggagatcctctttggaaagctgaaactgcacttactcagtcaacgtaattccctccctcgaacggggctccagaagtacccttccaccagcgaagccgtcctcaacgcccttagagacctccaccccctgccgaaaattattttggagtacaggcaggttcacaaaatcaaatcgacgttcgtcgatggtctacttgcttgcatgaaaaaagggagcatcagttcgacctggaatcagacagggacagtaaccggaaggttatctgctaagcaccccaatatacaggggatttctaaacatcctattcaaatcacgacccccaaaaactttaaaggcaaagaggacaagatcctcacaatcagtccccgagcaatgttcgtatccagcaaggggcatacctttctggccgctgatttctcgcagatagagctgcggatcctcacccatctgagtggagatcccgaactgttaaaactgttccaggagagcgaacgagacgatgttttttctacattgacaagccagtggaaagacgtacctgtagagcaggtgacacatgctgaccgggagcagactaagaaggtagtgtacgccgtcgtgtacggcgctggaaaagaacgcctcgccgcatgtctaggggtgcctatccaggaggcagcgcagtttttggaaagttttctacagaagtataagaaaataaaggacttcgccagagccgctatcgctcagtgccaccaaactgggtgtgtcgtttcaataatgggacgcaggcggccacttcccaggatccatgcgcatgaccaacagcttcgcgctcaagcggagaggcaggccgtgaatttcgtcgtgcagggctctgcagcagacctctgcaagctcgctatgatccatgtcttcacagccgtggctgcctcccatactctgacagcccgacttgttgcacagatccacgatgaactgctgttcgaggtggaagacccacaaattcctgagtgcgccgcattggtacgcagaacgatggagagcctggagcaggtgcctctgaaggtatctctatctgcgggacgatcatggggacatctcgtccccctccaggaagcttggttaagacaggcccatgtcgcgctctcccttcctgccaccgcctggctgccgctcggccctctccccgctccgagcccccatccttgcatatttagactccactttgtatgtagccccaggcagcagtgggaagagcgtaccggcttccagcaatccatcgtctggcctagtccgaggagtcctgccctgtatgcgcctggaaggatcaacccactaggcctcggttggccggcaattccttggagcaagtgtttatgcaaagcccttctgattctgtag

SEQ ID NO: 235426 - DNA, 936 bp, synthetic construct
  misc_feature 1..936: note = Description of Artificial Sequence: Synthetic coding sequence
  source 1..936: mol_type = other DNA
atggcggtgggttcccaggactatggtttgtggcagctctttcgcacactcgaactgcccctgattcctatcttggccgtcatggagtctcacgcaatccaggttaacaaggaagagatggagaaaacttctgccctactcggcgcaaggctgaaagagttggagcaggaagcccactttgtcgcgggagaacgatttctgattacaagcaataatcagctgagggagatcctctttgggaaactaaagctgcacctgctctcgcagagaaatagcctccctcggactgggctccaaaagtatccgtcgacctctgaagcagttaatattcaggggatctcgaaacaccctattcagatcactacgcctaagaatttcaaaggaaaggaggataagattctgactatcagcccacgtgccatgttcgtaagctccaagggtcacacttttttggccgctgattttagtcagattgagcttcgaatcctcacacacctgtcaggcgaccctgagctcttaaaactatttcaggagtcagagcgagacgatgtgttttcaactcttacaagtcagtggaaggatgtgccggtggagcaggtgacgcacgcagacagagagcagacaaaaaaggtagtttacgccgtagtgtatggtgcgggaaaagagagactggcggcttgtcttggtgttccaatccaggaggccgcacagtttctagaatcatttctccagaagtacaaaaaaatcaaggatttcgcacgggcagcaattgcacagtgccatcagacaggctgcgtcgtctctattatggggcgtagacgacctttgcccaggatccatgctcacgatcagcagcttcgcgctcaggctgaacgccaggcagtgaattttgtggttcaagctcagagccagcatctgtgtgtggaggtcccatag

SEQ ID NO: 235427 - DNA, 2703 bp, synthetic construct
  misc_feature 1..2703: note = Description of Artificial Sequence: Synthetic coding sequence
  source 1..2703: mol_type = other DNA
atggagaattacgaagccctggtcggatttgacctgtgcaacacgcccctgagttccgtggcccaaaaaatcatgtctgctatgcactccggcgatctggtggatagcaaaacatgggggaagagtacagagaccatggaagttataaataagtccagtgtgaagtacagtgtgcaactggaagatcggaaaacgcagagcccagagaagaaagatcttaaatccctgcggagccaaactagccgtggtagcgctaagctgagccctcaatcattttccgttagactgaccgaccagcttagcgccgaccagaagcaaaaatctatttcttctctgaccctaagtagttgtctgatcccccaatacaaccaggaagcgtccgtgttgcagaagaaggggcacaagagaaaacacttcttaatggagaatattaataacgagaataaaggcagtataaacctgaagaggaaacacattacatataacaatctatctgagaaaactagcaaacagatggccctggaggaagacaccgatgacgccgaaggctacctcaactccggtaactcaggggcattgaagaaacatttctgcgatatccgtcacctggatgactgggctaagtcccagcttatcgagatgctaaaacaggccgcagccttggttatcaccgtcatgtacaccgatggttctacccaactgggggcagaccagacccctgtaagcagcgtccgcggtatcgtggtcctggttaagcggcaggctgagggcggacacgggtgcccggatgccccagcctgtggcccagtcctcgaaggcttcgtttccgacgatccctgcatctatatccagattgaacactctgccatatgggaccaagagcaggaggcgcaccagcagttcgctcgcaatgtactttttcaaaccatgaagtgtaagtgtcctgtgatttgttttaacgcgaaagacttcgttcgcatcgtcctgcagttctttggcaatgacggctcttggaagcatgtggccgactttattggactcgaccccagaatcgcagcttggctgattgaccctagcgatgcgactccgtctttcgaggatctggttgagaagtattgcgaaaaaagtatcaccgttaaagtcaactctacatacgggaactcttctcggaatattgtgaatcagaatgtccgagaaaatctgaagacactataccgactgacgatggacctgtgctctaagctcaaggactatgggctgtggcagttatttaggacccttgagctgcctctgattccaattctggctgtcatggagtctcatgcaatccaggtcaacaaagaggaaatggaaaaaaccagcgcattgctaggtgctagacttaaggaactcgagcaggaggcacatttcgtcgcaggagaacgctttctgatcactagcaataatcagctgcgggaaatcctcttcggcaagctgaagcttcacctgctatcccagcgcaattccctcccccgaacaggtttacagaagtacccctcaactagcgaagccgtgctgaatgcactgcgcgaccttcatccccttcccaaaatcatcttggaataccgccaagtacacaaaataaagtccacatttgttgatggcctgctagcctgcatgaaaaaaggcagcatcagctctacatggaatcaaactgggacggtgaccggcagactgtccgccaagcaccccaatattcagggaatctctaagcatcctatccagatcactacgcccaaaaactttaagggcaaagaagacaagatcctgaccatatctccacgtgcgatgttcgtgagttctaagggacacacatttttagcagccgatttctctcagatcgaattaaggattctcactcacttgagcggcgatccggagctgttaaagctgttccaggaatctgaacgcgatgacgtgttttccacgctgacctctcagtggaaagacgttccggtggagcaggtcacacacgccgatcgcgagcaaactaaaaaagtggtctatgcagtggtctatggggcaggtaaagagcgactggccgcttgtctgggcgtcccaatccaagaggctgctcaatttctggaatctttcctgcaaaaatataagaaaattaaagatttcgcccgagcagctattgcccaatgccatcagactgggtgtgtcgttagcataatgggccgtagacgacccctgcctagaatacacgctcatgaccagcagctgcgcgctcaggcggagcgccaagcagtgaactttgtggtacagggcagcgctgccgacctgtgcaagttagctatgatccacgtgttcactgcagtggcagcttctcacaccttgactgccaggttggtggcccagattcacgacgaactcctgtttgaggtggaggacccccagattcctgagtgtgccgcactggtcagacgtacgatggagtcgctggagcaggtgcaagctttggaattacaactgcaagtgcctcttaaagtcagcctctctgccggtcgctcgtggggtcacctggtcccactacaggaagcatgggggccacctcctgggccttgtcggaccgagtcaccaagcaactccctagccgcacctggaagccctgcctctacccagcccccacccctgcacttttctccctccttttgtttatag

SEQ ID NO: 235428 - DNA, 2703 bp, synthetic construct
  misc_feature 1..2703: note = Description of Artificial Sequence: Synthetic coding sequence
  source 1..2703: mol_type = other DNA
atggaaaactatgaggccctcgtggggttcgacctgtgtaatactccactgagcagcgtggcccagaaaatcatgagcgccatgcacagcggagatctcgtggattcaaagacctgggggaagtcaaccgaaaccatggaggtaatcaataaaagtagcgtcaagtattccgtgcaactggaggatcgcaaaacccagtctcctgaaaaaaaggatctcaagtccttgaggagtcagaccagccgaggctctgccaagttgtccccacaatctttcagtgtgaggctgacagaccagctgtccgctgatcagaagcagaagtcaatatcaagtctgacgttgtccagttgtttaattcctcagtacaaccaggaagccagcgtgctccagaagaaggggcacaaaaggaagcacttcctcatggaaaacatcaacaatgagaacaaagggtccatcaatctgaaaaggaagcacattacgtacaataatctgtccgaaaaaaccagcaagcagatggctttagaggaagatactgacgacgccgaaggttatcttaatagtggcaatagcggcgctcttaaaaagcatttttgcgatatacgccacctcgacgactgggcaaaaagccaactgatcgagatgctaaagcaagcggctgccttagtgatcaccgtgatgtacaccgacgggagcacacaactgggagcggaccagacccccgtgtcttctgtcagagggattgtcgtgctcgtgaaacggcaagccgagggcggacacggctgcccagatgctccggcttgtggacctgtgctagaagggttcgtctctgacgatccatgtatttacatacagatcgaacacagcgctatttgggaccaggaacaggaagctcaccagcagttcgcccgaaatgtcctttttcagaccatgaaatgcaagtgtcccgtgatttgtttcaatgccaaagatttcgtgcgaatagttctccagttttttggtaacgacgggagctggaaacatgtagcggatttcatcggactcgatcctaggattgccgcttggctcatcgatccaagcgacgcaaccccgtcttttgaagacctggtagaaaagtactgcgagaagagcataacagtgaaagtgaactctacgtatgggaacagttcaaggaacatcgttaatcagaacgtccgggagaacttgaaaacgctgtaccggctgacaatggatctgtgctccaagctcaaagattatggcttgtggcaacttttcagaactttggaactacccctgatcccgatactagccgtgatggaatctcacgcaatacaggttaacaaggaggagatggaaaagaccagcgccctcctaggcgctaggttaaaagaactggagcaagaggcccactttgtggcaggtgaacggttcctgatcacatccaacaatcagcttcgagaaatcctgttcggaaagctgaagctccaccttctgtcccagcgtaactcactcccacgcactggactgcaaaagtatcccagcacaagtgaggccgtgctgaacgccctacgagacctacacccgctcccaaaaatcatcctcgagtaccgccaggtgcataagattaagagtacattcgttgacggcctgttggcatgtatgaaaaagggatctatctcctctacctggaatcagacagggactgtgactggaagattgagcgccaaacaccctaacatacagggaatcagcaagcacccgatacagataactacgcccaagaactttaagggaaaggaggataagatcttgacaatttccccccgagctatgttcgtttcatcaaaaggacacacgttcttggcagccgacttttcacagatcgagctccggattttaacacatttgtctggtgatcctgaactcctgaagctgtttcaggaatccgagcgagacgatgtcttcagcacactgacatcccagtggaaagacgtcccagtggagcaggtgacgcacgccgatagagagcagacaaaaaaggtggtctacgctgtcgtgtacggcgcaggcaaggagcgccttgctgcatgcctaggcgttcccatccaggaagcagcacaattccttgagtccttcctacagaaatacaagaagattaaagactttgctcgtgccgctatcgcccaatgccaccagaccggatgcgtggtgtctattatggggagaagaaggcctctgccacggatccacgcccacgaccaacaactaagagcccaggccgagcgacaggcagtgaatttcgtcgttcagggctctgccgctgatttgtgcaaactggcgatgatccatgtgtttacagccgtggcagcaagccatactcttaccgccaggctggtggcccaaatccatgatgagctgttgtttgaagtggaagacccacaaatcccagaatgtgcagccctggtccggaggacaatggagtccctggagcaagtgcaggccctggagcttcagctccaggtgccactgaaggtgtcactgtccgccggacggtcttggggtcacctagttcccctgcaggaggcatggggacccccacccggaccctgccgtaccgagtctccatcgaacagtttggcggcacctggcagcccagcatcaacacagccaccacctctccacttttctcctagtttctgcctctag

SEQ ID NO: 235429 - DNA, 3033 bp, synthetic construct
  misc_feature 1..3033: note = Description of Artificial Sequence: Synthetic coding sequence
  source 1..3033: mol_type = other DNA
cgtatggatggcaaaaggcgccctggccctgggcctggagtgcccccaaagagagccagagggggattatgggatgacgacgacgcccctaggccgtctcagttcgaggaagatttagcactgatggaagagatggaggccgagcaccggctacaggagcaggaggaggaggagttgcagtctgtcttagaaggagtggccgatggtcaggtgccacccagcgccattgatccaaggtggctgcggccaactccacctgcgctggatccacagaccgaaccactcatatttcaacagctggaaatagaccactacgtgggccctgcgcaaccagtccctgggggtcctcctcccagccgtggcagcgtgcctgtgctgcgggctttcggcgtgacagacgagggcttcagcgtctgttgtcacattcacgggtttgctccctacttttacacccccgcaccccctggatttggaccagagcatatgggcgatttgcagcgggaactgaacctggcaatttcccgggattcacggggtggcagggagctgactggcccagcggtgctcgccgtggaactctgtagccgagaatcaatgtttggctaccacggccacggaccatccccctttctgcgcatcacagtcgcactgccacgactcgtcgcccctgctcgcagactcctagagcaggggatacgcgtagccggtcttggaacgccctcttttgccccttatgaggctaacgtagatttcgagattcgatttatggttgacaccgacatcgtggggtgtaactggctggaactgcctgcaggtaagtatgcactaaggttgaaggagaaagcaacacagtgtcagttggaagctgatgtgctgtggtctgacgtggtctcacaccctccggaggggccttggcaacggattgctccactgcgagttctgtcattcgacattgaatgcgccggaaggaaaggaatctttccggagcctgagagggatccggttattcagatttgctccctcggacttcgctggggagaaccggagccattcctaaggcttgcgttgacactccggccatgtgcaccaattttgggcgctaaagtccaatcttacgagaaggaagaagatctgctgcaagcttggagcacattcatccgtattatggaccctgatgtgattacgggctacaacatacaaaactttgaccttccttatctgatcagtcgagctcagactctgaaagtccaaactttcccttttctgggtagggtcgctggcctttgctcaaacatcagggatagttcttttcaatctaagcaaactggcagacgagacacaaaggtagtgtctatggtcggacgggtccaaatggacatgctgcaggtattgctcagagagtataaactgcgaagctacactttgaacgccgtctcattccactttctgggggagcagaaggaggatgtacaacacagtatcatcaccgacttgcagaatggcaacgaccagacgaggcgacgcttagccgtgtactgtttaaaggacgcctatctgcctctacgacttctcgagcgtctgatggtactggtcaatgccgtggaaatggcccgagttaccggcgtgccactatcttacctcttgtctcgaggtcagcaggtgaaggtggtatcccaactactcaggcaggccatgcacgagggactgctgatgcccgtagtgaagtccgaggggggtgaggactataccggagcaaccgtcatcgagccactcaaaggttattatgacgtgcctatcgccacgttggatttctcatcactatatcctagcattatgatggcccacaacctctgttacactacactactgagaccgggtacagcccagaagctggggttaaccgaggaccagtttatccggaccccgaccggcgacgaatttgtaaaaacttcggtgagaaagggcttgctcccacagatactcgaaaacctgctgagtgccagaaaacgcgctaaggctgaactcgcaaaagagactgatccattgaggaggcaagttcttgacggtcgccaattggccctcaaggtgtcagcgaatagcgtgtacggcttcacaggggctcaggttggtaaacttccttgtttggaaatcagtcaaagcgtcactggctttggcagacagatgatcgagaagaccaagcagctggtcgagtccaaatacaccgtcgaaaacgggtactcaacttcagccaaggtcgtctatggagataccgattcagtgatgtgtcggtttggcgtcagctccgttgccgaggccatggccctcggcagggaggcagctgattgggtgtccggccactttccttctccaatacggctcgagttcgaaaaagtttatttcccatacctcttaatctcgaaaaagcgctacgccggtctgttgttcagcagtcggccagatgcacacgaccggatggattgcaagggcttagaggcagttagacgagataattgtccattggtcgccaatcttgttacggctagcctccgcaggctgctcatcgaccgcgatcctgagggggcagtcgcccacgcacaggacgtgatatcagatctgctctgtaacaggatcgacatatctcagctggtgattactaaggagctcactagggccgcttcagattatgccggaaaacaagcacatgttgagttagccgagagaacacgctgctcctgttggtcgaccgcatgtcctctgacacgctctacaacttggtcatcatcctggccaagcccctcctgtgctagtagttcaccgtcttgggctagggccgtcccacggctctgctattgtggcggtaccacgagggccgctcgacgatgcagtcgcgcaaggtgggcggcttcctggccctctccaaacgccgcaaccgccgcactcgcggctgcacagtgttcagcgaccagggagccctgcgttagctcggctagtcctggatctttatcatgcattagacggcgttaccctatatag

SEQ ID NO: 235430 - DNA, 3324 bp, synthetic construct
  misc_feature 1..3324: note = Description of Artificial Sequence: Synthetic coding sequence
  source 1..3324: mol_type = other DNA
atggatggaaagaggagaccagggcctgggccaggggtccctcccaaacgggctcggggagggttatgggatgacgacgacgcacctcgcccaagtcagttcgaagaggatctagctctgatggaggaaatggaggctgaacatcgcctgcaggagcaggaggaagaggagttgcaatcggttcttgaaggcgtggccgacgggcaggtgcccccatcagccatcgatcccagatggctgcggcctaccccacctgcgttagatccacagactgagcccctgatctttcaacagctcgagattgatcactacgtgggtcccgctcagcctgtccctggtgggccacctcccagccgaggtagcgtccctgtgttgagagcattcggcgtcaccgacgaaggatttagtgtttgttgtcatattcatggctttgcaccttatttttacacgccagcccctccaggctttggccctgagcacatgggcgacttacagagagaactcaacctggccataagccgtgacagccggggtggccgagagctgaccgggccagcagttctcgcggtcgaactgtgttctcgggagagtatgtttgggtatcacggtcacggtcccagcccattcctccgcataacagtcgcccttcccagattggtggccccagcccgtcgacttctggaacagggcatcagagttgccggactgggcacaccaagcttcgctccctacgaggccaacgtagattttgaaattcggtttatggtggataccgatatcgtaggatgtaactggcttgagctccctgctggaaaatacgctctgagacttaaagagaaggcgactcagtgtcaattagaggcggatgttctctggtcggacgttgtgtcacatccacctgaaggaccttggcagcgcatcgcacctctgcgcgttctgtcctttgacattgagtgtgccggaagaaagggtatatttccagagcctgagagggatcccgttatccagatttgttcccttggccttagatggggcgaaccagaaccctttctgagactggccttgacactgcggccatgcgcaccaattctgggtgcaaaggtccagtcttatgaaaaagaagaagatctgctgcaggcttggtccacctttatacgcatcatggatcccgacgtgataactggatataacatccagaatttcgaccttccttatctgatatccagggctcagaccctgaaagtccagacatttccatttctgggccgagtggctggcctttgctcaaatatacgcgattcgtcctttcagtcaaagcaaaccggtaggagggacaccaaggtggtctcaatggtgggtcgggtgcagatggatatgctgcaagtgctgctgcgagaatacaaacttaggagttacaccctgaacgctgttagcttccactttctaggcgagcagaaggaggatgtccaacattcaatcattacggatctgcagaacggaaatgatcaaacccgtcggagactcgctgtgtattgcctgaaggatgcgtacctccctctgcgcctgttagagcgtttgatggttctagtcaatgccgtcgagatggcaagagtcaccggtgtgcccctttcatatctgctgtccagagggcagcaggtaaaagtcgtgtcccaactcctaagacaggcgatgcacgaagggctgctgatgccagtggtgaaaagcgaaggcggagaagactatacaggagctacagttatcgagcctctgaaaggctactacgacgttccaatcgctaccctcgacttttccagtctttatccatccatcatgatggcacacaacctgtgctatactactctgttgcgccctgggacagcccagaaattggggctgactgaggatcaattcatcagaacccctacgggcgatgagtttgttaagactagtgtacggaagggccttttgcctcagatcctggaaaaccttctcagcgctcgaaagagagcaaaagcggaattggcaaaggagaccgatccattacgacgtcaggtgctcgatggcaggcagctcgccctaaaagtgagcgctaactctgtgtatgggtttacaggggcacaggtaggcaaacttccttgtctggaaatctcacagagcgtcaccggctttgggcgacagatgattgaaaaaactaaacagctggtggagagcaaatataccgtcgagaatggctacagtacctccgccaaggtggtgtatggggacacagatagcgtaatgtgtcgctttggtgtgagtagtgtcgccgaagcaatggcccttgggagagaagcggctgattgggtgagtgggcatttcccctcgcccattaggctggagtttgagaaagtctattttccgtatttgctcatatctaagaaacgctatgcaggactgctgttctcaagtcggccagatgctcacgataggatggactgtaagggcctcgaggccgtgaggcgcgacaactgccccctggtggccaatctggttaccgcgtctttacgacgcttgttgatcgatcgggatcccgagggtgctgtggcccacgcccaggatgttatttctgatctcctctgcaaccggatcgatattagccaactcgttatcacgaaagagttaacacgcgcagcttcagattatgctggaaaacaggctcatgttgagctggccgagcggatgcgcaaacgcgatcctggatcggctccttctctgggggatcgggtaccatacgtgattatttcagctgccaagggtgtggccgcttatatgaagtcagaagatcccctgtttgtattggaacacagtctacctatcgatacccagtactacctggagcagcagctggctaagcccctgctgaggatctttgagccaattctgggggaaggcagggctgaggcggttctgttacgtggcgatcacacccggtgcaaaaccgtcttgaccggcaaggtaggaggcctgctcgcatttgcgaaaaggcgaaactgttgcatcggctgtaggaccgtattgtcccaccagggagctgtgtgcgagttctgccaaccacgggagtccgaactgtaccagaaagaggttagccaccttaatgcgttagaggagagattctctagactgtggacgcagtgtcagcgttgccaggggagtttgcatgaggatgtgatctgcacatctcgggactgccccatattttatatgcgtaagaaagtgcgtaaagatctcgaggaccaggagcagctcttgcgcaggtttggaccacctggaccggaagcatggtag

SEQ ID NO: 235431 - DNA, 1410 bp, synthetic construct
  misc_feature 1..1410: note = Description of Artificial Sequence: Synthetic coding sequence
  source 1..1410: mol_type = other DNA
atgttcagcgagcaagcggctcagagagcccatacgctcctttcccctccatccgctaataatgctacttttgccagagttccggttgccacctatactaactcaagccagccattcaggctaggtgagaggtcctttagcaggcagtacgcacatatttacgctactcgcctcatccagatgcggccattcttggagaacagagcacagcagcactggggatccggcgtgggcgtcaaaaagctgtgcgaactgcaacccgaagaaaagtgttgcgtggttgggacactcttcaaggcgatgccgctgcagcctagtatcctccgggaagtcagtgaagagcataacctgctgccccaacctccacggagtaagtacatccatccggacgatgagcttgttctcgaggatgagcttcagagaataaaacttaaagggaccatagatgtatctaagctggtcacagggacagttctcgcagtgttcggttccgtgcgagatgacggtaagtttctcgtcgaggattactgcttcgccgacctggcacctcaaaaaccggctccccctctggacacagacaggtttgtgctgctggtatcaggtttgggcctgggcggaggcggtggggaatccctgctgggcacacagcttctagtagatgttgtgaccggacagcttggagatgagggcgagcaatgtagcgctgcccatgtctccagagtgatcctcgctggtaatttactgtctcatagcactcagagccgcgattcgataaataaagccaagtaccttaccaaaaaaacccaggccgcatcagttgaggctgtgaaaatgctggacgaaatcctgctgcagctgtccgcctctgtgcccgtcgacgtgatgcctggcgaattcgaccccactaactatactctgcctcaacaacctctgcatccctgtatgtttcctctagctactgcctatagcaccctgcagcttgtcaccaacccttatcaagccactatcgacggcgtccgattcctgggaacaagcgggcagaatgtctctgacatttttcggtacagtagcatggaggaccatctggaaattcttgagtggacacttagagtcagacacatctctccaacggccccagataccctaggatgctaccccttctacaaaacggatcccttcatctttccagagtgtccacatgtgtacttctgtggcaacacaccctccttcggctcgaaaatcattagggggccagaggaccagactgtgctgctggtcacggttcccgattttagcgctacgcagacagcttgcctcgtgaacctccgaagtctggcatgccagcctatttcattcagtggtttcggtgcggaggacgacgatctcgggggactcggccttggcccatag

SEQ ID NO: 235432 - DNA, 447 bp, synthetic construct
  misc_feature 1..447: note = Description of Artificial Sequence: Synthetic coding sequence
  source 1..447: mol_type = other DNA
atgttcagtgagcaggctgcccagagagcgcatactctactgtcaccgcctagtgctaataatgcgacgttcgcaagggttcccgtggctacctacaccaattcatcccaaccctttagacttggggagcgaagcttcagccggcagtatgctcacatttatgccaccaggctgattcagatgcgaccctttctcgagaatcgagcccagcagcattgggggtcaggagtaggagtgaagaaactttgtgagctacagcccgaggagaagtgctgtgttgttgggactctgtttaaggccatgcccctgcagccctccatcttacgtgaggtttccgaagagcataacctcttgcctcagccacctcgatccaagtacatacaccccgatgacgagctggtcctggaggatgaactacagcgaatcaagctgaagggcacaatctag

SEQ ID NO: 235433 - DNA, 663 bp, synthetic construct
  misc_feature 1..663: note = Description of Artificial Sequence: Synthetic coding sequence
  source 1..663: mol_type = other DNA
atgttttcagaacaggcagcgcagagggcacacactctcctgtctccaccttcggccaataacgcgacattcgctcgcgttccagtggccacctatactaattcttcccagccttttagactcggcgaacggtcatttagccgacagtatgcacatatctacgcaactaggttgatccagatgaggccatttctggagaaccgagcccagcaacactggggctctggtgtgggagttaaaaaattgtgtgagctgcagccagaagagaaatgttgcgttgtgggtacactgtttaaagctatgcccttgcaaccatctatactgcgggaggtgtctgaggagcataatttactgcctcagccccctcgctccaagtacattcacccggacgacgagttggtgctggaggacgagttgcaacgcattaagctgaaggggactatcgacgtgtcaaagctcgtaaccggcaccgtcctagccgtatttggctctgttcgtgatgatggtaagttcctggtggaggactattgctttgcagacctcgctccgcaaaagccagcccctcccttagacaccgaccgattcgttctactggttagtggcttagggctggggggagggggaggagaatccctattggggacacagttgctggtcgattag

SEQ ID NO: 235434 - DNA, 1410 bp, synthetic construct
  misc_feature 1..1410: note = Description of Artificial Sequence: Synthetic coding sequence
  source 1..1410: mol_type = other DNA
atgttttctgagcaggcagcccagagggcacacactctcctgtcccctccgagcgccaacaacgcaacgttcgccagggttcctgtcgctacttatactaattcatctcagcctttcaggctcggtgaaaggagcttctcacgacagtacgctcacatttacgccactcggctcatccagatgcgaccctttctggagaatcgggctcagcagcactggggtagtggcgtgggggttaagaaactctgcgaacttcaaccagaagaaaaatgctgtgtggtcggtactctcttcaaggccatgccccttcagccatccattctgagggaagttagcgaggaacataaccttctcccccagccccctcgatcaaagtacattcatcccgacgatgaattggtgttggaagatgaactgcagcgcattaaactgaaaggcaccatcgacgtgtcgaagttggtgacgggtacagtactggcagtgtttgggtccgtccgggacgatggcaaatttttggtggaagattactgcttcgcggatctggctccccagaaacctgcgccacctctagatacagacagattcgtgctgctagtgtcaggactcgggttggggggtggtggcggtgagagcctccttggtacccagctgttggtcgatgttgtgacgggccagctcggcgatgagggggagcagtgcagcgcggctcatgtatctcgggtgatcctcgccggaaatcttttgtcccattcaacccagagccgggactccatcaacaaagcgaaatacttgaccaaaaaaacacaagctgccagcgtcgaagccgtcaagatgttagacgaaatcctcctacagctgagcgcaagcgtgccagtggacgtcatgcctggtgaatttgaccctacgaattacaccctgccccaacagccactgcacccatgcatgttccccttagctacggcgtactcaactctccagttagtgaccaacccataccaggctaccatcgacggggtgagattccttggcacttctggacagaatgtttcggacatcttccggtatagtagtatggaggaccaccttgaaattcttgagtggaccttgcgcgtcaggcacatctcacccacagccccagacacactcggctgttacccattttataaaaccgatcccttcattttcccggaatgccctcatgtgtacttttgcggtaatacacctagctttgggtccaaaattattcgtggtcccgaggatcaaaccgtccttctggtgaccgtgcctgatttctcagccacacagacggcctgtcttgtaaatctgagaagcttggcatgccagcccatctctttcagcgggttcggcgctgaagacgatgatcttggcggactgggtttgggtccctag

SEQ ID NO: 235435 - DNA, 468 bp, synthetic construct
  misc_feature 1..468: note = Description of Artificial Sequence: Synthetic coding sequence
  source 1..468: mol_type = other DNA
atgttcagcgagcaggccgcacaacgcgcacacactctccttagccccccatcagctaataacgccaccttcgcacgcgtgccagtcgctacctacactaacagcagtcaaccttttcgcttaggagaaagaagtttctcacggcagtatgctcacatttacgccacgcggttaatccagatgcggccatttctggaaaacagggcacaacagcattggggctctggggtaggtgtgaaaaaactgtgcgagctacagcccgaggaaaagtgttgtgtggtaggaactctgtttaaggccatgcccctgcaaccgtctatactgagagaagtgtctgaggaacataaccttctgccacagcctcctcgcagtaagtatatacaccctgatgacgagctcgttttggaggatgaattacaacgcatcaagctgaagggaaccattgatgtgagcaaactggtgacctag

SEQ ID NO: 235436 - DNA, 771 bp, synthetic construct
  misc_feature 1..771: note = Description of Artificial Sequence: Synthetic coding sequence
  source 1..771: mol_type = other DNA
atgtttccagtgctgccaggctctcatttgctgctgaataaccctgcacttgaatttattaaatacgtgtgcaaagttttaagcttggatacaaatatcaccaaccaggtgaataagttgaatcgggatctgctgaggcttgtggacgtgggagagttttctgaggaggcacaattccgcgacccctgtaggagctacgtgcttcccgaggtgatctgtaggtcttgcaacttctgtcgggatctggatctttgtaaagattcttcattctcagaagacggggctgttttaccccagtggctctgttctaattgccaggctccttacgatagcagtgcgatcgaaatgaccttggtcgaggtactgcagaagaaactaatggcttttacccttcaggacttgaaagaggcagatacccccaaatgcgaggagaaggagagacgaaagagagagctgcattcttccgctacaggaagatcctgtcgcggtgccagtgaacagcgcttgggcgatgcaccctcttgcagagtcgtggtacacggggtgcaagcttgtaggatggaaggtgtctgtctcaagtgccgtggcgtgaaagagaccagcatgccagtttattgcagttgcgcgggagacttcgccctgaccattcacactcaggtttttatggaacagatcggcatcttcaggaacatcgctcaacactatggaatgtcctatctactcgaaacactagagtggctgttgcagaaaaatccccagttgggccactag

SEQ ID NO: 235437 - DNA, 6860 bp, synthetic construct
  misc_feature 1..6860: note = Description of Artificial Sequence: Synthetic coding sequence
  source 1..6860: mol_type = other DNA
atgagcctgcgctcaggtggacgacgcagggccgatccaggtgcagacggggaggcctcccgcgatgacggcgctaccagttccgtgagcgctctgaagcgactagagcgttcccagtggaccgacaagatggatctgaggtttggctttgagcggttgaaagagcccggtgagaaaaccgggtggttgattaacatgcatccgaccgagattctagatgaggataagagactcggtagcgctgttgattactacttcattcaagatgacggtagtcggtttaaagtggccctcccatacaagccgtatttttacatagctactagaaaaggctgtgagagagaggtgtcgtcattcctttctaagaaatttcaaggcaaaattgccaaggttgagacagtacctaaggaggacctagatcttcccaaccacctcgtcggcttgaagcggaactatatccgcttaagtttccataccgtggaggacctggttaaggtgagaaaagagataagtccggctgtaaaaaagaaccgagagcaggatcacgcatcggacgcttataccgccctgctgtcttctgtcctgcagcggggaggggtgatcaccgacgaggaggaaaccagcaaaaagattgccgaccagcttgacaacatcgtggatatgcgggaatacgacgtaccgtatcacattcgcttgagtatcgatctgaagatccatgtcgcacattggtacaatgttagataccgaggaaatgcttttcccgttgagattactcgcagagacgatctcgtggaacgcccagaccccgttgtgctggcgttcgatatcgagaccacgaagctgccccttaagtttccagatgcagagactgatcagatcatgatgatatcttacatgattgatggccagggctacctcatcactaaccgcgagattgtatccgaagatatcgaggacttcgaattcaccccgaaacctgaatatgagggaccattctgtgtgttcaatgaacctgacgaagcacatctcatccagaggtggttcgaacatgtacaggagaccaaacccactattatggtgacctacaatggagatttcttcgattggccgttcgtggaggcgcgtgccgcagtacatggattatctatgcagcaggaaataggcttccagaaggattctcagggtgagtataaagcaccccagtgcattcatatggattgcttgcgctgggtgaagcgggatagttaccttccagtgggctcccacaacctcaaagctgctgctaaagcgaaactgggatatgatcctgtagaattagatcctgaggacatgtgcagaatggccacagagcaacctcagactctggcaacctactccgtttccgatgccgtcgctacgtactatctgtacatgaagtacgtgcacccttttatcttcgcattatgtacaatcatcccgatggagccggacgaagtcctgagaaaagggagcggcacattgtgtgaggccctcttaatggtgcaagctttccatgcaaatatcatcttccctaacaaacaagagcaagagttcaacaagttaaccgatgatggtcatgtgcttgattccgaaacctatgtcgggggacatgtggaagcactcgagagtggggtttttcgcagcgacattccgtgtcgttttcgcatgaatccagctgcctttgactttctccttcagcgggttgagaagacattgcgtcatgctctggaggaggaggaaaaggtgcctgttgaacaggtgacgaatttcgaagaagtctgtgatgagattaagtctaaacttgcctcccttaaggacgtgccttctcgaattgaatgcccactgatctatcatctggacgtcggggcaatgtaccccaatataatcctcactaacaggctgcagccatcagccatggttgacgaagctacttgcgctgcctgcgatttcaataagcccggtgccaattgccagcgaaaaatggcgtggcaatggagaggcgaatttatgccggcttctcggagcgagtaccatcgtattcaacaccaactcgaaagcgagaagttcccgccactgttccccgaaggcccagctcgggcattccacgaactgagcagggaggagcaagcgaagtacgagaagcggagactggccgattactgccgaaaagcatataagaagatccacattaccaaggtcgaagagcgccttactaccatctgccagagggagaactctttttacgtcgataccgttcgggctttccgcgaccgtcggtacgaattcaagggattgcacaaagtctggaaaaaaaaactcagtgctgccgttgaagtcggagatgcagccgaggtgaaaagatgcaaaaatatggaagtgctgtacgactccctgcagcttgcacacaaatgtattctgaattcattctatgggtacgtgatgaggaagggagctagatggtatagcatggaaatggctgggatcgtttgtttcaccggggctaacatcattacgcaggctagagagcttattgaacaaatagggcgacccctggagctcgataccgatggcatctggtgcgtgctccctaattcgtttcctgagaattttgtgttcaagaccacaaatgttaagaaaccaaaagtcaccatttcttaccctggcgcaatgcttaatattatggtcaaggaagggttcacaaacgaccagtaccaggagctcgccgaaccctccagcttgacttacgtgacaagatctgagaacagcatcttttttgaggttgatggaccttaccttgctatgattctcccagccagcaaggaagaagggaagaagctcaagaaacgttacgcagtttttaatgaggatggatcactggcagaactgaaaggattcgaggtgaagcgtcgcggtgaattgcaactgatcaagatcttccagtcctctgtgtttgaagcctttcttaagggaagcacgctggaagaggtttatgggtctgtggctaaagtcgccgattattggttggatgttctgtattcaaaagcggctaacatgccggatagcgagctctttgaactaatctccgaaaacaggtccatgtcacgtaagttagaagattacggggaacagaaatcaacatccatcagcactgcgaaaagactcgctgagtttctgggtgaccagatggtgaaggatgccggactgtcgtgcaggtacattatctccagaaagcctgagggctctcccgtgactgagcgggctatacctctggcgattttccaagcagagcctactgtgagaaagcactttctgcggaaatggctgaagtcttcctctcttcaagatttcgacatcagagcaatcttagattgggactattacatcgagaggctgggctccgccatccagaagattatcaccatcccggctgcactacagcaggtcaaaaatcctgtgcctcgggtaaaacacccggattggctgcacaagaagctgttggaaaaaaatgatgtgtataagcaaaagaagatttcagagctgttcacgctcgaagggaggcgccaggtgactatggctgaggccagcgaggattccccacggccttcagccccagacatggaggacttcggtctggtgaagttaccccatcctgcggctccagtgaccgtgaaacgcaaaagagtgctgtgggagagccaagaagaatcccaggatcttacgccaactgtcccttggcaggaaatattaggccaaccacctgcattaggcacatcacaggaggaatggctggtctggctcaggtttcacaaaaagaaatggcagcttcaagcccgacagaggctggctcggagaaaaagacagcgactggaatccgccgaaggagttctgcgacccggagcaatacgcgacggccctgctacaggactggggagcttcctgcgccgtacagcccgatcaattctggaccttccatggcagatcgttcagatctctgagacctcccaggccggactgtttcgactttgggccctggtcgggagcgatttgcattgtataaggctctctatcccacgggtgttctacgtcaaccaacgcgtggccaaggccgaggaaggagcttcttaccgaaaagtgaatcgagtgttacctaggtccaacatggtttataatctgtatgaatattctgtacctgaggacatgtatcaggaacatattaacgaaatcaatgccgagctctccgcccctgatatagaaggcgtgtacgaaacccaggtgcccctgttatttcgggcactggttcacttagggtgcgtctgcgtggtgaacaaacagctagtaagacacctctctggatgggaagcggaaacatttgcactggaacacctcgagatgcgcagcctggctcagttttcatacctggaacctggatctatccgccacatttacctatatcaccacgcccaggcccataaggctctattcggaatattcatcccaagtcaacgaagggcctctgtctttgtgctcgatacggtgaggtctaatcagatgcctagcctgggtgcactgtactcagccgagcacgggctgttgttggaaaaagtcgggcctgagctgctcccgccacccaaacacacgttcgaggtccgggctgagacagacctcaagaccatctgccgggctattcaaagatttctgctagcgtataaggaggagcggagaggtcctactctcatcgcagtgcagtcctcctgggagctcaaacgtcttgctagcgagatccctgtactggaagagtttcctctcgtcccgatatgcgttgccgataagatcaattatggcgtcctagattggcaacgccatggcgctcggcgaatgatccgccactacctcaatcttgacacctgccttagccaggcctttgaaatgtccagatatttccacatacctatcggaaatcttcccgaggatatctctacctttggttctgatctcttcttcgccagacatctgcagaggcacaatcatctcttatggctgagcccgactgcaagaccagacctagggggaaaagaagccgacgacaactgtctcgtgatggagtttgatgaccaggcaacggttgaaataaacagctcaggctgctactctaccgtatgcgttgaacttgatctgcagaacctggccgttaatactatactgcagtctcaccatgtgaatgatatggagggggcagactctatgggaatcagcttcgatgtgatccagcaggcctctttggaggatatgattactggcggacaggctgctagcgcccctgccagctatgacgagactgctctctgctctaacacgtttcgaatcctcaagagtatggtcgtcggatgggtgaaggaaatcacacagtatcacaatatttatgccgacaatcaagtcatgcacttttaccggtggctccggtcgccatccagtctgcttcacgaccctgcactccaccgtacgctgcataacatgatgaagaaactgttcttgcagctcattgccgagttcaagaggctcggctctagcgtcatctacgcaaatttcaacagaatcattctctgtaccaagaaacggagagtggaggatgctattgcctacgtggaatacattacaagctccatccattctaaagagacattccattcacttaccatttctttcagcaggtgttgggagttcttgttatggatggaccctagcaactacggtggcatcaaaggaaaggtgtcaagccggatccactgtggcctgcaggactcccagaaggctggcggagccgaggacgagcaagaaaatgaggacgacgaggaggagagagacggggaagaggaggaggaggccgaagagagcaatgtggaggacctcctcgagaataattggaacatacttcaattcctgccccaggcggcatcctgtcagaattattttcttatgatcgtctcagcctacattgtggccgtgtaccattgcatgaaagatgggctgcggcgaagtgctcctgggagtaccccagtgagacggcgaggcgcttctcagctctctcaggaggcagagggagccgtgggagcgcttccgggaatgatcaccttttctcaggattatgtcgccaatgagctgactcagagctttttcaccattactcagaagatacagaagaaagttactggcagcaggaatagtacggagctgagcgaaatgttccctgtcttgcctggaagtcatttgctgttaaataacccagctctcgagtttattaagtatgtgtgtaaggtgctgagcctggatacaaacattactaatcaggttaataaattaaaccgggacctgctgaggctggtggatgtgggcgagttttctgaggaagcccagtttcgcgatccatgccgctcttatgtgttgcccgaggtgatctgcaggagttgcaacttctgtcgggatctcgacctgtgcaaagattcttcttttagcgaggatggcgcagtactcccccagtggctatgtagcaattgtcaggcaccctatgactcatcagcgattgaaatgactctggtcgaggtccttcaaaaaaaactcatggcctttaccctgcaagacttggtgtgcctgaaatgtcggggtgtaaaggagacttctatgccagtgtattgttcttgcgccggtgacttcgcactgaccatccatacgcaggtattcatggagcagattgggatctttaggaacatagcacaacactatgggatgtcctacctcttggagactctcgagtggctgctgcagaaaaaccctcagctgggacacta

SEQ ID NO: 235438 - DNA, 3330 bp, synthetic construct
  misc_feature 1..3330: note = Description of Artificial Sequence: Synthetic coding sequence
  source 1..3330: mol_type = other DNA
atgcacccgacagagatactggacgaagacaaacggctgggctccgccgtcgactactattttattcaggacgatggtagtagattcaaagtggccctgccctacaagccttacttctatatcgccactaggaaagggtgcgaacgtgaggtctcctccttcctgagcaagaagtttcagggcaagatcgctaaggtagaaacagtcccaaaagaggatcttgatctacctaatcacctagtgggcctgaaacgaaattacatcaggctcagcttccacacagtcgaggatctcgttaaggttagaaaggagattagtcccgctgtgaaaaagaatagggaacaggaccacgcttctgacgcgtataccgcgctactctccagcgtcctgcagaggggtggtgtcattaccgacgaagaagagacgagtaagaagatcgcggatcagcttgataatatagtggacatgagagagtacgatgttccctaccacatacggttgagcatcgacctcaaaatacatgtggcccactggtacaacgtgcgctacagaggaaatgcttttcctgtggagatcaccaggcgagacgacctcgtggagagacccgatcctgtcgttctggccttcgatatcgaaactaccaagctacctctcaagttcccagacgccgagacagaccagatcatgatgatcagttatatgatcgatggccagggttacttgatcaccaatcgggagatagttagcgaggatattgaggattttgagttcacaccaaaacccgaatacgaggggcctttttgtgtcttcaacgagcctgacgaggctcacttgattcagcgttggtttgagcatgtgcaggaaactaagcctactattatggttacttacaacggtgacttcttcgactggcccttcgtcgaggccagggcggctgtgcacgggttgtccatgcagcaggagatcggttttcaaaaagacagtcaaggtgagtataaagctccccagtgtattcatatggactgtttgaggtgggtgaagcgtgactcctacctccccgttggctctcataaccttaaagccgctgctaaagccaaattaggttatgaccccgtggaactggacccggaggacatgtgtaggatggcaacagagcaaccacagacattagcaacctactcggttagcgacgcggtggctacctattacctgtacatgaaatatgtccacccattcatctttgccctgtgcacgattattccaatggagcccgacgaggtcctaagaaaggggagcggcaccctctgtgaggcgctgttaatggttcaggcatttcatgccaacatcatctttcctaataagcaggagcaagagtttaacaagctgacagacgatggccacgttcttgactctgaaacatacgtgggtggtcatgtggaagccctggagtccggggtgttccgtagcgacattccttgcagattccggatgaaccccgcagcatttgatttcctgttacagcgtgtggagaagacgctacggcacgctctggaggaggaggagaaggtgcccgtggaacaagtaaccaacttcgaagaagtctgcgatgaaatcaagtctaaactggcctccttgaaggatgtgcctagtagaatcgagtgtccgctaatttaccacttagacgtgggagccatgtatccaaatataatcctgaccaataggttgcaaccgagtgctatggtggacgaggccacatgcgctgcatgcgactttaacaagcccggagccaactgccaaagaaagatggcgtggcaatggcgtggggagttcatgcccgcttcgaggagcgagtaccatagaatccagcaccagctggagtccgaaaagttcccacctttattccccgaaggaccggcaagagctttccatgagctgagtcgtgaagaacaggcgaagtatgagaaacggagattggcagactactgcaggaaggcttataagaagattcatatcacgaaggttgaggaaaggttgacaacaatctgtcagagagagaactcattctacgtcgacacagtgcgcgcatttagagacagacggtatgaattcaaaggattgcacaaggtttggaaaaaaaagttgagcgccgctgtagaagtgggtgatgccgcagaagtgaaacgctgcaaaaacatggaggttctatatgacagcctgcaactcgcccacaaatgcattcttaactccttctacggatatgtgatgcggaagggggcacggtggtactctatggagatggccggtatcgtctgttttaccggcgcaaacatcatcacgcaggctagggagctgattgagcagattggacgccctttggaactcgacacggatggtatttggtgcgtccttcccaattcctttccagagaactttgtattcaaaaccaccaatgtcaaaaagccgaaggtgaccatctcatacccaggcgcaatgctaaacataatggttaaagaagggtttacgaatgatcagtaccaggaactggccgaaccatcctcacttacttacgtgacgcgctccgagaattcaatctttttcgaagtggatggaccgtacctggcgatgatactaccggcatcaaaagaagaggggaaaaagctgaaaaaacggtatgccgttttcaacgaagacggttcattggccgagctgaaaggctttgaggtgaaaaggcgcggagaactccagctcatcaaaatcttccagtcttccgtgtttgaggcattcctcaaaggcagcacactggaggaagtgtatggcagtgtggccaaggtggccgattattggctggacgtgctgtattccaaagcggctaacatgccagactcagagctattcgaactgatctcagagaaccgaagtatgtctagaaagctggaggactatggcgaacagaaatctacaagcatcagcacagcgaagcgcctggcagagtttctcggggaccagatggtcaaggacgctggcctcagctgtaggtacattatatcccgcaagcccgaaggaagccctgtgaccgaacgggcaatcccattagccatcttccaggcggaacccactgtgcgtaagcacttccttcgaaaatggctgaagtcctcgtctctccaggacttcgacataagggctattctggactgggactactacattgaaaggctgggtagtgcgatccagaaaatcatcactatccctgctgcacttcaacaggttaaaaacccagtgcctcgtgtcaagcacccagattggttacacaaaaccgccggagaggaatag

SEQ ID NO: 235439 - DNA, 1491 bp, synthetic construct
  misc_feature 1..1491: note = Description of Artificial Sequence: Synthetic coding sequence
  source 1..1491: mol_type = other DNA
atggagggcatccttaaaagcatggtcgtgggatgggtgaaagagatcacccagtatcataatatttatgctgataaccaggtgatgcatttttaccgttggctgcgctcccccagcagtttgctgcatgaccccgctctacaccgtactctgcacaacatgatgaaaaagttattcctgcaactcatcgcagagttcaaacgacttggatcctctgtgatttacgctaacttcaatcggattatcttatgcactaaaaagaggcgtgtagaagacgcaatcgcgtacgtggagtacatcacctcaagtattcacagcaaagaaacatttcattctctgacaatttctttttccagatgctgggagtttttgctctggatggatccttcaaactacgggggtattaagggaaaggtgtctagtcgaatccactgtggcctccaggattcccagaaggcgggtggagcagaagatgaacaggagaatgaggacgacgaagaagagagagatggagaagaagaggaggaggcggaagaatccaacgtggaggatcttttagaaaacaattggaatattctgcagtttctgcctcaggccgcatcttgtcaaaattactttttgatgatagtctctgcctatatcgttgcagtgtatcactgtatgaaggacggcctgcgtagaagtgctccaggctcgaccccggtccgaagacgtggagcaagccagttgtcgcaggaggctgaaggcgctgtgggggctctccccggtatgatcactttttctcaggattatgttgccaacgagctgactcaatcatttttcactatcacccagaagatccagaaaaaagttacaggctctcgcaactcaacggaactcagtgagatgttccctgtcctccctggcagtcacctcctgttaaacaatcccgcactggagtttatcaagtatgtgtgtaaagtgctatcactagataccaatattacaaatcaggtgaacaagctgaatagggatctcctacgcttagttgatgttggagagttcagtgaagaagcccagttccgtgatccctgccggtcatacgtgctgccagaggtcatttgccgcagttgtaacttctgtagggatctggacctttgcaaggattccagcttttcagaggacggcgctgtgctgccacagtggctctgtagcaattgccaagccccttatgactcatcagccatcgagatgacactggtggaggtcctgcagaaaaaactgatggcgttcaccctacaagacttagtctgcctcaagtgcaggggcgtgaaggaaacgtcaatgccggtatactgctcttgtgcaggtgactttgccctgaccattcatacgcaggtgtttatggaacaaattggtatttttcgaaatatcgctcagcattatggcatgagctacctattagaaaccttggaatggcttttgcaaaagaatcctcaactgggacattag

SEQ ID NO: 235440 - DNA, 6893 bp, synthetic construct
  misc_feature 1..6893: note = Description of Artificial Sequence: Synthetic coding sequence
  source 1..6893: mol_type = other DNA
atgtccagacctctgggccttaaaagctttccccgacacaagcaggcccctctgcctttatctctcacctttcacggctgccttctattaagacgtgatgacggtgcaactagctcagtgtctgccctgaaaagactggagcgtagccagtggaccgataaaatggacttaagatttggcttcgaacgcctgaaagaacccggtgaaaaaactggttggcttataaacatgcatccgaccgagatcttggatgaggataagcggctcggaagcgcagttgattattattttatccaagacgatggttcacggttcaaggtggcactgccatacaaaccttatttctatatcgcaacaaggaagggttgtgagcgagaggtctcaagctttctttcgaagaaattccagggaaagatcgcaaaggtcgaaactgtgccaaaggaagatcttgacctccctaaccatctagtggggctcaagaggaattacattcgcctgagcttccataccgttgaggaccttgtgaaggtacgtaaggaaatttctcccgcagtgaagaagaatagagagcaagatcatgcttctgatgcgtatacagctttgctgtccagcgtgttgcaacgaggtggagtgatcaccgatgaggaggagacaagtaaaaagattgcagatcagctggacaatatcgtggatatgagagagtacgatgtaccctaccacatacgcctgagcatcgacctgaaaattcacgtcgcccactggtacaatgtgcgatatagggggaacgccttccctgtggaaattacccgccgtgatgatctagtggagcgtcccgatcccgtggtacttgcttttgatatcgaaaccacaaagctacctctgaaattcccagacgccgagaccgatcagattatgatgatttcttatatgatagacggccaggggtatctgatcacgaatagggaaattgtatcagaggacatcgaagacttcgaatttaccccgaaacccgagtacgaagggccattctgtgtcttcaatgaaccagatgaagcgcatctgattcaacgctggttcgagcatgtgcaagaaacaaaaccaaccattatggtgacttacaatggggacttttttgactggccatttgttgaggcgagagcagctgtgcatggcctgtccatgcaacaagagattggctttcagaaggatagtcaaggtgaatataaggcccctcagtgcatccacatggactgcctgagatgggtgaagcgggattcctatttgcctgtcgggtcacacaacctgaaggccgctgctaaggccaagctcgggtatgatcccgtggaactggaccctgaggatatgtgtcgtatggccacagaacagcctcaaacactggctacctactcagttagcgacgcagtagcgacatactatttgtacatgaagtacgttcacccgttcatctttgccctctgcactatcattcctatggagcccgacgaggtattgcgcaaaggtagcggcaccctgtgtgaggccctgcttatggtgcaggcctttcatgccaatatcattttcccaaacaagcaggaacaagagtttaacaagctgacagatgatgggcacgtgctggatagcgaaacatatgtcggcggacacgttgaagctttggagtccggtgtgtttagatcggatataccttgcagattccgaatgaacccagccgcattcgatttcctcctccagagggttgagaagacactgaggcatgctctagaggaagaagagaaggtccctgttgagcaggtgacaaatttcgaagaggtttgcgatgaaattaagtccaagctggccagcctgaaagacgtgccctctcgtatcgaatgccccttgatctatcatctcgacgtgggtgccatgtaccccaacattatcctgaccaaccgactgcagcccagtgcaatggtggacgaggctacatgtgccgcttgtgatttcaacaagcccggagccaattgccagaggaaaatggcttggcagtggagaggtgagttcatgccggcatcccggtccgagtatcataggatccagcaccagttagaaagcgagaaattcccccctttgtttccggagggacccgctcgcgctttccacgagctgtctagggaggagcaggctaaatacgagaaacgacgcctggcggactattgtcgcaaggcttataaaaagatccatatcaccaaggtagaggagaggcttacaactatatgtcagcgggaaaattctttctacgtggataccgtgcgggcatttcgagatcgaaggtacgaattcaagggtctgcacaaagtgtggaaaaagaagcttagtgccgcagtcgaggtcggtgacgccgctgaagtgaagagatgtaaaaatatggaagtgctgtatgactcactgcagttggcacacaagtgcattctgaattctttttacggttatgtaatgcgtaagggagctcgttggtatagcatggagatggccggtattgtgtgtttcacgggcgcaaacattatcacccaggccagagagctaatagaacagatcgggagaccgctggagctggacacggacggcatttggtgcgtgcttcccaactcattccctgaaaattttgtgtttaagaccactaacgtgaaaaagccgaaggttaccatatcctaccctggggctatgctgaacatcatggtcaaagagggtttcacaaacgatcagtatcaggagctggccgaacccagctccctgacctacgtgacgaggtccgagaactctatcttcttcgaggtcgatggaccgtatttggccatgattttgcctgctagtaaagaagaaggaaagaaactgaaaaagaggtacgcggtctttaatgaggacggcagcctcgctgaactgaagggctttgaggtgaagcgacgaggcgaattgcagctgatcaaaatttttcagtccagcgtgttcgaagcctttctcaaaggcagcactttggaggaagtttatggtagtgtggccaaggtggctgactattggcttgatgtgttgtattctaaggcagcaaatatgcctgacagcgaactgttcgagcttatctcagaaaatcgcagcatgtcccgaaaactggaagactatggtgaacagaaatccaccagcatatcgactgcaaagagacttgcggagttcctcggggatcagatggtcaaagacgctggattaagttgccgatacattatctcccgaaagcccgagggatcccctgtcacagaaagggccatccccctggctatcttccaagccgaaccgacggtgagaaaacatttcctgcgcaaatggctcaagtcaagctccttgcaagactttgacatccgggctatactagactgggattattacatcgagcggcttggttctgcaatacagaagattattactattcctgccgcactgcagcaggtgaagaacccagtgcccagggtgaaacaccccgactggttacacaagaaactcctggaaaaaaacgacgtttataagcagaagaaaatcagtgaactgtttaccttagaaggcagaagacaggttactatggcagaggccagcgaggattccccgaggccatcagcccctgacatggaggactttgggctcgttaaattgccacacccagccgctcctgtcactgtgaaacggaaacgtgttctgtgggaaagccaggaggagtctcaggatcttacaccgactgtaccctggcaagaaatcttagggcaaccaccggctctcggcacctcccaagaagagtggctggtttggctgaggttccataagaaaaagtggcaactgcaggcccgtcagcggctggccagacggaaaagacagcgccttgagtcggcagaaggggtattgcgccctggggctatacgcgacggccctgctactggcctgggttccttcctccgcagaacagcaaggtcgatactcgacctaccgtggcagatcgtgcagatatcagaaaccagccaagcagggctgtttaggttgtgggctctcgtgggatctgatttgcactgtattcgcctgagcattcctcgcgttttctacgtgaatcagcgggttgccaaggccgaagaaggagcttcctacagaaaagtaaatagggttctccccagaagcaacatggtgtacaacctctacgaatactctgtgccagaagacatgtaccaggagcacatcaacgagataaatgccgagctgtcagctcccgacatcgaaggagtgtatgagacacaggtgcccctgttgttccgggcattggtgcatctcggatgcgtgtgtgtcgtaaacaaacagctcgttagacatcttagtggctgggaagcggagacatttgctttagagcatctggagatgcgctcgttagcccagttctcctatctagaacccggatccatcagacacatttacctgtatcaccacgcccaggcccataaagcgctgttcggcatttttatccccagtcagaggcgcgcatctgttttcgtcttggatactgtgcggtcaaatcagatgccaagcctaggcgcactttactcagccgaacacggactcctgctggaaaaggttggcccagagctgctgcctcctcccaagcacacatttgaagtgagagctgagacagatcttaagaccatctgtcgggctattcagcggtttttacttgcttacaaagaggaacggagggggccaacattgatcgccgttcagagttcatgggaattaaagaggctcgcttcggagattcccgtgttggaggagttcccactggtgcctatctgtgtggcagacaagattaattacggagtcttggactggcagcgacatggagcccgtcgtatgatccggcactacctcaatttagatacctgtctaagccaggccttcgagatgtccagatatttccatatccccatcggcaacctgcccgaagatatctcaacatttggcagcgatctctttttcgcgcgtcatctgcagagacacaatcacctcctgtggttatcaccaactgctcgtccggatttgggcggaaaagaagccgatgataactgtcttgttatggaattcgatgaccaagccactgtcgagataaattcaagtggctgttactcaactgtgtgcgtggagctcgacctccagaacctagctgtgaacaccatcttgcagtcgcaccatgtcaacgacatggaaggcgctgactctatggggatctcttttgacgtgatccagcaggctagcctcgaggatatgatcaccgggggacaggctgcctccgccccagcttcttacgacgaaactgcactttgtagtaatacatttaggatactgaaatccatggtggtgggctgggttaaggaaatcacacagtatcacaacatctacgccgataaccaggtgatgcacttttacagatggctgagatccccaagctccttgctgcacgatccagccttgcataggaccttgcacaatatgatgaaaaagcttttcttgcagctgattgcagaatttaaacggcttggatcttccgtcatctatgccaacttcaaccgtattattctgtgtactaagaagcgaagggttgaggatgccatcgcttacgtggaatatatcactagttcaatccacagtaaagagactttccacagcctgaccatcagcttctctagatgctgggagttcctgctgtggatggacccctctaattacggcggaataaagggcaaggtttccagcaggattcattgcggcctccaggacagccagaaagctggtggcgcagaggatgagcaggaaaatgaggacgacgaagaggagcgagacggcgaagaagaagaagaggcagaagagtctaatgtggaggatctgctggaaaacaattggaatattctacagttccttccccaagcagcatcttgccaaaactacttcctgatgatagtttctgcttacattgtggccgtgtaccactgtatgaaggatggtctgcgacgcagcgccccagggtcgactcccgtgagacggagaggcgcttcgcagctgtcccaggaggccgagggagccgttggggcacttccgggtatgatcacttttagccaggattacgtggctaatgagcttacccagagcttcttcacaatcacgcagaaaattcaaaagaaggtgacaggctccagaaattccactgagctgtccgaaatgttcccagtgctgccgggaagccacctgctcttgaacaatccagctctggaattcatcaagtacgtgtgtaaagtgctcagcctggatacgaatattacaaatcaggtgaataaactgaaccgcgacctgctgcgccttgtcgatgtaggagagttcagtgaagaagcccagttcagggacccctgcagatcttacgtcctgccagaagtaatttgcagatcttgtaacttttgtagagatctcgatttatgtaaggacagctcattcagtgaggatggtgccgtgctccctcagtggctgtgctccaactgccaggcaccctatgacagcagcgccatcgaaatgactctggtcgaggtgttgcagaagaagctgatggcgttcacgttgcaagacctggtgtgcttgaagtgtagaggcgtcaaagagaccagtatgcctgtgtactgtagctgtgccggagactttgcgttgactatccacacacaagtcttcatggagcagatcggaatcttccgtaatatagcccagcactacggtatgtcctatctgctcgaaaccttggagtggctgcttcagaaaaatcctcaactcggccacta

SEQ ID NO: 235441 - DNA, 6779 bp, synthetic construct
  misc_feature 1..6779: note = Description of Artificial Sequence: Synthetic coding sequence
  source 1..6779: mol_type = other DNA
atgagcctgcggtcagggggacgtcgaagggccgatcctggcgctgatggcgaggcaagtcgggacgacggagctaccagcagtgtgtctgccctaaagaggctcgagcgcagccagtggaccgataaaatggacctgcggttcggttttgagaggttgaaggagcccggagaaaaaaccggatggctaatcaatatgcatcctgtcgctctaccatacaagccatacttctacatcgccacgcggaaaggttgcgaacgggaagtgtctagttttctctcaaagaaatttcagggcaagatagctaaagtcgaaacagtaccgaaggaggatcttgacctcccgaatcacctggtaggcctcaagagaaactacatacgccttagcttccatactgtggaggacctcgtcaaggttaggaaagagatctcacctgcagttaagaaaaatcgggagcaggatcacgcttcagatgcctacactgccctcctcagcagtgtgctgcagaggggaggggtaatcacggacgaagaagagacctccaagaagatcgctgaccaactggacaacatcgttgacatgcgggagtatgacgtgccttaccatatccgactatcaattgaccttaagatccatgtagcccactggtacaacgtgaggtacagagggaatgccttcccagttgagattacacggcgagatgatttggtagagcgtcccgacccagtggttttagcatttgatattgaaaccacgaagttgccactgaagttcccagatgcggaaacagatcagattatgatgatcagctatatgattgacggtcagggatacttaataaccaatcgcgagatcgtaagcgaggacatagaggacttcgagttcacccccaagcctgaatatgagggtccattctgcgtttttaatgagcccgatgaagcccacctgatccagaggtggtttgaacacgtgcaggaaaccaaacctaccatcatggtcacctataatggtgattttttcgattggccctttgtcgaagccagggctgccgtgcacggtctcagtatgcagcaggaaataggttttcaaaaagactctcagggagagtacaaagcacctcaatgtatacacatggattgtcttcgatgggttaaacgcgactcatacctccccgtggggagccataatcttaaagctgccgctaaggccaagctgggctatgatcccgtggagctggacccagaggacatgtgtaggatggctacggaacagcctcagacactcgccacctattcagtgtccgacgcggtcgcaacttattatctgtatatgaagtatgtccatccgtttatcttcgccctctgtacaataatccctatggagccggatgaggttctgagaaagggaagtggaacgctgtgcgaggccctcctcatggtccaggcattccacgcaaatatcattttccccaacaagcaagaacaggagttcaataagctcacagatgatggacacgtgttggactcagaaacttacgtcgggggacacgtggaggctctggagtctggcgtgtttagatcagatatcccctgccggttcagaatgaacccagcagcgttcgatttccttctgcagcgagtagagaaaaccttaaggcatgccctggaggaggaggagaaggtgccagtggagcaggttaccaattttgaggaggtctgcgatgaaattaagtcgaaactggcctcccttaaggacgttccatctcgaatcgagtgtccactcatctaccaccttgacgttggcgcaatgtaccccaacattatattaaccaaccgattgcagccgtcggctatggtagacgaggcaacatgtgccgcttgcgatttcaataaaccaggggctaattgtcaaaggaagatggcttggcagtggcggggagagttcatgccagcatcgcggagtgaataccaccgtattcagcatcagttggaatctgaaaagtttccacccctgtttcctgaaggacccgcacgggcttttcacgagctgagtcgcgaagagcaggcgaaatatgagaaacgcagactcgccgattactgcagaaaggcttacaagaaaatacatatcaccaaggtggaagagcgcttgacaaccatatgtcagcgcgaaaactccttctacgtggacacggtacgcgcttttcgcgaccggagatatgaatttaagggactgcacaaggtctggaagaagaagctctccgccgcagtggaagtcggggacgctgccgaggtcaagaggtgtaagaatatggaagttctctacgactcactccagctcgcgcacaagtgcatcctgaacagcttttacggctatgtcatgcgcaagggcgcacgctggtatagtatggagatggctggcatagtgtgctttacaggagcaaacatcattacccaggcccgtgagttgattgagcaaatcggccgtccactggagctggataccgacggaatctggtgtgtactacctaattcattccctgaaaatttcgtttttaagactaccaacgttaagaagcctaaggtgaccattagctaccctggggctatgctgaatattatggtcaaagaggggtttaccaacgatcagtatcaagaacttgccgaaccaagtagccttacctatgtcacacgttccgaaaattcgatctttttcgaggttgatgggccatacttggccatgattctgccggctagcaaagaagaagggaaaaaattaaagaagcgctacgccgtgttcaatgaggacggttctttggcagaactcaagggcttcgaagtgaagcgtcggggagagctgcagctgatcaagatattccagtcatctgtgtttgaagcttttctaaagggcagtacactggaggaggtatacgggagtgtggccaaagtcgccgactactggctggatgtgctctattcaaaggctgccaacatgccggattccgagctctttgagttgatcagcgagaataggagcatgagtcggaaactggaggactacggcgaacaaaaatctactagcattagtaccgccaaaaggctggcagaatttctaggcgaccagatggtgaaggacgctgggcttagttgccgctatatcatttcaaggaagcccgagggcagtccagtgactgaacgcgcaatacctttagccatattccaagcagagccaaccgtgcgcaaacatttcttgcgaaaatggcttaagtcctctagcctgcaggacttcgacatccgagctatcttagattgggattattatatcgagaggctcgggtccgccatccaaaagattattaccatcccagcagccctgcaacaggtcaagaatcctgtgccacgagtgaagcacccagactggctgcacaagaagttgctcgagaaaaacgacgtatataagcagaaaaaaatatcagaactgttcacactggaaggcagaaggcaagttacgatggcagaggcctccgaggactccccaagacctagcgcgcctgatatggaggattttggcctggttaagcttccccatccagctgcacccgtcaccgttaaacgaaagagagttctctgggagagccaagaggagagtcaggatcttaccccgacagttccttggcaggagatcttgggccagccacccgcactgggtacttcacaagaggaatggctggtctggttgagattccacaagaagaaatggcagctccaggctcgccagcgtcttgcccgacgcaagaggcagaggctcgagtcagcggaaggtgtgctccgccctggcgcaatcagagacggacccgctacagggttaggcagcttcctccgaaggactgctagatcaatcctggatctgccgtggcagatagtgcaaatctctgaaacatcccaagcaggcctgtttagactgtgggcattggtgggaagtgacttgcattgtataagattgagcattcctcgcgtcttctacgtgaatcagcgcgtcgccaaggctgaggaaggggcatcctacaggaaagtcaacagggtattgcctagatcaaatatggtctataacttatatgagtatagcgttcccgaggacatgtaccaggaacacataaacgaaatcaacgccgaattgtcagccccagacattgagggggtctatgagacacaggtaccactgctgtttagagccctcgtacacctgggctgtgtgtgtgttgtgaataagcaactcgtcaggcatttgtctggatgggaggctgaaactttcgctctggagcatttagagatgcggagtctggcacagttctcatatctagaaccgggaagtatcaggcacatctacctatatcatcacgcacaggcacacaaagctctcttcggaatcttcattcccagtcagaggagggccagcgtctttgttctggatacagtgcgctcaaatcagatgcccagtctcggagcactgtacagcgccgaacacggattattgttggaaaaggttggaccagagctgctgcctcccccaaaacacacattcgaagtgcgagccgaaacagatctcaaaaccatttgccgggctattcagcgctttcttctggcgtacaaagaggagcgtaggggtcctactttaatcgctgtacaatcatcatgggagttgaagcggctggccagcgagataccagtgttggaagagttcccattggtccccatctgcgtagcagacaagatcaactatggagtattggactggcagcggcatggagccaggagaatgatcagacactacctgaacctcgatacttgtctgtctcaggcatttgagatgtctaggtatttccacatacctattgggaatctaccagaagatatctctactttcggatccgatctattctttgcccgtcacctgcagcggcacaatcatctgctgtggcttagccccacagctcggcctgacttggggggaaaggaggcggacgacaactgcctcgtcatggagtttgatgaccaggcaacagtggagattaactcctcgggctgctattccaccgtgtgtgtggaattggacctgcagaatctggccgttaataccatcctgcagagccatcatgtcaatgacatggaaggcgctgactcaatggggatcagcttcgatgtgattcaacaagcttcactcgaggatatgatcactggcggacaggccgcatccgccccagctagctacgacgagactgcactttgttccaacacgttccgcatactgaaaagtatggtggtgggatgggtaaaggagatcacacagtaccacaacatctacgccgacaatcaggtcatgcacttctatcgctggctgcggagcccctcgtctctgctgcacgatcccgcactccacaggactttacataatatgatgaaaaaactgttcctccagcttatcgctgagttcaaacgcctgggatccagcgtcatttatgccaatttcaaccggattattctgtgtactaagaaacggcgagttgaggatgctatcgcctatgtcgagtacataacttcttccattcacagcaaggagacgtttcattcactgaccatatcattttctcgttgttgggaattcctgctgtggatggatccctcgaactatggaggtatcaagggaaaggtgtcctcacggatccactgtgggttacaggattctcagaaggccggaggtgccgaggacgagcaggagaatgaggacgatgaagaagaaagagacggcgaagaagaagaggaggccgaggaatcgaacgtggaggacctgttagaaaataactggaacattctgcagttcctgcctcaggccgctagttgtcaaaattacttcctgatgatagtgagtgcttatatcgtggctgtctatcattgtatgaaggacggtcttcgacgctctgcccctgggtctacccctgtccgcaggcgcggagcatctcagttgtcacaagaagctgaaggagccgtcggtgccctgcccggtatgattacattctcccaagattacgtggccaatgagcttactcagtcatttttcaccatcacacagaagatccagaaaaaggtgaccggatcccggaacagcaccgaactgtctgagatgtttccggttctcccagggtcacacctgttactcaataatccagctctagagtttatcaaatacgtatgcaaggttctctctctagatacgaatatcacaaatcaggtgaacaagctcaaccgtgatctgctcaggctagtggacgtcggggagttttccgaggaggctcagttcagagatccatgccgctcctacgtgctgccagaggtcatctgtcgatcttgcaacttctgcagagatttggacctttgcaaggatagctctttctccgaggatggagccgtgcttcctcagtggctgtgctctaactgccaggctccttatgatagcagcgctatagagatgacgttggtggaggtgctccagaagaaactgatggcattcacccttcaggatctggtatgcctaaaatgccggggagtaaaggagaccagtatgcccgtgtattgtagctgcgcgggtgatttcgccctgacaatacacacccaggtcttcatggaacagatcggcatttttcgcaatatagcacagcattacgggatgtcctacttgctggaaaccctggaatggcttctccagaaaaatcctcagcttgggcacta

SEQ ID NO: 235442 - DNA, 480 bp, synthetic construct
  misc_feature 1..480: note = Description of Artificial Sequence: Synthetic coding sequence
  source 1..480: mol_type = other DNA
atgattaagttctttttgatggtgaacaaacagggccagactcgtctgtccaagtattatgaacacgtggatattaacaagcgtacattgctcgagaccgaggtcattaagagctgcctcagccgtagcaatgaacaatgctccttcatcgaatataaggacttcaaacttatttataggcagtatgccgctcttttcattgtcgttggggtgaacgataccgaaaacgagatggcgatttacgagtttattcataatttcgtggaggtcctggatgaatattttagtagagtgagcgaattggatgtgtccttctttaacactgtgtttcacagcacttggcagatgcactccggcccttatcaggaacccatagacgaattgccgaagatctgcagtgcactggaacctcagcagacttgcttttcgcccgatagcagctccttcaagggcgcagcctcaacgaccccaatatattag

SEQ ID NO: 235443 - DNA, 1506 bp, synthetic construct
  misc_feature 1..1506: note = Description of Artificial Sequence: Synthetic coding sequence
  source 1..1506: mol_type = other DNA
atggcccctgaacggctccggtcacgggctttgagtgcctttaaactacggggactgttgttaaggggggaggccattaaatatcttacagaagcccttcagtcgattagcgagctcgagcttgaggataagctcgaaaagatcataaacgccgtggaaaagcagcccctctcatctaatatgattgagaggagcgtggtcgaggcggctgtgcaagagtgtagccagagcgtagatgaaaccatcctcctcatgacaaaccatccggctcctaacctgtttgggacacccagagacaaggcggagatgtttcgtgagcggtatactatcctccaccagcgtactcaccggcacgaactatttacgccgccagtcatcggtagtcaccctgacgaaagcgggagcaagttccagctgaaaactattgaaactctcttggggagcacgacaaagattggcgacgcaattgtgcttggcatgataacacagcttaaggaggggaaattttttctcgaagacccaacaggtacagttcagttagacctgtccaaagcgcagttccacagcggcctgtacaccgaggcttgcttcgtactggccgagggttggttcgaggaccaggtgttccacgtgaatgcttttggcttccctcctacagaacctagtagcacaacacgcgcatactatggcaatatcaactttttcggcggtccgtcgaatacttctgtgaagacaagtgccaagctgaagcagttagaggaggaaaacaaggatgcgatgtttgtatttctcagcgacgtttggctggatcaggtggaagtgttggagaaactcaggattatgtttgctggctattcaccggcaccccctacctgcttcatcctctgtggtaacttcagctcggccccttacggcaaaaatcaggtgcaggcgcttaaggattcactcaagacactggctgacattatttgtgagtacccagatatccatcagtcctcccgctttgtatttgtaccaggacccgaggacccgggattcggcagcattctgccacggccacctttagctgaatctattacaaatgaatttagacagcgggtgcctttctccgtcttcaccaccaatccctgcaggatccagtactgtacccaggaaattaccgtgttcagagaggatctggtgaacaagatgtgccggaactgcgtcaggtttccctcctctaatctggcaatacctaatcattttgtgaagacaattctgtctcagggccatctgacaccgctccctctttacgtttgccccgtctactgggcctacgattacgccctcagagtgtaccccgtacccgacttgctagtgatcgcagataagtatgacccgtttacgacaacaaacactgagtgtctgtgcattaaccccggaagcttccctcgtagtggcttctcttttaaggtgttctatcccagcaacaaaactgtggaggattctaagttgcagggcttctag

SEQ ID NO: 235444 - DNA, 1509 bp, synthetic construct
  misc_feature 1..1509: note = Description of Artificial Sequence: Synthetic coding sequence
  source 1..1509: mol_type = other DNA
atggcacccgagaggctgagatctcgcgctctgtccgcttttaaactgcgaggcctgttactcaggggagaagccatcaagtatctaaccgaagccctgcagtcaatcagcgaactggagttagaagacaaactggagaagatcatcaacgccgtcgagaaacagcctttgtcctcaaatatgatagaacgttcagtggtggaggccgctgtgcaggaatgtagccagtctgtggatgagactatagagcacgtgtttaacataataggcgcatttgatatccccaggttcgtatacaattccgaaagaaagaagttcctgccattgctcatgacaaatcatcccgcaccgaacctgtttgggaccccacgtgataaagccgaaatgttcagggaacgctacacaatccttcatcaacgtactcacaggcatgaactgtttactccacctgttatcgggtcccacccggacgaatccgggtcaaaattccagctgaaaacaatcgagactttgcttggtagcaccaccaaaattggcgatgctatagtgttgggcatgattacccagctgaaggagggaaagtttttcctggaggacccaaccggcacagtgcagctggacctatctaaagcccaattccactcgggactgtacacagaggcttgcttcgtgctggctgaggggtggttcgaggaccaggtgtttcacgtgaatgcctttggctttccaccaactgaaccttctagtaccacaagagcctattatggcaatatcaactttttcggaggaccctcaaacacctccgttaaaacctctgctaagctgaaacagctggaagaggaaaataaggatgctatgtttgtcttcctgagcgatgtatggctggatcaggtggaagtgctcgagaaacttagaattatgtttgctggatattccccagctccaccaacctgttttatcctctgcggaaatttttcttctgccccttatgggaagaatcaggtacaggctctcaaagatagcttgaagacattggctgatatcatttgtgagtacccggatattcaccaaagctcaaggttcgtctttgtgccagggcctgaggaccctgggttcggtagtatcctgcctagaccccctctcgccgagtccatcaccaacgagttccggcagcgcgtaccattcagtgtctttacaacaaatccatgtagaatccagtactgcacccaggagatcactgtatttagggaggacctggtgaacaagatgtgtaggaattgtgttaggttccccagcagtaacctggcaattcccaatcactttgttaagactatcctttcacaagggcacctgactccgcttccactttacgtatgcccagtctattgggcctacgattacgccctgcgcgtgtaccctgtccctgacctgttggtgatcgcagacaaatacgacccattcaccacaaccaacacggaatgcctctgcattaatcctgttagaatgtag

SEQ ID NO: 235445 - DNA, 444 bp, synthetic construct
  misc_feature 1..444: note = Description of Artificial Sequence: Synthetic coding sequence
  source 1..444: mol_type = other DNA
atggcggaaagaccagaggacctgaatctaccaaacgccgtcatcacacgcatcattaaagaagctctgcccgacggagtaaatatatcaaaagaggccagatctgctatttctagggctgcgagtgtgttcgtcctctatgccactagctgcgctaataattttgctatgaagggaaagcgcaagacgctgaatgctagcgacgttctgagtgccatggaggaaatggaatttcagaggttcgtcacgcccctgaaagaggccctagaagcgtataggagggagcagaaaggtaaaaaggaggcatccgagcaaaaaaagaaagacaaagataagaagacggatagcgaagaacaggataagtctagagacgaggataacgacgaggacgaagagcggctcgaggaagaggagcaaaatgaagaagaggaggtggacaattag

SEQ ID NO: 235446 - DNA, 444 bp, synthetic construct
  misc_feature 1..444: note = Description of Artificial Sequence: Synthetic coding sequence
  source 1..444: mol_type = other DNA
atggcagagcgaccagaagacttaaatcttcctaatgcagtgatcacgcggatcatcaaagaggctctgcccgatggcgtgaatatctcgaaagaagcgcgtagcgctatttcgcgagccgcttccgttttcgttttgtacgccacctcctgtgctaacaattttgccatgaagggcaaacgtaagaccctcaatgcttccgacgtgctctccgcaatggaggaaatggaattccagcgcttcgtgacgcctctcaaggaggccctggaagcctaccgacgcgaacaaaaaggtaagaaagaagcctccgagcagaagaagaaagataaagataagaagaccgactccgaggagcaggacaagtcaagggacgaagataatgacgaagacgaagaacgtctcgaagaggaggagcaaaacgaggaggaggaggttgataattag

SEQ ID NO: 235447 - DNA, 1245 bp, synthetic construct
  misc_feature 1..1245: note = Description of Artificial Sequence: Synthetic coding sequence
  source 1..1245: mol_type = other DNA
atggctaccgggcaggaccgagtcgtcgcactggtggacatggattgcttctttgtgcaggtggaacagagacaaaatccgcatctgcgcaataaaccgtgcgcggttgttcagtataagtcctggaagggcggaggtatcattgctgtgtcttatgaagcgagagcatttggagttacccgctctatgtgggccgacgacgccaaaaagctatgtccagatctgctgttggcacaggttagagagagtcgcggtaaagccaacctaacgaagtaccgggaggccagtgttgaggtgatggaaatcatgtcccgcttcgcagtgatcgagagggctagtattgatgaagcctatgtggacctgacatccgccgtacaggaacgtttacagaagctacagggtcagcctatctccgctgatctgctcccgtctacttacatcgagggtctaccccaggggcctacaaccgctgaagagaccgtgcagaaggaaggcatgcgaaaacagggtctgttccagtggttagacagcctgcagattgataacctgactagtcctgacttgcagctgactgtcggcgctgtgattgtggaagagatgagagccgcaattgaaagagagacaggcttccagtgctccgccggaatctctcataacaaagtgctcgctaaactggcctgcggcctgaacaaacctaaccgccagacccttgtgagccacggaagtgtccctcagttgtttagccagatgccaattaggaagattcggagcctgggaggcaagctgggtgcctccgttatcgagatcttgggcattgaatatatgggtgagctgacacaattcaccgaatcacagttacagtctcattttggcgagaagaacgggagctggctgtacgccatgtgccgcggtattgaacacgatccggtcaagcctcggcagctgccaaagaccattgggtgcagcaagaacttcccaggcaaaaccgctctggccacccgcgagcaagttcaatggtggctactgcagcttgcccaggagctggaagagcgcctcaccaaagatcggaacgataatgatagggtggctacccagctggttgtgtccatccgggtacaaggcgataagagactttcttctttacgcaggtgctgtgccctcactcgttatgatgcccataaaatgtcccatgacgccttcactgttatcaagaattgtaacacaagcggaatccagacagagtag

SEQ ID NO: 235448 - DNA, 2142 bp, synthetic construct
  misc_feature 1..2142: note = Description of Artificial Sequence: Synthetic coding sequence
  source 1..2142: mol_type = other DNA
atggcaactgggcaggaccgggtggtggcgctggtcgatatggactgcttctttgttcaggtggaacagcgacaaaatcctcacctcaggaacaagccatgtgccgtggtgcagtataagagctggaaggggggagggatcatcgccgtgagctacgaggctagagccttcggtgtcacacgtagcatgtgggctgacgatgccaaaaagctgtgcccagacctgcttctggcccaagtacgcgagtctagggggaaggctaatttgacaaagtatcgggaagccagcgtcgaggtgatggaaattatgagtcgattcgctgtcatcgagcgtgcctctattgatgaggcgtacgtcgatcttaccagcgccgttcaggagcgtctgcagaagctccagggtcagcctatttcagccgatttgttaccgagcacctatatcgaggggctcccacaggggcctaccaccgccgaggaaaccgttcagaaagaggggatgcggaagcagggcttattccagtggctcgactctttacagattgataatctcaccagcccagatttgcaactgactgtcggagctgtgatagtggaagagatgagagccgctattgaacgagagacaggcttccaatgcagcgccggaataagccacaataaggttctcgccaagttggcgtgtggcctcaacaagcctaatcgacagactctcgtgagccatgggtctgtcccacagctcttttcccagatgcctatcagaaaaattcgttctctcgggggtaaattaggtgcaagcgtcattgagatcctcggcatagagtacatgggcgaactgactcagtttactgagtcgcagctgcaatcacactttggagaaaaaaacggaagctggctttacgccatgtgtaggggtattgagcatgaccccgtgaaaccgagacagttgccaaaaactatcggctgcagcaagaactttccaggcaaaaccgcgttggctacaagggaacaggtccagtggtggctgctccagctggcgcaagagcttgaggagaggcttactaaggatagaaacgacaatgaccgcgtggccacgcagcttgtggttagcatcagagtgcagggggacaagaggttatcttccctgcgaagatgttgcgccttgacccgttacgatgcacataagatgtcacacgatgcctttactgttataaaaaattgcaacaccagcgggatccagaccgaatggtccccccctctcaccatgttatttctctgcgctactaagttctccgcttctgccccttcatcatctacagatattacgagctttctgagcagtgacccctctagcttaccaaaagtccccgtaacctcgagtgaggcaaagacacagggatctggtccagcagtcactgcgactaagaaggcaacaacttccctggaaagcttcttccagaaggctgccgagaggcagaaagtgaaagaggctagcctgtctagtctaacggcgccaacccaggcaccaatgtccaattctccttctaagccttcactgccgtttcagaccagtcagagcacgggaaccgagcctttcttcaaacagaagagcttgttactgaagcagaagcagctgaataacagctctgtgagctcaccacagcagaatccatggtctaattgcaaggctctgcccaatagtctgcccacagaatatcctggttgtgtccctgtgtgtgagggagtctcaaagctggaggaaagcagtaaggcaacaccagccgagatggacctagcccacaatagtcaatcaatgcacgcatcctctgcatctaaatctgtccttgaagtgacacagaaggcaacaccaaatccaagtttgttggccgctgaggaccaggtcccctgcgagaagtgcggtagcctggtgccagtgtgggacatgcctgaacacatggattaccatttcgccctggaactccagaagagctttctgcagcctcattctagtaatcctcaggtggtcagcgcggtctctcaccagggcaaacggaatccaaagtctccactcgcgtgtacgaacaagcgcccaagaccagaggggatgcagactcttgagtcttttttcaagcccttaacgcactag

SEQ ID NO: 235449 - DNA, 219 bp, synthetic construct
  misc_feature 1..219: note = Description of Artificial Sequence: Synthetic coding sequence
  source 1..219: mol_type = other DNA
atgtgggcggatgatgccaaaaagctctgccctgatctgttgctagctcaggtgagagagagcagggggaaagccaatcttaccaagtatagagaagcatctgtggaagtcatggagattatgtctagattcgcagtcatcgaacgggctagtatcgacgaggcttacgtggatctgacatctgccgtccaagaaaggctgcagaagctccagggttag

SEQ ID NO: 235450 - DNA, 1956 bp, synthetic construct
  misc_feature 1..1956: note = Description of Artificial Sequence: Synthetic coding sequence
  source 1..1956: mol_type = other DNA
atgtgggccgatgatgctaaaaagctttgtcccgacttgctgctggcacaagtgcgggagtcaagaggtaaggccaatttgactaagtaccgcgaagcttcggtggaggtgatggagataatgagtcgcttcgctgtgatcgaaagagccagcattgatgaagcttacgttgacctcacttcagccgtgcaagagcgccttcaaaaactgcagggacaaccgatcagtgccgatctccttccatctacttatatcgaagggctcccacagggcccaacaaccgctgaagagactgtgcagaaggaaggaatgaggaaacagggcttgtttcagtggctggattctctgcaaattgataatctgacatcacctgatctccaacttacagtaggagctgtgatcgtagaagagatgcgcgcagccatcgagagagagaccggattccaatgctctgccggaatttcacataacaaggtcctggcaaagttggcgtgcggcctgaacaaacccaaccgccaaacactggtgtcacacggaagcgtaccacagctgttttctcaaatgccgatccgcaagattcgtagcctggggggaaagcttggcgcatccgtgattgaaatactggggatcgagtacatgggtgagctaacgcagttcacagaatcccagttgcagagtcactttggagagaagaacggcagctggctgtatgctatgtgtcgaggcattgagcacgatcctgtcaaacctcgccaactgccgaaaaccatcgggtgttccaagaattttcccggtaaaactgctctcgctacaagggagcaggtgcagtggtggctgttgcagcttgcccaggaattagaagaacggctgaccaaggaccgcaatgacaacgatagggttgccacccagctggttgtttcaattcgggtgcaaggggataagcgtctttcatcgctgcgaaggtgttgcgcccttaccaggtacgacgcgcacaagatgagtcacgatgcgtttaccgttatcaaaaactgcaacacctctggaattcagacagagtggagccccccattaactatgctgtttctgtgcgctactaagttttccgcgagcgccccttcatcctccacagacattaccagcttcctgtctagcgatccaagctccttacccaaagtgcccgtgacaagttctgaggctaagacccaggggagcggcccagccgtgacagccactaaaaaggccaccacgagcctggaaagcttctttcagaaggcagccgagcgacagaaagttaaggaggcatctctttctagcctgaccgctcccacccaggctccaatgtccaattcaccctccaaaccctcattgccattccagacttcgcagagcactggtaccgagccattctttaaacagaagtccctgctgctcaagcagaaacagctcaacaacagttctgtctctagcccacagcaaaatccctggtctaactgtaaggcattacctaacagcctacctactgagtaccctgggtgcgtcccagtctgtgagggcgtttctaagctcgaagagtcaagcaaggccacccctgccgaaatggatctggcccataattcccagtccatgcatgccagctcagcgtccaaatctgtgctggaggtcacccagaaggccacaccaaaccccagcctcctcgctgccgaggatcaggtcccatgcgagaagtgtggtagcctggtgccagtgtgggatatgcccgagcatatggactaccactttgccctggaactacagaagtccttcctgcagccacatagctccaacccccaagtggtgtccgctgtcagccaccagggaaaacgaaatcccaaaagccccttagcttgcacaaacaaaaggccacggcctgagggcatgcagaccttggagagcttctttaagccactcacacattag

SEQ ID NO: 235451 - DNA, 3720 bp, synthetic construct
  misc_feature 1..3720: note = Description of Artificial Sequence: Synthetic coding sequence
  source 1..3720: mol_type = other DNA
atgtccagattgctgtggcgaaaggtggccggagcaactgtgggcccagggcctgtgccagccccaggccgatgggtgtccagcagtgtgccagccagtgacccttctgacggacaacggaggaggcagcagcaacagcagcagcagcagcaacagcaacagcagccccagcagccacaagtgttgtcgtcagagggtggacagctgaggcacaatccacttgatatccagatgctgtccagagggctgcatgagcagatcttcggtcagggcggagaaatgcctggagaggctgcagtgagacggagtgtcgaacatctgcagaagcacggactttggggacagccagctgttccactcccagacgtcgaacttcggctgcctccgttgtacggcgacaacctcgatcaacatttcagactgctggcccagaagcagtcattgccctacctcgaggccgctaatctcttgctgcaggcccagctgcctcctaaaccacccgcatgggcgtgggccgagggctggactaggtatggccctgagggtgaagcagtccccgtggccatcccagaggaacgggcattagtgtttgatgtggaggtctgtctcgctgaaggcacttgcccgactctcgctgtcgcaattagtccctcagcttggtattcttggtgctcacaaaggcttgtggaggaacgttattcctggacgagtcagttaagcccggcagatcttattcctctcgaggtgcctactggagcaagctctcccacgcagcgggactggcaggaacagttggtagtgggacacaatgtgagctttgatcgcgcacatatccgcgaacaatacctgatacaagggagcagaatgaggtttctggacaccatgagcatgcatatggccatatccgggctgtcctctttccagcggtcgctgtggatagctgccaagcaggggaaacacaaagtacagccccctaccaagcaaggtcagaagtcgcagagaaaagcccgtcgcggacccgctatcagctcttgggactggctggatatctcctcagtgaatagtctagctgaggtgcatcggctgtacgtgggaggaccccctcttgagaaagaaccaagggaactctttgtgaagggtactatgaaggacattcgcgagaatttccaggacctgatgcagtattgtgcgcaggatgtttgggctacgcatgaggtgttccagcagcagctccccctgttcttggagaggtgcccccatcccgtgacactggctggtatgcttgagatgggggtgtcatacctgccggttaatcagaattgggagcgatatttggcggaagcacagggcacatacgaggaacttcagcgcgagatgaagaaatccctgatggatttggctaatgacgcatgtcaactcctctccggagaaaggtacaaggaagatccctggctgtgggacttggaatgggatctgcaggaattcaagcagaaaaaagctaagaaagttaagaaagaacccgctactgccagtaagctgccaattgagggcgctggcgcacccggagaccctatggaccaggaagaccttggaccgtgctccgaggaggaagaatttcagcaggatgtaatggcccgagcatgtctccaaaaactcaagggcacgaccgaactgctgccgaagagacctcagcatcttccgggacaccccggatggtatcggaaattatgccccaggctggacgaccccgcatggacccctggaccatccctgttatcgctgcagatgcgggttacacctaaattgatggcactgacgtgggacggattcccactccattactcggagaggcacggctgggggtatctggtgccagggaggcgggacaatctcgccaagctgcccactgggacgactcttgaatcagctggggttgtctgtccataccgcgctatcgagtccctttatcgaaagcactgtcttgagcaaggtaagcaacaactcatgccccaagaggcagggctcgctgaggaatttttgttgactgacaattctgccatctggcagaccgtcgaggaactcgattatcttgaggtcgaagcagaggccaagatggaaaatcttagagctgctgtgcccggtcagcctctggcactgaccgccagagggggtcctaaagatacccagccaagctatcaccacggaaatggcccttataacgacgtggacattccagggtgctggttctttaagctgccccacaaggacggcaactcctgcaatgtaggttcccctttcgccaaggactttcttcctaagatggaggacggcacattgcaagctggaccaggtggcgcaagcgggcctcgcgctcttgagatcaacaagatgatatctttttggagaaacgcgcacaagcgcattagcagccaaatggtagtgtggctgccaagatcagccctgcctcgggctgtgatacgccatccggattatgatgaggagggcctgtacggggctatcttgccccaggtggtcactgccggaacgatcacccgacgggctgtggagcccacatggttgactgcttcaaatgccagaccagatcgagtggggagtgagctgaaggctatggtgcaggccccaccaggctataccctggtgggggcagacgtggattcccaggagttatggattgccgctgtcctgggagacgctcacttcgccggaatgcacggttgcactgccttcgggtggatgactctgcagggcaggaaatctcggggaactgacttacattccaagacagcaaccacggtcggaatctctagagaacatgccaagatttttaactatgggcgaatttatggcgctggccagcctttcgcagagagactactcatgcaattcaatcacagacttactcagcaagaggcggctgagaaggctcagcagatgtacgctgccacaaagggtctcagatggtacaggctgagcgatgaaggcgagtggcttgtcagggagctgaacctgcccgtggataggaccgaaggcggatggattagcctgcaggacctgcggaaggtccaaagagagacagccagaaagtctcagtggaagaaatgggaggtcgttgctgagcgcgcttggaaggggggaaccgaaagtgagatgttcaataagctcgaatccatagccacttctgatatcccacgcaccccagtcctgggctgctgtatcagtagagcactggagccaagcgccgttcaagaggagttcatgacctctcgagtgaactgggtggtacagtcctcggcggtggactatctgcacttgatgttggtcgccatgaaatggctttttgaggagttcgccatcgatggcagattctgcataagcatccatgatgaggtgagatatctggtccgggaagaggatcgttacagagctgcgctggccctccagatcaccaacctgcttacccgctgtatgtttgcctacaaactgggcctcaacgatttgccccagagtgtcgccttcttctccgctgttgacattgaccgatgcctaaggaaggaagtcactatggattgtaagacacctagcaaccccactggcatggagcgaagatatgggattccccagggggaagccttggatatctatcagataatcgaactcacgaagggcagtctggagaaacggtcacaaccaggtccctag

SEQ ID NO: 235452 - DNA, 3720 bp, synthetic construct
  misc_feature 1..3720: note = Description of Artificial Sequence: Synthetic coding sequence
  source 1..3720: mol_type = other DNA
atgtcacgcctgctttggcgaaaagtcgccggagctactgtcggacctgggcctgtccctgcaccagggaggtgggtcagtagtagcgtccccgcttcggaccctagcgacggacaaagaaggcggcagcagcagcagcagcagcagcaacagcaacaacaacagccacagcagccacaagttctctcatcagaaggcggtcaactcaggcataatcccctcgacattcagatgctcagtcgtggcctgcacgaacaaatatttgggcagggaggagagatgccaggggaggccgctgtacggcgttccgtggagcatttgcagaaacatggactatggggtcaacctgccgttcccttgcccgatgtggagctgcgactaccacctctgtacggggacaatcttgaccagcatttcaggctgctcgcccagaaacagtccctgccgtacctagaggccgctaacttattactccaagcgcaactgcctcccaagcctccagcatgggcttgggctgagggttggacccgatatggaccagaaggcgaggcagtgcctgtcgcaataccggaggaacgagccttagtatttgacgtcgaggtttgcctggccgaaggcacatgccctactctggccgtggccattagtccttccgcttggtactcttggtgttcccagcggctggtcgaggagcggtactcttggacatcacaactctctccagctgaccttatccccctggaggtccccactggcgcaagcagtccaactcagagggactggcaggaacagctagttgtcggtcataatgtgtcatttgacagagcccacattcgcgagcagtacctcatccaaggatcgcggatgaggttcttggacacgatgtccatgcatatggcgatcagcggcctgagcagctttcagcggagcctgtggatcgctgcgaagcagggtaaacacaaggtgcagcccccaaccaagcaaggccagaagtcccagcgcaaggcgcgacgaggccctgccatcagtagctgggactggctcgacatttcttccgtaaatagcctggctgaagtgcacaggttgtacgtcggaggacctcccctggagaaagaaccgagagagctatttgtcaaaggcaccatgaaggatatcagggaaaacttccaagatctgatgcagtattgtgcccaggatgtgtgggcaactcatgaggtgttccagcagcagcttcctttgtttctggagcggtgcccccatcccgtgaccttagccggaatgctggaaatgggcgtatcttacctgcctgtgaaccagaattgggaacgctatctcgctgaggcccaaggcacatacgaggagctgcaacgggaaatgaagaagagtcttatggatctcgctaacgatgcgtgtcagctgcttagcggggaacgttacaaagaagacccgtggctctgggatctggagtgggatcttcaggagtttaagcagaagaaagctaaaaaggtgaaaaaggaacctgccactgcatctaagctgcctattgagggagctggcgctcccggtgatcccatggatcaggaagatcttggcccatgcagcgaggaggaggagttccagcaagatgttatggctagggcatgcttacagaaactgaaaggaaccactgagttattgcctaaacgtccccagcacttacccggtcaccccggatggtacaggaagctgtgtcctaggttggacgacccagcatggactccagggccttcacttctgtccttacagatgagggtgacaccgaagctgatggccctcacttgggacggattccctctgcattactctgagagacacggatgggggtaccttgtgccgggacggcgtgacaatctggcaaaactaccaacaggtaccaccctggaatcagctggtgtcgtatgtccttacagggcaatcgagagcctgtacagaaaacattgcctggaacagggaaagcagcagttaatgccacaagaagccggtctggccgaagagttccttttgaccgacaattccgccatatggcagacagtcgaggaacttgattaccttgaagtcgaagccgaagccaaaatggagaacctgcgagcagccgtgcctggccagcccctggcactgactgcaagaggaggaccaaaagacactcagccatcctatcatcacgggaatggcccttacaatgacgttgacattccagggtgttggttctttaagctgccgcataaagacgggaattcgtgtaatgtgggctcgcccttcgctaaagatttcttacccaagatggaagacggtaccctgcaggccggaccagggggagcatccggcccaagggctctggaaataaacaagatgattagtttttggcgcaatgcccacaagaggatttcctcacaaatggttgtctggctgccccgaagcgctctaccaagagctgtgataaggcatccggactatgacgaagaaggcctgtacggagccattttgccgcaggttgtcactgccggaaccataacccggagagccgtggaacctacctggctgaccgcctccaacgccaggcctgatcgggttggatcggaattaaaagccatggtgcaagcaccccctggttatacattggtcggcgcagatgtcgattctcaggaattgtggatcgctgctgtgctgggcgatgcccacttcgctggcatgcacggatgtaccgcatttggatggatgacactacagggacgcaaatctcggggaaccgatctgcactcaaagactgcgacaacagtgggtattagcagggagcacgcaaaaatctttaattatggtcgcatctatggcgcaggacagccattcgcagagcgcctgctaatgcagtttaatcatcggttaactcagcaagaagccgcagaaaaggcacagcagatgtacgctgccacaaagggcctccgttggtacaggcttagcgatgaaggggaatggctagtgcgagaactgaatttgccagtcgatagaacagaggggggatggatttcactccaggacctgcggaaggtgcaaagggaaaccgcaagaaagagtcagtggaaaaagtgggaggtcgttgccgagcgcgcttggaagggtgggacggagtcagagatgttcaataaactcgaatctatcgccacatcggacatcccacgaacacccgtgcttgggtgttgtattagcagagccctggagccatccgctgtgcaggaggagttcatgactagtcgcgttaactgggtggtgcaatcatctgcggtggactatctgcatctgatgctggtggccatgaagtggctcttcgaggagttcgctatcgatgggaggttttgcatctccatccacgacgaagtgagatacctggttagagaggaggaccgctatcgggctgctctagcgctgcagatcactaaccttttgacaagatgtatgttcgcgtacaagctgggcctcaatgatctaccacaatctgtggcgtttttcagcgcagttgacatcgatcggtgccttcgcaaagaggtgacaatggactgtaagacaccaagcaatcctacagggatggagaggcgatatggaatcccccagggagaagcactggatatctatcagataattgagcttacaaaaggcagccttgagaagaggagccagcccggaccctag

SEQ ID NO: 235453 - DNA, 1458 bp, synthetic construct
  misc_feature 1..1458: note = Description of Artificial Sequence: Synthetic coding sequence
  source 1..1458: mol_type = other DNA
atgcgttcccgtgtggctgtgcgcgcatgtcacaaagtctgccggtgcctcctgtctgggttcggcggaagggtggacgccggacaacctgagctgctgaccgaaagaagctcaccgaaagggggtcacgtcaaaagccacgccgagctcgaaggcaacggggagcatcccgaggcccctggctccggggagggatccgaagcactgctggaaatatgccagcgcagacacttcctctccggatccaaacaacagctgagtcgggacagcctgttgagcggctgccatccagggttcggccctctaggggttgagcttaggaagaacctggcagctgaatggtggacatccgtcgttgtcttcagagaacaggtgtttcccgtagatgcactccaccacaagcccggaccactgcttcccggagacagcgccttccggctggtatccgcagagaccctccgtgagatattacaagataaagaactgtcaaaagaacagctggttgcctttctggaaaacgttcttaaaacaagcggaaagttgcgcgaaaatctgctgcatggggctttggagcactatgtgaactgtctcgacctcgttaacaagcgtctgccatacggcctcgcccagataggagtgtgttttcaccccgtgttcgacacgaaacaaatccggaacggtgtaaagtccatcggcgaaaagactgaagcctctctggtgtggtttacgccccctcgcacctccaatcagtggctagatttttggctaagacacagactacagtggtggcggaagttcgcaatgtcgccctcaaatttcagcagtagcgattgtcaggacgaggaaggcaggaagggaaacaagttgtactataactttccctggggcaaagagctgattgagacactgtggaacttgggtgatcacgagttgttgcacatgtaccctgggaatgtcagcaagctgcacggacgggatggcagaaaaaacgtggtgccctgtgtgctaagtgtgaacggtgacctggacaggggaatgctagcctacctatatgattcatttcagctaacggagaactccttcacgaggaagaagaatctccataggaaggtgctgaagctccatccctgcttggcccctatcaaggtggcactggacgtgggacgtgggccaacattggaactgaggcaagtatgtcaaggcttgttcaatgagcttctggagaacggtatttctgtgtggccgggatatttggaaactatgcagagcagcctggaacagttgtatagtaaatacgatgaaatgagcatcctattcaccgtgctggttactgagaccaccctggaaaacgggttgatccatttacggagccgtgacacgacaatgaaagaaatgatgcacatcagcaaattgaaggattttcttattaagtatatatcatccgctaaaaacgtgtag

SEQ ID NO: 235454 - DNA, 7773 bp, synthetic construct
  misc_feature 1..7773: note = Description of Artificial Sequence: Synthetic coding sequence
  source 1..7773: mol_type = other DNA
atgaacctgctgcgccgttctggaaaacgcagacgctctgagagcggttctgatagcttctccgggtccgggggtgacagctcggcttccccccagtttctgagcggttctgttttgtccccgcctccagggctcggcaggtgcctgaaggctgccgctgcaggtgagtgtaagccaaccgttccagactatgagagggataagctgctgctcgccaactggggacttccaaaagcggtgcttgagaagtatcactcctttggtgtgaaaaagatgtttgaatggcaggccgaatgcctgctgttaggccaagttctggaggggaaaaaccttgtctactctgcccctacaagcgcgggaaaaactctcgtggcggagctgctaattctcaagcgcgtactggaaatgcgtaaaaaggctctgtttattctgccattcgtttccgtcgccaaagaaaaaaagtactacttacagtcattatttcaggaagtgggaataaaagtcgacggctatatgggtagtacttctccctcgcgccacttttcaagtttggatattgcggtctgcaccatcgagagggccaatgggctgattaaccgtttaatcgaagagaataagatggatctactcggtatggtcgtggtagacgagctgcatatgctgggcgattcccatcggggttacctcctagaactgctactgaccaagatctgctacattacaagaaagagcgcatcctgccaagccgatctggcttcatcactcagcaatgccgtgcagatcgtcggcatgagcgctactctacccaatctagagttggtcgccagctggctgaacgccgagttgtaccatacagactttcgtcctgtgcctttgctggaaagtgtgaaggtcggcaatagcatctacgacagtagtatgaagttggtcagggagttcgagcctatgcttcaggtgaaaggagacgaagaccatgttgtatccctatgctacgagacaatatgtgataaccattcggtgcttctgttctgtcccagtaagaagtggtgcgaaaaactggccgatattattgccagggaattttataacctgcaccatcaagctgagggcctagttaagccttctgagtgcccccctgtgatcctggagcaaaaggaactgctggaggtaatggaccagctccgcagattgccatctggcctggattctgtcctccagaaaactgtgccctggggggtggcttttcaccatgctgggctgaccttcgaggaacgggatatcatcgagggcgctttcaggcagggcctgattcgggttctggctgcaacgtcaacacttagctcaggtgtgaatcttccagcacggagagtgattatccggaccccaatcttcgggggaaggccactggatattctcacgtacaaacagatggtggggcgtgctgggagaaagggggtggatacagtcggcgagagcattcttatatgcaagaatagtgagaagtctaagggcattgctttactgcaaggtagtttgaagcctgtgagatcttgcttacagagacgggagggcgaagaagttacagggagtatgatcagagctatcttggagatcatagttgggggtgtagcctctacgagccaggatatgcatacctatgcagcctgtacgttcctggccgcttccatgaaagagggcaaacagggcattcagaggaaccaggaatcggtgcaactcggggctatagaggcctgtgtgatgtggttactggagaatgagttcattcagtccacagaggccagtgacggtactgaaggcaaagtgtaccaccccacccatctggggtcagctaccctctcgtcttcgctgtcacccgctgataccctcgatatctttgctgacttgcagagggccatgaaaggtttcgtgctcgagaatgatctacatatcctttatctggtgactcctatgttcgaggattggactaccattgattggtatcggttcttttgcctgtgggagaagctgcctactagtatgaagagggtggctgaactcgttggagtggaggaagggtttctggcccgatgcgtgaagggtaaagtcgtggccagaaccgaacgccagcacagacagatggctattcataaacggttctttactagcctcgtcctgcttgacctcatttcagaagtgcccttaagagagatcaatcagaagtacggttgcaataggggtcagatccaaagccttcagcaaagcgcagctgtatacgcgggaatgatcaccgtgttttctaaccgactcggctggcataatatggaattgctgttgagccagttccaaaagcgcttgacctttggcatccagagagagctgtgcgatctggtgcgcgtatccctcttgaatgctcagcgggctagggtgctgtatgccagcggattccacaccgtagcggatctggcgagagccaatattgtggaggtcgaggtgattctgaagaacgcggtgcctttcaagtcagccagaaaagctgtagatgaagaggaggaagccgttgaggagaggcgcaatatgcgtacgatctgggtaacaggaaggaaggggctcaccgaacgggaagccgcagctcttatcgtggaagaggccaggatgatcttgcagcaggatctcgtggagatgggcgttcagtggaatccttgtgccttgctacacagctctacctgcagtctgacacactctgagtcagaggtgaaagaacacacctttattagccagacgaagtcatcatataagaaactaacctcaaagaataagtccaatacaattttctccgacagttacatcaaacattcacccaatattgtgcaagatctaaataaaagccgcgaacacactagcagcttcaattgtaacttccagaatggtaatcaggagcaccagacgtgttcaatttttagggccagaaagcgtgcgtcgttagacatcaataaggagaagccaggagccagtcagaacgagggaaagacgtctgacaagaaagtggtgcaaaccttctcacagaagaccaagaaagctcccttaaactttaacagcgagaagatgtcccgatcgttccgctcatggaagaggaggaaacatctgaaacgatccagggacagtagccccctgaaggactccggcgcttgcaggatccacctgcagggccaaacgctgtccaatccctctctctgtgaggacccctttacacttgacgagaaaaagaccgaatttcggaacagtggaccctttgcaaagaacgtgagcctcagcggcaaggaaaaggataacaaaaccagctttccgcttcagattaagcagaactgcagttggaacatcaccctaacgaatgacaattttgtagaacatatcgttacgggaagccagagcaagaacgtaacctgccaggccacgtcggtggtgtctgagaagggcagaggggtggctgtggaggcagagaaaattaatgaggtgttgatccagaacggcagtaagaaccagaacgtgtatatgaaacaccacgacatccaccccattaatcaatacctcagaaaacagtctcacgagcaaaccagtaccattacaaagcaaaaaaatattatcgagcgtcagatgccctgcgaagctgtttcatcctacatcaaccgagacagcaatgttacaatcaattgtgaaaggatcaagctcaatactgaggaaaataagccctcccacttccaggccctgggagatgacattagcagaaccgtgatcccatccgaagttctcccttcggctggagctttctccaagtctgagggacagcacgaaaattttctgaatattagccgtctccaggagaaaaccggcacatacacaacgaataagacaaaaaacaaccacgtcagtgacctgggcttggtgttgtgtgactttgaagacagcttctatctggatacacaaagcgaaaagattattcagcaaatggccacagagaatgcaaaactgggggcaaaggacactaatttggccgcaggaatcatgcagaagagtcttgtgcagcagaatagtatgaatagctttcagaaagaatgccatataccattccccgcagagcaacacccactgggagccaccaaaatcgatcatctggatcttaaaaccgttggcactatgaagcagagctctgacagtcacggcgtggacattctaactcccgaatcccctatattccatagcccgatattactagaagaaaacggcctgttcttgaagaaaaacgaggtctccgtcactgattcccagctgaactccttcctgcagggatatcaaacccaggagacagtcaaacccgttatattgctcattccacagaaaagaactcctactggggtagagggtgagtgtctacctgtgcccgagacgtctcttaacatgagcgactccctgctttttgattctttttccgacgactatcttgttaaggaacagctcccggatatgcaaatgaaagaacccctgccttccgaagttacgtccaaccatttctctgatagcttatgtctgcaggaagacctcatcaagaagtcaaatgtaaacgaaaaccaagatactcaccagcagctgacgtgcagcaatgacgagagtatcattttttccgaaatggactccgtgcagatggttgaggctcttgacaacgtggatatcttcccagtgcaggaaaaaaatcacactgtggtttctcctcgcgctctggagcttagcgatccagtgttagacgaacatcaccaaggagaccaggatggcggtgaccaagacgaacgggcagagaaatcaaaacttactggcaccagacagaaccattcatttatttggagcggagctagtttcgacctgtctcccggattacagcgcattctggacaaagtcagtagccctctggaaaacgagaagctgaagtctatgaccattaatttttccagcctgaaccgtaagaatacggagctcaacgaagaacaagaagtcatctccaacctggaaaccaaacaggtgcagggaatatcgttcagctccaacaacgaggtaaaatccaaaattgagatgctcgagaataacgccaaccacgacgaaacaagctccctgctgcctagaaaggaatcaaacatcgtggacgataatggactaatcccacccaccccaatacccacttctgcaagtaaactgacattccccggaattctggagacacccgtgaacccatggaagacaaacaacgttctgcagccaggggagagctacttatttgggtccccttcagatattaaaaaccatgaccttagccccggttcgcgtaacggattcaaggacaatagccctatctcagacacaagtttttcactccagctttcccaggacgggctgcaactgacccctgcgtcatcatcaagtgagagtcttagcattatcgacgtggcctcagatcagaacttgtttcaaaccttcatcaaagagtggcggtgtaaaaaacgcttcagcatcagccttgcctgcgaaaaaattaggtcattaacaagttcaaagacagctacaatcggtagtagattcaagcaggctagctctcctcaagaaattcctattcgcgacgatggcttcccaataaagggctgtgacgacacactggtcgtcggactagccgtgtgttggggtggtagagatgcgtactacttctcgctgcaaaaggagcagaaacatagtgaaatcagcgcctcattagtgcccccatctttggaccctagtctaactctcaaagatcggatgtggtacttacaatcatgtttaagaaaggaaagcgataaggagtgtagtgtggtcatttacgattttattcagagctacaaaatccttctgctgtcttgtgggatatccctggagcagtcttacgaagatcctaaggtggcttgttggctgctcgatcccgattcccaggaaccaaccctgcactccattgtgaccagcttcttgccccacgagctgcctctgctggaaggaatggagactagccagggtatccagagcttgggactgaacgcgggatccgagcacagtggtagatatcgggctagcgtggagagcattctgatattcaactccatgaatcagctgaacagtctcctgcaaaaggaaaatctgcaggacgtgtttagaaaagtggagatgccctcacagtattgcctggctcttcttgagctgaacggcattggtttctccactgctgaatgcgagagtcagaaacacattatgcaagctaagctcgatgcgattgaaacacaagcctaccagcttgctggccacagctttagtttcactagctcggatgacatcgctgaggttctatttttggagttgaagctgcctccgaatcgagagatgaaaaaccaggggagtaagaagaccttgggctcaacaagaagaggtatcgataacggcagaaagctaaggctcggaagacagttttccactagtaaggatgtcctaaacaaactgaaagccctgcaccccttgcccggtctgattctggaatggcgaagaatcacaaatgctattaccaaagttgtattccctctacagcgagaaaagtgcctgaatccctttctgggcatggaacgcatttacccagtctctcagagtcacactgctaccggcagaatcacctttaccgagccaaatattcagaacgtaccacgcgatttcgaaatcaagatgcctaccttggtcggagagtctcccccatcacaagcagtggggaaaggcctccttccaatgggcagaggcaagtacaagaaggggttttccgttaaccccaggtgccaagcccaaatggaagagagagccgctgacagaggaatgccattttccatctcaatgaggcacgccttcgtaccattcccgggtgggtctatcctggctgctgattatagtcagttggagttaagaatcttggctcacctgtcgcacgatcggaggctcatacaagtattgaacacaggagccgacgtgttcagatccatagcagctgaatggaaaatgatcgagcccgagagcgtcggagacgatctgcggcagcaggcaaaacagatttgttatggaatcatctatgggatgggggctaagagcctgggcgagcaaatggggatcaaggaaaacgatgcagcctgctacatagatagtttcaagagtaggtatacgggcatcaatcagttcatgactgagactgtgaaaaactgtaaacgggatgggttcgtgcagacaatattaggcagacgcagatacctcccagggatcaaggacaacaatccctaccgtaaagcacatgccgagcggcaggcaatcaatacaatcgtgcagggctccgcggcagatattgtgaagatagctacagtaaatatccaaaaacagctggagactttccactcaacttttaagagccacggtcaccgtgagggaatgctgcagtcggatcagacagggcttagtcgtaagcgtaaactgcagggcatgttttgcccaatccgtggcggtttctttatcctgcagctgcacgatgaacttctctacgaggttgcggaagaagatgtggtgcaggtagctcagatcgtgaagaatgagatggagtctgccgtgaaactgagtgtcaaacttaaggtcaaagtgaagatcggtgctagctggggggaactgaaagactttgacgtgtaa

SEQ ID NO: 235455 - DNA, 8180 bp, synthetic construct
  misc_feature 1..8180: note = Description of Artificial Sequence: Synthetic coding sequence
  source 1..8180: mol_type = other DNA
atgaacgggcaccgttttacatttcggacacgtagcctgctccctctgcagaagggacaacaccgatgtatcacaaagcttttggctcataatgatccatggggaatctttagggcacctagttccagaagatcttatagtgtttctggagtatgccagccagcgataccaaatagtagcctccatatccctcataatgcttgttggctaaaatggaagctttgttccgaaatagctcttccctaccatcacattctgggggagagacgaaagttgtgttccatcaggcggtttgaattcgaggactggcgagaagatgttagatcctgctgccaggctcgtgttctcccccgagggaggaccttgggtctgtggctggccctgatcggccgagaagaatttgctatgaacttgttgcgtagaagcggcaagcggaggaggtccgagtctggcagcgatagcttcagcgggtccggcggagactcctcggcctcgccccagtttctttccggcagcgttctttccccacccccaggcctcggtagatgtctcaaggcagcagccgctggggaatgcaagcccacagtcccagactacgaaagggataaacttctcttagctaattgggggctgcccaaagcggtgttggaaaagtaccattctttcggagtgaagaagatgttcgagtggcaggccgagtgtctactgctggggcaagtgctggagggaaagaacctcgtgtactctgccccaacaagcgccggtaaaacactggtagctgaattgctcatcctgaagcgcgtgctggaaatgcgaaaaaaggccctctttattttaccattcgtatccgtagccaaggagaagaagtactatctgcagtccctgttccaggaggtcgggatcaaggtggacggctacatgggttcgacttccccatcccggcatttctcttctctagatatcgccgtttgtaccatcgaacgcgctaacggcctgatcaaccggctgatcgaagagaacaagatggatctgttgggcatggtggttgtggacgagcttcacatgctgggcgattctcaccggggatacttgctcgaactcctcctgaccaaaatctgttacatcacaagaaaatccgcatcttgtcaagcagacctcgccagtagtctctctaatgctgtacagattgtcggcatgagcgctaccctgcctaacctcgagctggtcgcgtcctggcttaacgccgagttatatcacaccgactttcgccctgtaccactgctcgaaagtgtaaaagtgggcaatagtatctacgactcatccatgaagctggttagggagttcgagccgatgctgcaggtcaagggtgacgaggaccacgttgtttccttgtgttatgagaccatctgcgataatcactcagtattgcttttctgcccttccaagaaatggtgtgaaaagttagccgacattattgccagagaattttataatctgcatcatcaggcagaaggcgagggcctggtgaaaccttctgaatgccctcctgtcattcttgagcagaaggagcttctggaagttatggatcagctgagacgacttcctagcggactggatagcgtgctccaaaaaacagtcccttggggggtggccttccaccacgccggattgacctttgaggagcgggatatcattgagggcgctttcaggcagggactgatacgcgtactggcggctacttcaaccctaagtagtggggtgaatcttcccgcaagacgcgttatcatccgaacgcccattttcggcggacggccactcgacattctgacatacaaacagatggtaggcagggccggacgaaagggagtcgacaccgtggaatcaattctgatctgtaaaaattcagaaaaatccaaaggtatagccctgctccagggatcgctgaagcctgttcggagttgcttgcagcggagggaaggagaggaggtgaccggcagcatgatcagggccattctggaaatcatcgtcggtggcgtggcatccacatcccaggacatgcacacttacgctgcttgcacgtttcttgccgcttcaatgaaggaaggcaaacagggtatacagaggaaccaggagtccgtccagctgggggctatcgaagcttgtgtgatgtggttgctggagaatgaatttattcagtccactgaggccagcgatggaactgagggcaaggtgtaccacccaactcacttggggtcagccactctatcaagctctctttctcccgctgacaccttggatatctttgccgatctgcagcgtgcgatgaaaggcttcgttttggaaaacgacctgcacatcctgtaccttgtcacacccatgtttgaagactggaccactatcgattggtatcgcttcttctgcctgtgggaaaaacttcccaccagcatgaaaagagtagcagagctcgtcggggtggaggagggattcctcgccaggtgtgtgaagggaaaggttgtggctcgtaccgaacgacagcaccggcagatggctatccacaagcggttctttacgtctctggtcctgctggatctgattagcgaggtgccattgagggagatcaaccagaagtatgggtgtaatcggggtcaaatccaatcactgcagcaatctgcagcagtatacgctggcatgatcacagtcttctccaataggttagggtggcacaacatggagcttctcctatctcagttccagaagcgtctgacctttggtatccagagagagctatgcgacctggtgagggtgtctctcctgaatgcgcaacgcgctagggtgctgtacgctagtggctttcacacagtggccgatctggcccgtgccaacatcgtcgaggttgaagtgatcctcaaaaacgccgtgcctttcaagagcgcccgaaaggcagttgatgaagaagaagaggcggtagaggagagacgcaatatgcgcactatctgggtgaccggccgaaagggactgacagaacgggaggccgcagccctgatagtggaggaggcgcgaatgatcctgcagcaggatctggtggagatgggggttcagtggaacccatgcgcattgctgcacagtagtacatgtagccttacccactctgaatcagaggttaaagaacacacctttatttcacaaactaagtcatcctacaagaaactgacttccaaaaacaagtcaaatacaatttttagcgattcttacatcaagcactctcccaacatagtgcaagacctgaataagagccgcgagcacacatcgagttttaattgcaatttccagaatggtaaccaggaacaccagacttgctctatctttagggccagaaagagggcctctctggatatcaacaaagagaaacctggcgcaagtcagaacgaggggaagactagcgataaaaaagttgttcagactttcagccagaagacgaaaaaggcacccctgaatttcaacagcgagaagatgtcaagaagcttccgctcgtggaaacgtagaaagcatctgaagagatcccgcgactccagccccctcaaagactccggtgcctgtcggatccacctgcaggggcagacgctttctaatccctcgctgtgtgaagatccgtttacactcgacgagaagaaaacagagttcaggaatagcgggcctttcgccaagaacgtctccctgtccggaaaggaaaaggacaacaagacgtcttttccgctgcagatcaagcagaactgttcctggaatatcaccttgaccaatgacaacttcgttgagcacatcgtcaccggatcccagtcaaagaatgtcacttgtcaagcgacatccgtggtgtcagagaaaggacgaggcgtagccgttgaggcagagaaaattaacgaagtcttaattcagaacggctcaaagaatcagaacgtgtatatgaagcatcacgatattcacccaataaatcagtacttacgaaagcagtcccatgagcaaacaagcactatcacaaagcagaaaaatattatcgagaggcagatgccttgtgaggctgtgtcctcatacattaatcgcgattccaacgtcacaatcaactgtgagcgcattaaacttaacacggaggaaaacaagccctctcacttccaggcactcggggatgatatctccagaacagtgattccgtctgaagtgcttcccagcgccggagcctttagtaaatcagagggccaacacgagaactttctaaatatcagtagactccaggagaagacaggtacttatactacaaacaaaactaagaataatcatgtctctgatcttggtcttgtcctctgtgatttcgaggactccttctaccttgacacccaatctgaaaaaatcatacaacaaatggctaccgagaacgccaagctcggcgcaaaggatacgaacctggcagccggtatcatgcagaagtccttggtccagcagaacagtatgaacagttttcagaaggaatgtcatatcccgtttcctgcagagcagcatcctttaggggctaccaagattgaccacctggacctcaaaacagttgggactatgaagcagtcttctgacagtcatggcgtcgatatcttgactcctgagtcgcctatcttccattctcccatcctcctggaggagaacgggctttttctcaagaaaaacgaagtaagcgtaactgactcccagctgaactccttcctgcagggctaccagactcaggaaacagttaagccggttatactcctcatcccccaaaagagaacccctactggcgtggaaggcgaatgcctgcccgtgcctgagacctcccttaatatgagtgacagcctgctattcgacagcttttccgacgactatctggtcaaggagcagctgcctgatatgcaaatgaaagaacctcttccatccgaagtgaccagcaatcatttttccgactcactgtgccttcaggaagacctcatcaagaaaagcaacgtgaatgaaaaccaggatacacatcagcaacttacatgcagtaacgatgaatctatcatcttcagcgaaatggatagtgttcaaatggtcgaggctctggataacgtcgacatatttcctgtgcaggaaaaaaaccacaccgtcgtctccccccgtgctctggaacttagtgaccccgtgctcgatgagcaccaccagggcgaccaggacgggggagaccaggacgaaagagccgagaagtcaaagctgacagggacacggcaaaaccatagctttatctggtcaggagcgtccttcgatctctcacccggacttcagcgcattcttgataaagtatcaagtcccctggagaatgaaaaattgaagagcatgaccatcaacttttcttctcttaatcgaaaaaacaccgagctgaacgaagagcaggaggtcattagtaatttggaaaccaagcaggtgcaaggcatttcattttcaagcaataatgaagtgaaatccaaaatcgagatgttagagaacaatgcaaaccatgatgagacatcctcgctgcttcctcgaaaagagtccaatatcgtagacgacaacggactaatcccacccactcctattccgacatctgccagcaagctcacattcccaggaatcctggaaacgcctgtgaacccatggaagactaataacgtgctgcagcctggcgagtcctatctgttcgggtctccgagtgacatcaaaaaccacgatctctcacctggatcacggaatggatttaaggacaactctcccatctcagatacatcttttagcctccagctgagccaggacgggctgcagttgaccccagcgtcatcatcctcagagagcttgtcgattatagacgtggcctccgaccagaatctgtttcagactttcatcaaggaatggcggtgcaagaagcggttctctatatcccttgcttgtgagaagatacgttcattgacatccagcaaaactgctactatcggctccaggttcaagcaagcgtcgtctcctcaggaaattcccattagggacgacggatttcccattaagggatgtgacgacaccctcgtcgtagggcttgctgtttgctggggcggacgggatgcatactatttttccctacaaaaggaacaaaagcattccgagatttctgcctcgttggtgcccccttctttagacccgagcctaaccctaaaggatcggatgtggtaccttcagtcctgcctgcgcaaagagtccgacaaagagtgtagtgtggtgatttatgatttcatccagagctataagatcctgctgctgtcttgcggcattagcctggagcaatcttacgaagaccctaaggttgcctgttggctgttggaccccgattcacaggaaccaaccctgcactcaatcgtaacctccttcctgccacacgaacttcctctgctggagggtatggagacctcacagggcattcagagcctggggctgaatgcaggcagcgagcattcaggacgatacagagcctctgtggagtctatcctgatctttaactctatgaaccagctgaattccctgctccaaaaggaaaatttacaggacgtatttcgcaaagtggaaatgccaagccagtactgcctcgcgttgcttgagctgaatggtattggtttcagcaccgcagagtgtgagagccagaaacacattatgcaggctaagttggacgccattgagacccaggcctaccagttggccggacactccttctcattcacttcttctgatgacatagcagaggtcttgtttcttgagctgaaattacccccaaaccgggaaatgaagaaccaagggtctaaaaaaacccttggctccactagacggggaattgataatggtagaaaattacggctggggcgacagttctccaccagtaaagacgtgctgaacaagcttaaggctctgcatccattgccaggactgatcctggagtggaggcgcataaccaacgccatcacaaaagtggttttccctctgcagcgagaaaagtgtctcaacccttttctggggatggagaggatttaccctgtctcacagtcgcacaccgctacaggcagaattactttcaccgaacctaatattcagaacgtccctcgtgacttcgaaatcaaaatgccgactctggtcggcgagtctccacctagtcaagccgtggggaaaggtctgctacccatgggcagagggaagtacaagaaggggttctccgtgaatccaaggtgtcaggctcagatggaagagcgagccgcagatcgcggaatgcctttctctatctcaatgcggcacgccttcgtgcctttcccagggggatctattctggccgcagactactcgcagctggagctgcgcatcctcgcccacctatcccacgacagaaggcttatccaggtactgaataccggcgctgacgtgttccgcagcattgccgctgaatggaaaatgatcgagcccgagtctgtcggcgatgacctgcggcagcaggcgaagcaaatctgttacggaataatttatggcatgggcgctaagtctctgggcgagcagatgggaataaaagagaatgacgcagcctgttacatcgacagtttcaagtctagatacactggcatcaaccaatttatgaccgaaaccgtcaaaaactgcaagcgggacggatttgtgcagacaatcttgggcaggagacgttatttgcccggaatcaaggacaataatccatatcgcaaggcgcatgccgaaagacaagccatcaataccatcgttcagggttccgccgcagacatagtgaaaattgcaaccgtgaatatccaaaagcagctggaaacattccacagcacgttcaagagccacggtcacagagaaggaatgctccaatctgaccagactggcctgagccgtaagcgtaaactgcaaggcatgttctgccctatacgtgggggattcttcattcttcagttgcacgacgagctcctctacgaggtcgcggaggaggacgtagtgcaagtggctcagatcgtcaagaacgaaatggaaagcgccgtcaaactgtcggtcaaactgaaagtgaaggtaaaaatcggcgcatcatggggggagctgaaggatttcgatgtgta

SEQ ID NO: 235456 - DNA, 6641 bp, synthetic construct
  misc_feature 1..6641: note = Description of Artificial Sequence: Synthetic coding sequence
  source 1..6641: mol_type = other DNA
atgccaacttccaatagtcagaaggagctgctagaggtgatggatcagctgagacgcctgccaagtggcctggatagtgtgttacaaaagacagtaccatggggcgtggcattccaccacgcaggattaactttcgaagaaagggacatcatcgaaggcgcatttcgccagggcttaatacgggtgctcgcagctactagcactttgtcaagcggcgtcaatctgcccgctagaagggtcattattagaaccccgatcttcggagggcgaccactggacattctgacttataaacaaatggtaggtagggccggtagaaagggtgtcgataccgtgggcgagtcaatcctgatatgcaaaaacagcgagaaaagcaagggcatcgctctactgcagggaagtttgaaacccgtaaggagttgcttacagcgtcgagagggcgaggaggtgaccggcagtatgattagagcgatcctcgagattatcgtgggcggagtggctagcacttcacaggacatgcacacatacgccgcatgcacttttttagcagcctctatgaaagaaggaaagcagggaatccaacgcaaccaggagtctgtgcagcttggtgccatagaagcatgcgtcatgtggctgctggagaacgagtttatacaatcaacagaggctagcgatggcactgaggggaaggtgtaccaccccacacatctgggcagcgcaaccctcagctcttccctcagccccgctgacacgctcgacatcttcgcggacctgcagcgtgccatgaaagggtttgtgctggagaacgaccttcacattctttacctagtgacgccaatgtttgaggactggactaccatagattggtatcgcttcttttgtctgtgggagaagctgccgacaagtatgaaacgcgtcgccgaactggttggggtcgaagaagggttcctggcacgctgtgtgaagggtaaagtggtcgctcgaaccgagcggcagcatcgacaaatggcaatacacaagcgctttttcacaagtctggtgctgctggatctgattagcgaagtgccgttacgggagatcaaccagaagtacgggtgtaacagaggccagatccaatctttgcagcagtccgcggcagtgtacgccggtatgatcaccgttttctccaacaggctgggctggcacaatatggaactcctgctgagccagttccagaagcggctcacttttggaattcagagagagttatgcgacctggtgcgggtctcattattgaatgctcagcgggcacgtgtcttatacgcatccggattccatacggttgctgatctggcccgtgcaaacattgtcgaagtggaagtgatcttgaaaaacgccgtgcccttcaagtcagcacgcaaagcagtagacgaggaagaggaggctgttgaagagcgcagaaatatgcgtaccatttgggtaacagggagaaagggcctcaccgagagggaggctgcagccttgatcgtcgaagaagcaaggatgatcctgcagcaggatctggtagaaatgggagtacaatggaatccctgtgctctcctccacagtagcacatgttctctgacccactccgagagcgaagtgaaagaacacactttcatttcccagacaaagagcagctataagaaacttacgagcaagaataagtctaacactatattctcggactcctatatcaagcatagcccgaacatcgtgcaggatctaaacaagagtcgggaacataccagcagctttaactgcaactttcaaaacggcaaccaagaacatcagacgtgcagcatctttagagcccgaaagagggctagccttgacatcaacaaggagaagcctggcgctagccagaacgagggtaagacgtccgataaaaaagtggtccagacattcagtcaaaaaacaaagaaagctcctttgaactttaatagcgagaagatgtcaaggagttttcggtcttggaaaagacggaagcatctcaaaaggtctcgcgactcttctcccctcaaagatagcggagcgtgccgcattcatctgcagggccagaccctgtccaatcccagcctctgtgaagatcctttcacactggacgaaaaaaaaacagaatttcgcaatagcgggccatttgctaagaatgtgagcttgtccggcaaggagaaggacaataaaactagttttcctctgcagataaaacagaattgtagctggaatataacgttgaccaacgacaatttcgttgagcatattgtgacgggctcgcaatccaagaatgtgacatgccaggcaaccagtgtcgtgtcagagaagggacgaggagtcgcagttgaggccgagaagatcaatgaggtgctgatccagaatggttcaaagaatcagaacgtgtatatgaagcatcacgatatacatcccattaatcaatacctgcgcaagcagtctcatgagcagacttccaccatcacaaaacaaaagaacataatcgaacgtcaaatgccctgtgaggcggtctcttcatacattaatcgggattccaatgtgaccatcaactgtgagcggattaagttgaatacggaagaaaacaagccctcacatttccaagcgctgggcgacgatatctctagaactgtgatcccttctgaggtacttccttccgccggagctttctctaaaagtgaaggccagcatgaaaactttctgaacattagtagactacaggaaaagacgggtacttatacaaccaataagacgaagaataaccatgtcagtgacctcggcctagtcctgtgcgacttcgaagattcgttctacctggacactcaatctgaaaagatcattcagcagatggcaacagagaatgctaaactgggagctaaagacaccaacctggccgctggtattatgcagaagagcctcgtgcagcagaattcaatgaattcgtttcaaaaagagtgtcacattcctttcccagcggagcagcacccattgggggctacgaagatcgaccacctcgacttgaaaacagtgggcacaatgaagcagtcttctgactcacacggtgtggatattttgacacccgaaagcccaatttttcattctcctatattgctggaagaaaacggcctcttcctcaaaaaaaacgaagtgagcgtaacagactcacagctgaacagctttctgcagggctaccagacacaggaaaccgttaagcctgtgattctgttgatcccccagaaacggactcccactggcgtagagggggaatgtcttccagtaccggaaaccagtctgaatatgagtgactctctgctcttcgacagcttctctgatgattacctcgttaaggagcagctgcccgatatgcaaatgaaagagcctctaccctctgaagttacttccaaccatttcagtgattccctgtgcttacaggaagatttgatcaaaaaatccaatgtgaacgaaaatcaggacacccaccagcagctaacctgcagtaatgatgaatcgatcatatttagtgaaatggattcagtgcagatggtagaagccctggataatgtggatatatttcccgtccaggaaaagaaccatacagtcgtttccccgagagcactcgagctctccgatcccgtcctcgatgagcaccaccaaggggaccaggacgggggagaccaggacgaaagggcagaaaagtcgaagctgaccggtaccaggcagaaccactccttcatatggtcaggggcttcttttgatctgtcccccggtcttcagcgaatcctggacaaagtgagttcccccttggagaatgaaaagctgaaaagtatgaccattaacttttcatcactcaatcgaaagaatactgaacttaacgaggagcaggaagtgatcagcaacttggagactaaacaggtacaggggatcagtttcagttcaaacaacgaggtaaaatcaaaaattgagatgctggaaaacaacgccaatcacgatgaaacaagctctctgttgcccagaaaggagagtaatatcgtcgacgataatgggcttataccacctaccccaattcccacctctgcctccaaactcacattccccggtattctggaaaccccggtgaacccctggaagaccaacaacgtcttgcagccgggtgagagttacctgttcgggagcccgtccgatatcaagaaccacgatctgtctcctggtagcaggaatggctttaaggacaactcaccgatctcagatacaagcttctccctgcagctgagccaggatggactgcagctgactcccgcttcctcttcttctgaaagcctttcgattatagacgtggccagtgaccaaaacttatttcagacattcattaaagaatggcgatgcaaaaagcgcttctctatttccctggcctgtgagaaaatcagatccctgacgtcaagcaaaacagccactatcggcagccggttcaagcaggcctcttcacctcaagagatcccaatcagggatgacgggttcccaatcaagggctgtgacgacactctagtggttgggcttgcggtgtgttgggggggacgggatgcctattactttagcctgcagaaggagcagaaacattctgaaatttccgcatctctcgtccccccttccctcgaccctagcttgaccctgaaagacaggatgtggtatttgcaaagttgtctcagaaaggagagcgacaaggagtgctccgttgtgatctacgatttcatccagagctacaagatattactgctatcttgcggtatttcattggagcagtcttacgaagaccctaaggtcgcatgttggctcttggatccagacagccaagagcccactctgcactcaattgtaacaagttttctaccacacgaactccctctgttggagggcatggaaaccagtcaagggattcaatctctgggactaaacgccggatctgagcactccggacgctaccgggcatctgttgagtccatcttgattttcaactccatgaaccaactgaacagcctgcttcaaaaagagaatctgcaagacgtgtttcgcaaggtggaaatgccttcgcagtattgtctggcactactcgagctgaacggtataggattttccacagctgaatgcgagagccagaaacatatcatgcaagctaagcttgatgctatagagactcaagcctaccagcttgcgggacacagcttctcattcacgagctccgacgatatcgcagaagtcctgttcctggagttaaagctgcctccaaacagagagatgaagaaccagggaagcaagaaaaccttaggttcgacaaggagagggattgataacgggaggaagctaaggctcggaagacagttttccacctctaaggatgtccttaacaaactcaaagctctgcatccccttccaggactgatactggagtggaggaggataactaacgctataacaaaggtggtgtttccgcttcaaagggaaaagtgccttaatcctttcctcggcatggaaagaatttatccagtgtctcagtcccacacagcaactggaagaattacgtttacagagcccaacatccagaatgtcccaagagatttcgagataaagatgcctaccctcgtaggtgaaagtccccctagtcaggccgtggggaagggactgctgcccatggggcgtggcaagtacaaaaagggatttagcgtcaaccccagatgccaggctcagatggaagaacgggcagccgacaggggcatgccgttttctattagtatgagacatgcttttgtgccgttcccagggggatccatactagccgctgattatagtcaacttgaacttagaatcctggcacacctcagtcacgacagacgccttatccaggtgctcaatacaggggcagacgtgtttcgcagtatcgccgcagaatggaagatgattgaacccgagagcgtcggggatgatctgcgccagcaggcaaagcagatttgttatggaatcatttacggcatgggggcaaaatcgttgggtgagcagatgggtattaaggagaacgacgccgcatgctatatcgactcattcaaatctaggtacactgggatcaatcaattcatgaccgagactgtgaagaactgcaaacgggacggcttcgtccagaccattttgggtcgaagacgctatctccccggtataaaagacaataatccataccgcaaagctcatgccgagcggcaagccattaacaccatagttcaaggatccgccgcagatattgtcaagatagcgaccgtgaacatccagaaacaactcgagacctttcatagcacctttaaatctcatggccaccgcgagggaatgctgcagtctgatcaaacaggactctcacgaaagcggaagcttcagggcatgttttgccctattcgcggtggcttctttatactccagctgcacgacgagctgttgtatgaggtggccgaagaggacgttgttcaggtggcccagattgtgaagaacgaaatggaatccgccgtgaaactcagtgtcaagctgaaggtgaaggttaaaattggggcatcttggggcgagcttaaggacttcgatgtgta

SEQ ID NO: 235457 - DNA, 240 bp, synthetic construct
  misc_feature 1..240: note = Description of Artificial Sequence: Synthetic coding sequence
  source 1..240: mol_type = other DNA
atgggcaggaagagactgattacggactcgtaccccgtggtcaaacgtcgggagggtccagccggtcacagcaagggggagctcgccccagagttaggggaagagcctcagcccagagatgaagaggaagccgaactcgaactgctgcggcagttcgacctggcttggcagtacggcccatgtactgtcagtggaattagcattccatatgaagcccctcggaagacctcctgcccctag

SEQ ID NO: 235458 - DNA, 324 bp, synthetic construct
  misc_feature 1..324: note = Description of Artificial Sequence: Synthetic coding sequence
  source 1..324: mol_type = other DNA
atgggcaggaaacggctcataactgacagttacccagttgttaagagacgggaggggccagctggacactcaaaaggagagctggcacccgaattaggagaggagccacagcccagagacgaggaagaagccgagctcgaactgttgcgtcagtttgacctagcttggcaatatggaccttgcacaggcattactcggcttcaaaggtggtgccgcgctaaacaaatggggcttgagccccctcctgaagtctggcaggttctgaaaacacatcctggcgatccgcgatttcaatgtagcctgtggcacttgtatccgttatag

SEQ ID NO: 235459 - DNA, 105 bp, synthetic construct
  misc_feature 1..105: note = Description of Artificial Sequence: Synthetic coding sequence
  source 1..105: mol_type = other DNA
atggggcgaaaacgactgataaccgattcttacccggttgtgaagcgaagagaagggcctgccggacactccaaaggagagctggcacctgagttgggtctgtag

SEQ ID NO: 235460 - DNA, 1266 bp, synthetic construct
  misc_feature 1..1266: note = Description of Artificial Sequence: Synthetic coding sequence
  source 1..1266: mol_type = other DNA
atggcggatatctctttggatgaacttattcggaaaagaggagcagcagcaaagggacgcttaaacgctaggccaggtgtggggggagtacgttctagggtggggattcagcagggtctcctgtcccagtctacccggacggccacattccagcagcggtttgacgccagacaaaaaatcggcctctccgatgctcgactgaagctcggagtcaaggacgcccgtgaaaagctcctgcagaaggacgcgaggttcagaatcaaggggaaagtgcaggacgctagagagatgttgaattcacgaaagcagcagacaacagtgccccaaaagcccagacaggtggctgacgcccgagagaaaatatctcttaagcgctcaagccctgcagcattcatcaatcctccaatcggcacagtgaccccggcactcaaactcacgaaaacaatccaggttccacagcagaaggccatggccccactgcacccacacccagccggaatgcgcattaacgtggtgaataatcaccaggcaaaacagaacttgtatgatctcgatgaggatgacgatggaatcgcatctgtgcccactaaacagatgaagttcgcagctagcggcggttttctacaccacatggctgggttgtcttcctctaaactttcaatgagcaaagcactgcccctgactaaggtggtgcagaacgatgcatatacagcccctgcactgccatccagcattagaacaaaagctcttaccaatatgtcccggactctcgtcaataaagaggaacccccaaaggaactgcccgcagctgagcccgtgctatcccctctagagggcactaagatgactgtcaataacttgcaccctcgcgtcactgaagaggatatcgtcgaactgttttgcgtgtgcggtgcactgaagcgggctagactggtgcaccccggagtggcagaggtggtgttcgtgaagaaagacgacgcaatcaccgcttataagaagtataacaacagatgtctggacggtcagcctatgaagtgcaacttacacatgaacggtaatgttatcacttctgatcagcccattctgcttcgcctgagcgactccccttccatgaagaaggagtctgaactgcccaggcgcgttaattccgccagcagcagcaaccccccagccgaggtggatccagataccatcttgaaagcactgtttaaatcaagcggcgcttccgtgacaacccagcctactgaattcaaaattaagctttag

SEQ ID NO: 235461 - DNA, 558 bp, synthetic construct
  misc_feature 1..558: note = Description of Artificial Sequence: Synthetic coding sequence
  source 1..558: mol_type = other DNA
atggcagacatctctctggatgagctgattagaaagcgtggagctgctgccaaaggcaggctcaacgctcggccaggcgtggggggagtgcgttcccgcgtcggcatccagcagggtttactgtcacagagtaccaggaccgccacattccaacagcgcttcgatgcgagacagaagatcggactcagcgacgcaagattaaaactgggtgtcaaagatgctcgtgaaaaactgctgcagaaggacgcgaggtttcgtatcaagggaaaggtccaggacgctcgagaaatgctgaacagccgcaagcagcagaccacagtcccacaaaagccaagacaggttgctgacgccagggaaaaaatctctttaaagcgctcgtcccctgctgctttcatcaatcctccgatcggtactgtgactcctgcgctcaaacttaccaagacaattcaagttggtctccgagccgttcccttgctgtgcctagttagtggtggtgcctgggtgggctcccgcagtcaggcttcttgtccacttcccagcgggtctcgccctcattag

SEQ ID NO: 235462 - DNA, 1179 bp, synthetic construct
  misc_feature 1..1179: note = Description of Artificial Sequence: Synthetic coding sequence
  source 1..1179: mol_type = other DNA
atggctgacatcagcctggacgagctcatcagaaaacgcggagctgctgctaaaggcagacttaacgcgaggccaggagtaggcggagtcaggagccgtgtgggcatccagcaagggctgcttagccaatccactcgcacggccacctttcagcaaagatttgatgcgaggcagaagattggactctctgacgcacgcttgaagctcggagttaaggatgcccgagaaaagctgctgcaaaaggacgcccgttttagaataaaaggcaaggtacaggacgctagggagatgctcaacagtaggaaacagcagacgaccgtgccacagaaaccacgccaggtcgctgacgctagagaaaaaatcagcctgaaaaggtctagcccagctgctttcatcaatccacctattggcactgtgactcccgcactgaagctcaccaagacaattcagaatctctatgatctcgacgaggatgatgacggaatcgctagtgttccaacaaagcaaatgaaatttgccgcatccggaggatttcttcaccacatggccggactgagttcttcaaaactgtcaatgtccaaagcacttccactgacaaaggtggttcagaacgatgcatatacagccccagcattgccgtcctccattcgcactaaggcgctaacaaatatgagccgtaccctggtgaacaaagaagaaccccctaaagagctgccggctgccgagcccgtgctgagcccactggagggcacaaaaatgaccgttaataatctacaccccagagtgacggaggaggacatcgtagagctattctgcgtgtgcggggctctgaaacgggcaagactggttcaccccggtgtggctgaggtagtctttgtgaagaaggatgacgctataacagcttacaaaaaatacaacaaccgatgtttggatggtcagcctatgaagtgcaacttgcacatgaacggaaacgtgattacctcggatcagccaatcttgctgcgattaagcgattctccatccatgaagaaggaaagcgagctcccaagacgggttaactctgcatccagcagtaaccctccagcggaggtcgatcctgataccattctcaaagctctcttcaagtcgtccggggcatctgtaactacacaaccaacagaatttaagattaaactgtag

SEQ ID NO: 235463 - DNA, 690 bp, synthetic construct
  misc_feature 1..690: note = Description of Artificial Sequence: Synthetic coding sequence
  source 1..690: mol_type = other DNA
atggctgacatctctctcgacgaacttattaggaagcgcggagctgccgcaaaaggacgacttaatgcaagacctggggtgggcggagtgagaagcagggtcgggatccagcagggacttctgagtcagagcactcggacagcgactttccagcagcgctttgacgctcgccagaaaatcggcctgtcagatgctcgacttaaattaggcgtgaaggatgctcgagaaaaactgctgcagaaagatgcacgatttagaattaagggcaaggtccaggatgccagagagatgttaaattctaggaagcagcagactacagtcccacagaagcctcggcaggtcgcagatgccagggaaaaaatatccttgaagagatcaagccccgctgcattcataaaccccccaatcggaacagtgacaccagcccttaagttaactaagacgatccagaacctttacgatctggatgaagatgatgatgggatagctagcgtgcccacaaagcagatgaagttcgctgcctccggaggatttctccatcatatggctgggctgtcgagcagcaagttatcaatgagcaaggccttgcctcttacaaaggtagtccaaaatgacgcttacacagcccctgcactgcccagctcaattaggacaaaagccctgcccgtgcttacttcacccggtacttag

SEQ ID NO: 235464 - DNA, 561 bp, synthetic construct
  misc_feature 1..561: note = Description of Artificial Sequence: Synthetic coding sequence
  source 1..561: mol_type = other DNA
atggcccctctgcatccccacccggcaggcatgagaattaatgtcgtcaacaatcaccaggccaagcagaatctgtatgacttagacgaagacgatgacggtatcgcttccgttcctacgaaacagatgaaatttgcagccagtggtgggtttttgcaccacatggctgggctgagctcatccaagctgagtatgtccaaggccctgccacttacaaaggtagtgcagaacgacgcttataccgccccagcactccccagctcaatccggaccaaggcacttaccaatatgtccagaacgttagtcaataaagaggaaccccctaaagagcttcctgcagccgaaccagttctctcacccctcgaaggtaccaaaatgacagttaacaatttgcatccgagagtgacagaggaggatatcgttgagctgttctgtgtttgtggggcacttaagcgagcgaggctggtacatccaggcgtggccgaagtggtatttgtgaaaaaagacgatgcaatcacagcctacaagaagtataataataggtgcctcgacgggggttag

SEQ ID NO: 235465 - DNA, 555 bp, synthetic construct
  misc_feature 1..555: note = Description of Artificial Sequence: Synthetic coding sequence
  source 1..555: mol_type = other DNA
atggcagacattagtctggatgagctcatacggaaacggggtgcagccgcaaaagggcgactcaatgctaggcctggagtgggcggtgtgcggtctagggtcgggattcagcagggactactcagccagtcaacacgcactgccacgtttcagcagcgatttgacgctagacagaagatagggctttccgacgctcggctgaagttgggtgtgaaggacgccagggagaaactgctccagaaagatgcacggttccggatcaaggggaaggttcaggacgcaagagagatgctcaacagtagaaaacagcagaccaccgttcctcaaaaaccaagacaggttgcggacgctcgagaaaagatctccttaaaacgcagcagcccggctgcatttatcaacccacccatcgggaccgtgacccccgctttaaaattgacgaagactatccaggtaccaagcttcccctgtccgagaccttccttaagcccaaagtggttcagaatgatgcacacacagctcttactgtcattgcctctgtttgaacagaagccctag

SEQ ID NO: 235466 - DNA, 354 bp, synthetic construct
  misc_feature 1..354: note = Description of Artificial Sequence: Synthetic coding sequence
  source 1..354: mol_type = other DNA
atggccgctgctgctgccgctggatccggcactcccagagaagaggaaggcccagccggagaggcagctgccagccagccacaggctccaacttctgttcccggtgcacggttaagcaggctcccgttagctagggtcaaagctctggtgaaagccgatcctgacgtgactctagctggccaagaggcaatcttcattttggccagagcagccgaactctttgtggagaccattgctaaagacgcttactgctgcgcccaacaaggtaaacgcaaaaccttgcagagaagagacttggacaacgctatcgaggcagtggacgaatttgcgttcttagaagggacgctggattag

SEQ ID NO: 235467 - DNA, 1029 bp, synthetic construct
  misc_feature 1..1029: note = Description of Artificial Sequence: Synthetic coding sequence
  source 1..1029: mol_type = other DNA
atggcggcatcacaggcagtggaagagatgcggtcgagagttgtgctcggagagttcggcgtacggaacgtgcatactacagactttcctggtaactacagcggctacgatgacgcatgggatcaggaccgcttcgagaaaaattttcgcgtcgatgtcgtacatatggacgagaactccttggaattcgacatggttggtattgacgctgccattgccaatgcctttcgacggatccttttggccgaggtccctactatggctgtcgagaaggttttagtttataacaacacatctatcgtgcaagatgagatcttggcacaccgcctcggacttatccccatccatgccgacccacgactatttgagtatagaaaccagggagacgaagaaggaaccgagatcgacactcttcagttcaggctgcaagttcggtgtacaagaaacccacatgctgccaaagactcgtctgacccgaatgaactttatgtcaaccacaaggtgtatacccggcacatgacatggattcctctcggcaatcaggctgatctgtttcccgagggaacaatcaggccagtccatgatgatatccttatcgctcaacttcggccaggccaggaaatcgacttactgatgcactgcgtaaaaggcatcggcaaggaccacgccaaattctcccctgtggccacagctagctatcgcctactgcccgacatcactctgctggagccagtcgaaggggaggcagcagaggagctctccagatgcttttctccaggcgtgattgaggttcaggaggttcagggcaagaaagtcgcccgagtcgctaaccctcgcctggataccttttccagagaaatattccgcaatgagaagctgaagaaggtggttcgcttagcacgtgtccgggaccactatatctgcaagaaggatctacttgcagcagttgcccacacatgtaacccctctaccctcgggggtcagggtgagtggatcactgggagccgggagcgggaccatcccggttag

SEQ ID NO: 235468 - DNA, 633 bp, synthetic construct
  misc_feature 1..633: note = Description of Artificial Sequence: Synthetic coding sequence
  source 1..633: mol_type = other DNA
atggccgtggaaaaggtcctggtctataataacacttcaatcgtccaggacgaaattctggcccatagactgggcctgataccaatccacgcggatcccaggttgttcgagtacagaaatcagggggacgaggagggaactgagatagacaccctccagttccgactgcaggtaaggtgcacccgtaatccccacgctgcaaaagattctagcgaccccaacgagttgtacgttaaccataaggtgtatacacgccatatgacttggattcccctcggcaatcaggctgacctgttcccagaaggaactattcgccctgtgcacgatgatatactgattgcccagctgcgcccaggccaagaaatagacctgctgatgcactgcgtgaaagggattggtaagaaagttgctagagtggccaatccgaggcttgacactttctctagagagatttttagaaatgaaaaactgaaaaaagtagttaggctcgccagagtgagggaccactacatcttctcagtcgagagcaccggagtgctccctcctgatgtattagtatcagaagccataaaggtcctgatgggcaagtgtcgacggtttctggacgagcttgatgccgtccaaatggactag

SEQ ID NO: 235469 - DNA, 1041 bp, synthetic construct
  misc_feature 1..1041: note = Description of Artificial Sequence: Synthetic coding sequence
  source 1..1041: mol_type = other DNA
atggcggcttcacaagcggttgaggaaatgcgatccagagtcgttctgggcgaattcggtgtaaggaatgtgcatacaacagacttccctggtaattactctggatatgacgatgcctgggatcaggaccgttttgagaaaaactttcgagtggatgttgtgcacatggacgagaatagcctggagtttgatatggttggcatagatgccgctattgcaaacgcattcagaagaatcctgctcgcagaagtgcccaccatggctgtcgagaaagtgctggtgtacaataatacaagtatagttcaggatgagatattggcccaccggctcggtctcattcccatacacgctgaccccaggctttttgaatatcggaaccagggcgacgaagaaggtactgaaattgatacactacagttcagactgcaagtgcggtgcactcgcaatccacatgctgcaaaggatagctctgaccctaatgagctgtatgtgaaccataaagtgtatacacgtcacatgacatggattcccctcggcaaccaggccgacctctttccagaaggcaccatccgcccagtgcacgacgacatcctgatagcccagttgcgccctggccaggagattgacctactgatgcattgtgtcaaaggaattggcaaggatcatgccaagttctctccagtagcaaccgcgtcgtaccgcctcctcccagacataacactcttagagccagtcgagggcgaagccgcagaagaactgtcccggtgtttctcccccggtgtgatagaggtgcaggaagtgcaaggtaagaaagttgcccgagttgccaaccctagacttgatacgttttctagagagattttcagaaacgagaagctgaagaaggttgtccgcctggcgcgtgttagggatcattatattttctcagttgaatctactggagtgctgcctccagatgttcttgttagtgaggccatcaaggtgctaatgggaaaatgtcgccgattcctggatgagctcgacgctgtgcagatggactag

SEQ ID NO: 235470 - DNA, 369 bp, synthetic construct
  misc_feature 1..369: note = Description of Artificial Sequence: Synthetic coding sequence
  source 1..369: mol_type = other DNA
atggaggaggaccaggaactcgagagaaaggcaattgaagagcttctcaaagaagctaagcgaggtaaaacaagagccgagaccatgggcccaatgggctggatgaagtgcccacttgcctctacaaacaaaagattccttatcaacacaatcaaaaacaccctgccttcccataaggaacaggaccacgagcagaaggagggggataaagagcctgccaagagccaggcccagaaggaagaaaaccctaaaaagcatcggtctcatccttataagcactctttccgagcgaggggctccgcatcttactccccgcctcgcaaaaggagctcacaggataagtacgaaaaaagatccaaccgcagatag

SEQ ID NO: 235471 - DNA, 402 bp, synthetic construct
  misc_feature 1..402: note = Description of Artificial Sequence: Synthetic coding sequence
  source 1..402: mol_type = other DNA
atggaagaggaccaagaactggagaggaaaattagcgggttgaagacaagtatggcagagggcgagagaaagacggcactggagatggttcaagccgctggtacagatcgacactgtgtcaccttcgtgctgcacgaagaagatcatacactgggaaacagcctgcggtacatgattatgaagaatcccgaagtggagttttgcgggtataccaccacccaccctagtgaatccaagattaatctgagaatccagacacggggaactctgcccgcagtggaaccatttcaacgcggactgaacgagctgatgaatgtctgtcagcatgtcttggacaagtttgaggctagcatcaaagactacaaagatcaaaaggctagtcggaatgagtctaccttttag

SEQ ID NO: 235472 - DNA, 402 bp, synthetic construct
  misc_feature 1..402: note = Description of Artificial Sequence: Synthetic coding sequence
  source 1..402: mol_type = other DNA
atggaagaggaccaggagctggaaagaaagattagcggcctgaagacatccatggcagaaggcgagcgcaagaccgcccttgagatggtgcaggcggctgggacagaccgtcactgcgttaccttcgtgctgcacgaggaagatcataccttagggaattcactccgatatatgatcatgaagaaccctgaggtagagttttgcgggtatacgacgactcacccttccgaatccaaaattaacctgagaatccaaacaagggggactctgcccgctgtggaaccatttcaaaggggtttgaatgagttaatgaacgtttgtcaacacgtgcttgacaagttcgaggcctccataaaggactataaagaccagaaggcatcaaggaacgagagtactttttag

SEQ ID NO: 235473 - DNA, 5912 bp, synthetic construct
  misc_feature 1..5912: note = Description of Artificial Sequence: Synthetic coding sequence
  source 1..5912: mol_type = other DNA
atgcatggcggaggtccaccaagcggcgactccgcttgccccctccggaccattaagcgggtgcagttcggtgtactttccccagacgagttaaagagaatgagtgtgaccgaaggaggaataaagtaccctgaaactaccgaaggcggtagaccaaagctgggaggacttatggatccaagacagggtgtgatagagagaacagggagatgccagacttgtgctgggaacatgactgagtgtcctggccactttgggcacattgaactcgccaagcccgtcttccacgttgggtttcttgtgaagaccatgaaggttctccgatgcgtctgtttcttttgctctaagttgttagtcgattcgaataatcccaaaatcaaagacattctggctaagtccaagggacagcccaaaaaacgcctcacgcacgtttatgatctgtgtaaaggcaaaaacatctgtgaaggcggagaagaaatggacaacaagttcggggtagagcagccggagggggacgaagacctgactaaagagaagggtcacggagggtgcgggaggtatcaacctcgaattaggaggagcgggctggaactttatgccgaatggaagcacgtcaacgaagattcgcaggaaaaaaaaatcctgctgtcgcctgagcgtgtgcacgaaatcttcaagagaatatcagatgaagagtgtttcgtgctcggtatggagcccagatacgccagaccagaatggatgatagttacagtcctcccagttcccccactgagtgtgaggcctgcagtggtcatgcagggatctgcgcgtaatcaagacgatctgacacacaagctggccgacatcgtgaagatcaacaaccagttgagaagaaacgagcagaacggtgcagccgcacatgtgattgcagaagacgtgaagctgttacaatttcatgttgcaacaatggtggacaatgagctgccaggtctgccacgtgcgatgcagaaatccggccgaccacttaaatcactcaagcagcgccttaagggcaaggagggcagggtcaggggaaacctcatgggcaagcgcgtggacttttccgcaagaaccgttattacaccggatccaaacctatctatagaccaagtgggcgtccctcgatcaattgctgccaacatgacgttcgcagaaattgtaacaccattcaacatcgaccggctccaggaactagtgcgacggggaaacagtcagtacccaggggcaaaatatattattcgcgacaatggtgaccggattgatctccggtttcatcccaagccttcagatctccacctgcagaccggatacaaggtggaaagacacatgtgtgatggcgatatagtcatttttaatcgccaacccactcttcacaagatgagtatgatgggccatcgcgtgagaatcctcccatggtctacttttcgcttgaatttgagcgttaccacaccttataatgccgacttcgatggcgacgaaatgaatctgcacttaccccagtccctggagacaagagccgaaatccaggaactggcaatggtgcccaggatgatcgtgactcctcagagcaatagacccgtaatggggatcgtgcaggacacattgacagccgtcaggaagtttaccaagcgggacgtgtttctggagcggggagaggtgatgaatttactgatgttcctttctacctgggacggcaaagtcccccagcctgccatcttgaaaccaaggccattgtggacaggtaaacagattttttccctgatcattccgggacacataaactgtatccgcacacactccacccacccagacgatgaggacagcggcccttacaaacatatcagccccggtgacactaaagtggttgtagagaacggggagctaattatgggtatattgtgcaagaagagcctgggcacctccgcaggatccctggttcacatttcatacctggaaatgggacatgacataaccaggttgttttacagcaacatccagaccgtgataaataactggcttttgatcgagggccacacaattggcatcggtgacagcatcgcagactccaaaacttatcaggacatccagaacaccataaagaaggcaaagcaggatgttattgaggtgatcgagaaagcacataacaatgaactggagcctacacccggaaatacactgaggcagactttcgagaatcaggtgaaccgtatcttaaacgatgcacgagataaaactggtagtagcgcacagaagtcgctgagtgagtacaataactttaaaagtatggtggtcagcggagcaaaaggctcaaaaatcaacatatcgcaggtcatcgcagtggtcgggcagcagaacgtagaaggaaagcgtatccccttcggatttaagcaccggaccctcccacatttcatcaaggatgattacggcccagagtcacggggtttcgtggaaaattcttacctcgctgggttgacccccaccgaatttttctttcatgcaatggggggaagggaaggacttattgacaccgccgttaagacagcagagaccgggtacattcagaggagactgatcaagtcaatggagtcggttatggtcaaatatgatgccacggtacgcaactcaattaatcaggttgtccagctgaggtatggagaggacgggttagcaggggagtcagtagaattccagaatcttgccacccttaaaccatccaacaaggcattcgaaaaaaagttcaggtttgactatactaacgaaagggcgttacgcaggacacttcaggaagacttagtgaaggacgtactttccaacgctcacattcaaaatgagctggagagagaattcgagagaatgcgggaagaccgcgaagtgctaagggtgatcttcccgacaggcgactcgaaagtggtcctcccctgcaatcttttgcgaatgatctggaacgctcagaagatttttcacatcaaccccagactcccaagcgacttacacccaataaaggtggtggagggggtgaaagagttgtccaaaaaactggtaatcgttaatggggacgatcctctgtctagacaggcccaggaaaatgctaccctgctgttcaacatccacctgcggtccaccctgtgtagtcgcagaatggctgaggagtttcgactgtctggggaggcttttgattggctactgggggagatcgaaagcaaatttaaccaagccatcgcacaccctggcgagatggtgggtgccctggcagctcagtctctgggagagcccgctacccagatgacccttaatacattccattatgcaggtgtctccgcgaaaaatgtaaccctgggcgtaccgcgactgaaggaactaatcaacatttctaaaaaaccaaagaccccttcactgacagtcttcctgttagggcagagcgccagagatgctgagagggccaaggatatactgtgcagacttgagcatacaaccctgaggaaggtaacggctaacaccgctatttactacgaccctaatccacagtcaacagtggtggcggaagatcaggaatgggtcaacgtgtactacgagatgcctgactttgacgtcgctcgaatatccccttggctgctcagggtggaactagacaggaaacacatgaccgataggaaattaactatggaacaaattgccgaaaaaatcaacgccggttttggtgacgacttaaactgtatctttaacgacgacaatgctgagaagctcgtgttgcggatccgcataatgaatagtgacgagaacaaaatgcaggaggaagaggaggtcgttgacaagatggacgacgacgtttttctcaggtgtatagaaagcaacatgctcactgatatgacactccaaggtatcgagcagatcagtaaagtctacatgcatctgccgcagactgataataagaaaaagattattatcaccgaagatggggaattcaaagccctgcaggagtggatactcgaaaccgacggtgtcagcctgatgcgagtgctgagcgagaaagatgtcgatccagttagaaccacctcaaatgatatagtggaaattttcactgtgctggggatcgaagccgtccggaaggctctggagcgtgagctttatcacgtcatcagctttgacggcagttacgtcaactaccgtcacctggccttgctctgtgacacgatgacatgccgtgggcacctaatggcgataactagacacggggtgaaccggcaggatactggtccactcatgaagtgtagctttgaagaaaccgtggatgtgcttatggaagccgcagcccatggtgaaagtgatcccatgaagggtgtttcagagaacatcatgctcggtcagttggcccctgctggcactggctgctttgacctgctattggacgccgagaaatgcaagtacggcatggaaatacccacgaatattcctgggctgggggctgccggacccaccggtatgttcttcgggtccgcaccttcccctatgggcggaatctcgccagcaatgacgccttggaatcaaggtgctaccccggcttatggcgcttggtccccttcagtcggctcagggatgacaccaggcgcagctgggttctctccaagcgccgcatcagatgcctccggcttcagcccaggttactctcccgcatggagtccaacccccggatctcccggatcgccaggccctagctccccttatattccatctccgggaggagctatgtcgccaagttacagtccgacgagccctgcttacgaacctaggtctcctggcggttataccccccagtctcccagctacagccctactagcccctcatactcacccacatcacccagctattcacccaccagtcctaactattctcccacctccccctcctattcgcccacaagcccgtcctacagtcccacgagcccaagttactcgccaaccagtcctagctattcgcccacctcaccgagctatagcccaacatccccgagttacagccctacctctccaagttatagccccacttctcctagctacagtcccacttcccctagctactcacccactagccctagctattcacctacctcgccttcgtacagtcctactagtccgagctattcgccaacatcacctagctacagcccgacgagcccttcttacagcccaacctccccctcatactcacccacctcgccaaactacagcccaacttcgcctaattataccccaacctccccctcttatagcccgacttcaccttcatattcgccaacatcaccaaattacactcccacctcaccaaactattctcctacctcgccatcatattcaccaacgtcaccatcctacagccccacctcaccatcatactcgccctctagcccccgatacacgccacagtcaccaacctacaccccctcctccccctcatactcgccttcaagcccaagctactcgcccgcatcaccaaagtacacgcctacgtcaccttcctattccccaagttctcccgagtacacaccaaccagccccaaatacagtcctacctcaccaaaatacagcccaacctccccgaaatacagccctacctcccctacatattcacctaccactcccaagtattcgccaacttcccctacgtattctcccactagccccgtatacaccccaactagccccaagtactcgcctaccagcccaacctactccccaacaagccctaaatatagccccacctcaccgacatacagtcctacctcaccgaagggtagcacctatagcccgacctctcccggttattcccctacttcccccacatacagcctgacctcacctgcaatctcacctgacgactccgacgaggagaatta

SEQ ID NO: 235474 - DNA, 1626 bp, synthetic construct
  misc_feature 1..1626: note = Description of Artificial Sequence: Synthetic coding sequence
  source 1..1626: mol_type = other DNA
atgcctggacgatgccaatcagacgccgcaatgcgggttaacggacccgctagtagagcaccggctggctggacttccggatccttgcacacaggcccacgggctgggagaccaagagcccaagccaggggagtccggggacggggacttcttttgaggcctcgccctgccaaggaattgcccctcccccgaaaaggtggtgcctgggcccctgcagggaatcctggcccactccatcctctgggcgttgcagtgggcatggccggttccggcagactggtgcttcgcccatggattagagagttgatattaggatctgagaccccaagctcccccagggccggtcagctcttggaagacgccgaagccgctgtcgctggccctagccatgcgccagacacctcggacgtgggcgctacgttactcgtatccgatggtacgcacagcgtcagatgcctcgtgacacgcgaggccttagacacgtccgactgggaggaaaaagagtttgggtttcggggaacagaaggcagactcctcctgcttcaggactgtggagtgcacgtacaggtggctgaaggaggcgctcctgcagagttttatctgcaggtggacagattttccctcctgcccactgaacagccacgcctcagggtaccagggtgtaatcaggatttggacgtgcagaagaaactgtacgattgtctggaggagcacctttctgagtcgacttctagcaatgcgggactctcattgtcgcagctgcttgacgagatgagagaagatcaggagcaccagggggctctggtgtgcctggctgagagctgtctcactctcgaaggaccgtgcaccgcgcctcccgtgacacactgggccgctagcaggtgcaaggccactggagaagccgtgtataccgttccttcctcaatgctctgtatatccgagaatgatcaactgattctgtcctctctcgggccttgccagaggactcagggccctgagttaccgcctccggatcccgcactgcaggacctgtctctgacattgattgcctcgcctccctcttcaccgtcctcctctggaactcctgccctgccagggcacatgagctccgaagagagcggaacttctatctcgctcctccctgccctcagccttgcggctccagaccctggacagcggagctccagccagccgagtccagcgatatgttctgcacctgcgaccctgacccccaggagcccccatgcaagccgcacccccagttctccacttcagagttgtaccccaagtttgtctcccaggtctcacgtgcccagcccgcatcaggctctagtgacaaggccacagaagcccagtttggagtttaaggagtttgttgggctgccttgtaagaacaggccaccctttcccaggaccggggctacaaggggcgcacaggagccttgtagtgtatgggagccacccaaacggcaccgagacggcagtgccttccagtacgaatatgaacctccctgcacctcattgtgtgctagagttcaggcggtgaggctaccacctcaactgatggcttgggctctgcacttccttatggatgcgcagcccggaagtgagcctacgcccatgtag

SEQ ID NO: 235475 - DNA, 2040 bp, synthetic construct
  misc_feature 1..2040: note = Description of Artificial Sequence: Synthetic coding sequence
  source 1..2040: mol_type = other DNA
atggacagagtcacacgctaccctatcctgggaatcccgcaggcacatcggggaactgggctggtgctagacggagacacaagttatacataccacctggtgtgtatgggccctgaggcctcaggatgggggcaggatgagcctcagacatggccaaccgaccacagggcacagcagggcgtgcagcggcagggggtcagctactctgttcacgcctacacagggcagccatctccaagggggttgcacagcgaaaatagggaggatgagggatggcaggtctaccggctgggcgctagggacgcccaccagggcaggccgacctgggctcttaggccagaggatggcgaggacaaggaaatgaagacttacaggctggatgccggagacgccgaccccaggcgactctgcgatcttgaacgggaaaggtgggccgttattcaagggcaggccgttcgaaagtcttccaccgtggctaccctccagggtacgcccgatcacggcgaccctaggactcccggaccccctcgcagcacaccgttagaggagaatgtcgtagaccgggagcagatcgatttcctggctgctcggcagcaatttctctcattggagcaagccaacaagggggcaccccacagttctcctgccagagggacccctgctggcaccactccaggagcttctcaggcgcctaaagcgttcaataagccacatctggcgaatgggcatgtggtgccgattaaaccacaggttaaaggcgttgtcagggaggaaaacaaagtaagagctgttcctacatgggcttctgttcaagttgtggatgaccctggatcactggcatccgttgagtcaccagggacaccaaaggagacccctattgaaagggagatcaggctggctcaagagcgggaagctgacctgcgcgaacagaggggcctcaggcaggcaaccgatcatcaggaactcgtggaaattccgacgagacctctcctcaccaaattgagtctgattaccgccccacggagagagagggggcgaccttcactgtatgtgcagagagacatcgtgcaggagacgcaaagagaggaggaccatcgcagagaaggactgcacgtaggtagggcctctacgcccgactgggtgtctgaggggcctcagcctggcctgaggcgggctcttagctcagacagcatcctgagtcccgctcccgatgctcgcgcagcagacccagcgccagaagttcgcaaggtgaaccgcataccacccgacgcttaccaaccttacctgtctccaggaaccccacagctggagtttagcgcctttggtgcctttggcaaaccttcctcactgtctacagcagaggctaaggctgcgacctcacctaaggccacaatgtcaccacggcatctctctgaaagctcaggtaagcccctgtctactaagcaggaagcctctaaacccccacgcggttgccctcaggccaatagaggagtagtaagatgggaatactttagactgcgtcctctgagattccgcgctccggacgaaccacagcaagcccaggtcccacacgtgtggggatgggaggtggccggagcgcctgctctgaggctgcaaaaatcgcagagcagcgacctcctggaacgtgaacgggagtccgtcctgaggcgggagcaggaagtagcggaggagcgcagaaacgctctgtttccggaggtattctctcccacacccgatgagaatagcgaccagaacagcagaagctctagtcaggcatctggtataactggaagttatagcgtcagcgaaagtccattcttttcaccaattcacctccactctaatgtggcttggactgtggaagatcctgtggactctgctcccccaggacaacgcaagaaggaacagtggtatgcgggtatcaatccctccgatggcattaactcggaagtgttagaggcgattcgcgtgactagacataaaaacgctatggctgagagatgggagtcacgaatctatgcttctgaggaagatgattag

SEQ ID NO: 235476 - DNA, 381 bp, synthetic construct
  misc_feature 1..381: note = Description of Artificial Sequence: Synthetic coding sequence
  source 1..381: mol_type = other DNA
atgagcgacaatgaggacaacttcgatggggacgattttgacgacgttgaagaggacgagggcctggacgatcttgaaaatgcagaggaagagggccaagaaaacgtagagatcctgcccagcggagagaggccacaggctaatcagaaaagaatcaccactccctacatgacgaaatacgagcgcgctcgggtgctggggactagagcactgcaaattgctatgtgtgcccctgttatggtagaactcgagggtgagactgaccctctgctgatagcaatgaaagagctgaaactgctctggggacttgaatacaccgtgctgaggcccagttatgctctagcccattctctcggcagcttttcaataagctcccggtag

SEQ ID NO: 235477 - DNA, 477 bp, synthetic construct
  misc_feature 1..477: note = Description of Artificial Sequence: Synthetic coding sequence
  source 1..477: mol_type = other DNA
atgagtgacaatgaggacaactttgacggagatgacttcgacgacgtcgaagaagacgagggactggacgatctcgagaacgccgaggaggagggccaggagaatgttgagattcttccttccggagaacgccctcaagccaatcagaagaggataacaacaccttatatgacgaagtacgagagagctagagtattgggcactcgcgctctccagattgctatgtgcgccccagtgatggtcgaactggagggggagaccgaccccctgctaattgctatgaaagagctcaatgctagaagcgcctcagagcctcccggagaggagccaccctggatggacaggggaaccagggacgaacacctgccatcatgcccaggatgtcctgcagtggcctccaacactaggtgttgccccccagccgcatgcctgccaggtatttcactgtcaaggcggcgacggcttcgggaagagtag

SEQ ID NO: 235478 - DNA, 384 bp, synthetic construct
  misc_feature 1..384: note = Description of Artificial Sequence: Synthetic coding sequence
  source 1..384: mol_type = other DNA
atgtccgacaatgaggacaattttgacggggatgattttgacgatgttgaagaagacgagggattagacgacctggaaaatgccgaggaggaagggcaggagaatgtggagatcctgccatctggagagagaccccaggcaaaccagaaaaggatcaccacgccttatatgactaagtatgagcgcgcaagggtactggggacaagggctctccaaatagcaatgtgcgcgcctgtcatggtggaactggagggagagacagatccattgcttatcgcaatgaaagagctgaaggcacgaaagatcccaattattattagacgctacttaccagatggatcctatgaggactggggtgtggacgagctcattatcactgattag

SEQ ID NO: 235479 - DNA, 519 bp, synthetic construct
  misc_feature 1..519: note = Description of Artificial Sequence: Synthetic coding sequence
  source 1..519: mol_type = other DNA
atgttctatcacattagcttggagcacgagatccttctccaccccagatacttcggtccaaatctgctgaataccgttaaacagaagctctttactgaggtggaagggacgtgcactgggaagtatggttttgtgatcgcagttacaaccatcgacaacataggagccggtgttatacagcccggaaggggcttcgtgctatatccagtgaaatataaagcaatagtttttcggccattcaagggggaggtggtagacgccgtcgtgactcaggtaaacaaggtaggcctgtttacagaaattggccctatgagctgtttcatcagtcggcactctataccttcagagatggaattcgaccctaacagtaatcctccatgttataaaactatggacgaagacatcgtgatccagcaggacgatgagatcagactgaaaatagtcgggacgcgggttgacaaaaatgacatcttcgccattggtagcctgatggatgactacctggggttggtgtcatag

SEQ ID NO: 235480 - DNA, 453 bp, synthetic construct
  misc_feature 1..453: note = Description of Artificial Sequence: Synthetic coding sequence
  source 1..453: mol_type = other DNA
atggcagggatcttgtttgaagacatctttgacgtgaaggatattgaccctgaaggaaaaaaattcgatagagttagtcgattgcattgtgagtcagagtcttttaagatggacctgatcctggatgtcaatatccagatttaccctgtcgacttaggcgataaattcagactggtcattgcatctactttgtatgaggacggtaccctcgacgacggcgaatataacccaacggacgatcggcctagtcgcgcagaccagttcgagtacgttatgtatggcaaagtctacagaattgagggcgacgaaacatccaccgaggctgccactcgactgtctgcatacgtaagctatggtgggctgctcatgagactgcagggagatgcaaacaacctccacggattcgaagtggacagcagagtgtatctcctcatgaagaagctggccttctag

SEQ ID NO: 235481 - DNA, 39 bp, synthetic construct
  misc_feature 1..39: note = Description of Artificial Sequence: Synthetic coding sequence
  source 1..39: mol_type = other DNA
atggccggaattctgttcgaagacatcttcgatgtctag

SEQ ID NO: 235482 - DNA, 450 bp, synthetic construct
  misc_feature 1..450: note = Description of Artificial Sequence: Synthetic coding sequence
  source 1..450: mol_type = other DNA
atggctggaatccttttcgaggacatttttgacgttaaggacattgatcccgaaggaaaaaagttcgaccgcgtttcacgcctccactgtgagagcgagtctttcaagatggatctgattctagatgttaatattcagatctaccctgtggacttgggggacaaattccgcttagtgatcgcctctacactgtacgaagatggaacccttgatgacggtgagtacaatcccactgatgatagaccatcacgggcagatcaatttgagtacgtcatgtacggcaaagtttacaggattgaaggagatgaaacttctacagaagcagctacaaggttgtcagcctacgtcagttatggaggcctgcttatgagacttcaaggggacgccaacaatttacatggatttgaagttgacagcagagtgtaccttctaatgaaaaaactcgcttag

SEQ ID NO: 235483 - DNA, 453 bp, synthetic construct
  misc_feature 1..453: note = Description of Artificial Sequence: Synthetic coding sequence
  source 1..453: mol_type = other DNA
atggcgggtatcctgttcgaagacatcttcgacgtgaaggacatagatccggaaggtaaaaagttcgatagggtgtcccgcctgcattgcgagagcgaaagctttaagatggatctcattctcgatgttaatatacagatctaccctgtggatctaggagataagttcaggctcgtgatcgcatctaccctgtacgaagacggaaccctcgatgatggcgaatacaacccaactgacgatcgcccaagccgtgccgatcaattcgagtacgttatgtatggtaaagtatatcggatcgagggggacgaaacttcaacggaagccgcaaccaggctcagtgcctacgtgagctatggagggcttctgatgcgtctgcagggggacgccaacaacctccatggctttgaagtcgacagccgcgtttatcttttaatgaagaagcttgccttctag

SEQ ID NO: 235484 - DNA, 1491 bp, synthetic construct
  misc_feature 1..1491: note = Description of Artificial Sequence: Synthetic coding sequence
  source 1..1491: mol_type = other DNA
atggaggaacaaagggaggccctccgaaagataattaaaacactggcggttaagaatgaggagatccagagtttcatttatagccttaaacagatgctgctgaatgttgaagccaacagcgctaaggtgcaggaggatctcgaggccgaatttcaatctctgtttagccttttggaagaattaaaagaggggatgctgatgaaaatcaaacaggacagagccagcaggacctacgaactgcagaaccagttggctgcctgtactagagccctggaaagctcggaagaactcctagagaccgctaatcagacgcttcaagctatggatagcgaggacttcccacaggccgctaaacaaatcaaggatggagtgacaatggctcccgcattcaggcttagcttaaaagccaaagtgtctgataacatgtctcacctcatggtggatttcgcccaggagcggcaaatgctgcaggctttgaagttcctaccagttcctagcgctcccgtgatcgatctcgctgaatcgctagtggctgataattgcgtcacccttgtctggcgtatgcctgacgaggactctaagatcgaccactacgtcctagaatatcgccgtactaacttcgagggcccaccccgactcaaagaggaccagccatggatggtaattgaaggcatacggcaaacagagtacacgctcacaggcctgaagtttgatatgaaatatatgaacttccgagtcaaggcctgcaataaggcggtcgctggagaatttagcgagcctgtgaccctggagacccctgcctttatgttccggctagacgcatccacatcacaccagaatctgcgagtcgatgacctgtccgtggaatgggatgccatgggaggaaaagtacaggacatcaaggcgcgtgaaaaggacggaaaaggaagaactgcaagcccaatcaattcccctgccagaggaaccccatcacctaaaaggatgccctctgggagagggggaagggataggtttaccgccgagtcgtatacagtcctaggtgatactctaattgacgggggagaacattactgggaggtccggtatgaaccggactctaaagccttcggagtgggagtcgcctaccgtagtctcggtcggttcgaacagttgggcaagacggccgctagttggtgcctgcacgtgaataactggcttcaggtgtcattcacagccaagcacgcaaacaaggttaaagtgctcgatgctcctgtccccgactgtctcggggtacactgcgactttcatcaagggctcctgtccttctacaacgctcgcacaaagcaagtgcttcacacatttaagacccgcttcacgcaaccattgctgccagccttcactgtgtggtgcggcagcttccaggtgacaaccggactacaggtgccctcagccgtgcgatgcttgcaaaagcgcggtagcgcaacatcctctagcaacacatccctgacatag

SEQ ID NO: 235485 - DNA, 354 bp, synthetic construct
  misc_feature 1..354: note = Description of Artificial Sequence: Synthetic coding sequence
  source 1..354: mol_type = other DNA
atgaacgctccaccagccttcgaatcgtttctgctttttgagggggaaaagaagatcaccatcaacaaagataccaaggtccctaatgcatgcttgtttaccatcaataaggaagatcacaccctggggaatatcatcaaatcacagctcctcaaggatccccaggtgctgtttgccggatataaagtgccacacccattggaacataagattatcatccgggttcagactactccagattattccccacaggaggcttttactaatgcaatcaccgatctgattagtgaactatctctcttggaagaaagatttcgggtggcaattaaggacaagcaggaagggatcgaatag

SEQ ID NO: 235486 - DNA, 384 bp, synthetic construct
  misc_feature 1..384: note = Description of Artificial Sequence: Synthetic coding sequence
  source 1..384: mol_type = other DNA
atgaacgcccctcctgcctttgagtcatttctgctcttcgaaggcgagaagaagatcactatcaataaggacactaaggtgcccaatgcatgtctgtttacaattaataaggaggatcacaccctgggtaatataataaagagccagttgctgaaggaccctcaggtactgttcgctggctataaggtaccgcacccgttagagcataaaatcatcattcgggtgcaaactacccccgattattccccccaggaagcttttactaatgccattacagacctgatttcagaactgtctctactggaggagagatttcgagtccgggcaggccctggcggtgctgatggcgtggcaataaaagacaagcaggaagggatcgaatag

SEQ ID NO: 235487 - DNA, 351 bp, synthetic construct
  misc_feature 1..351: note = Description of Artificial Sequence: Synthetic coding sequence
  source 1..351: mol_type = other DNA
atgaatgcccctcccgcatttgaaagctttctactattcgagggtgaaaagatcactatcaataaggacacaaaggtcccgaaggcatgcctgtttaccatcaataaagaggaccacaccttagggaacataatcaaaagtcgcgcttgtttcccttttgctttttgccgggactgccagtttcctgaggcatcgcccgcaaccctccctgtccagcctgcagagctgtgccctcgtgcccaccagttgtgcgcccctgcccttaagcgccaccttggcggtgaggcccacccagtacatctgcacgccggtgctgcgagccgacccgttcagcagccgcagcacctgtag

SEQ ID NO: 235488 - DNA, 348 bp, synthetic construct
  misc_feature 1..348: note = Description of Artificial Sequence: Synthetic coding sequence
  source 1..348: mol_type = other DNA
atgaacgcccctcccgcatttgagagttttctcctcttcgaaggggagaagataactattaataaggatacaaaggtacccaaagcctgtctgttcacaattaataaggaggaccacacactcggaaacatcatcaagagtcaactgttgaaagacccgcaggtgttgtttgccggatacaaagtgccccacccactggagcacaaaattataatccgggttcagacaactcccgattattctccccaggaggctttcactaacgcaattacagacctgatctcagaactctcactgctggaggagagatttcgtacgtgcctgttgccactgagactgttgccatag

SEQ ID NO: 235489 - DNA, 177 bp, synthetic construct
  misc_feature 1..177: note = Description of Artificial Sequence: Synthetic coding sequence
  source 1..177: mol_type = other DNA
atggacactcaaaaagacgttcagccacctaagcaacagccaatgatttatatatgtggcgagtgtcatactgagaacgaaattaagagtcgcgacccaatcagatgcagggaatgtggatatcgcattatgtacaaaaagaggactaagcgattggtggtttttgacgcacgatag

SEQ ID NO: 235490 - DNA, 204 bp, synthetic construct
  misc_feature 1..204: note = Description of Artificial Sequence: Synthetic coding sequence
  source 1..204: mol_type = other DNA
atgattattcccgttcgttgcttcacatgtggtaaaatcgtaggaaataagtgggaggcctacctaggtttgcttcaggccgaatacactgagggcgacgccttggacgccctgggcttgaaaagatattgttgccgtcgaatgctgctggcgcacgttgaccttatagagaagcttctgaattatgcaccattagaaaaatag

SEQ ID NO: 235491 - DNA, 204 bp, synthetic construct
  misc_feature 1..204: note = Description of Artificial Sequence: Synthetic coding sequence
  source 1..204: mol_type = other DNA
atgattatccctgttcggtgtttcacctgcggaaagatagtaggcaataagtgggaggcttatctcggcctgctccaagcagaatacactgagggcgacgccctggacgccctcgggctcaaacgttattgttgtcgtcggatgctcctagcacatgtggatctcatcgagaaactgctgaattatgcgcctctggagaagtag

SEQ ID NO: 235492 - DNA, 4173 bp, synthetic construct
  misc_feature 1..4173: note = Description of Artificial Sequence: Synthetic coding sequence
  source 1..4173: mol_type = other DNA
atggttaaggagcagttccgtgagacggatgtggccaaaaaaatttcacatatatgtttcggcatgaaaagtcccgaggaaatgcgtcagcaagctcacatccaagttgtatctaaaaatctgtattcccaagacaaccaacacgcaccactgctctatggtgtccttgaccaccggatgggtacgtcggagaaagatcgcccatgtgaaacctgtggtaaaaatctggcagactgtcttgggcactatggatatatcgacttagagttgccttgtttccatgtggggtatttccgggctgttattggcatcctgcagatgatttgtaagacctgctgtcacattatgctgtcacaggaagaaaagaagcagttcctcgactacctcaaaaggccgggactcacctacctgcaaaagaggggcctgaaaaagaagatcagcgataagtgtcgtaaaaagaacatctgtcatcattgcggagctttcaacggaaccgtcaaaaagtgtggcttgctgaagatcatccacgaaaagtacaaaactaataaaaaggtggtcgaccctattgtgtctaacttcctgcagtcatttgaaacggcaattgagcacaacaaggaggtcgagcctctgctggggagggcacaggagaacctgaatcccctcgtggtactgaacctttttaagaggattccggcagaagatgtgccactgcttcttatgaatcctgaagcgggaaagcccagcgatttaatccttacacgcctcctcgtgcccccactgtgcatccgcccatctgtcgttagtgatcttaaaagcggcacaaatgaagatgacttaacaatgaaattgacagagattattttcctaaacgatgtgatcaagaaacaccgtatttcgggcgctaagactcagatgatcatggaagattgggacttcctccagctgcagtgtgccctatatatcaactcagagctgagtggaataccattaaatatggcccctaagaagtggactcgcggtttcgtccaacgcttgaagggcaagcaaggccgtttccgcggtaatctgtctggtaaaagggtcgacttttccggcagaacagtaattagccctgaccccaacttacggattgatgaggtggccgttccagttcacgtggccaagatcctgactttccccgagaaggttaataaagccaatataaattttctgaggaagctggttcaaaacgggcctgaagtgcatccgggagcaaactttattcagcaacgacacacacaaatgaaaagattcttgaagtatgggaatcgggagaaaatggcccaggagttaaagtatggagatatagtcgagagacatctgattgacggcgatgtggtgttattcaaccggcagccttcactccacaagcttagcatcatggcacacctggctagagtgaagccacaccggacattccgattcaacgaatgtgtctgcacgccttataacgccgatttcgatggggacgagatgaatctgcacctgccacaaacggaggaagcgaaagcagaggccctagtcctcatgggaacaaaggccaatctcgtgacacccaggaacggcgaacctttaatcgcggcaatccaggacttcctcaccggcgcatacctgctcactttaaaggacacattttttgaccgggctaaggcatgccagattatcgccagcatactcgttggcaaggacgagaagatcaaagttcgcttgcccccaccgaccattcttaagccagtcacgctgtggaccggtaaacagatattcagcgtgattctgagaccaagcgacgataatcctgtaagggctaacttgcgtacaaaggggaagcaatactgtggcaagggggaagacctgtgcgcgaacgatagctacgtgacaattcaaaactctgagctgatgtcaggctcaatggacaaaggaacgctgggatccgggtcgaagaataacattttttacatcctccttagagactggggccagaacgaggccgcagacgccatgtcacgcctggcaaggctggcaccagtttacctgtcaaatagaggattttcaattggcattggcgatgtaaccccaggtcagggtttgctcaaggcgaagtacgaactcctcaatgccggatacaagaaatgcgacgagtatattgaagcgcttaacaccggaaaactccaacagcaacccggttgcaccgccgaggagacgctggaggccttgatcctgaaggagcttagcgtgattagggatcacgctggatccgcctgtctcagagagctggacaagagcaatagccccctgacgatggctctgtgtggcagtaaaggctctttcatcaatatctcacagatgatcgcatgcgtgggccagcaagccatctcaggctccagggtcccagatgggtttgagaacaggagcctcccacattttgagaagcattcaaagctccccgcagctaaggggtttgtcgctaactcattctactccggtctcaccccgacggagtttttcttccacacgatggccggtcgcgaaggcctggttgataccgccgtaaaaactgcggagacaggctatatgcagcggcgactggttaaaagccttgaggatctgtgtagccagtacgaccttactgtgcgatcgtctacaggagatattatccagtttatttacggtggcgacggtctcgacccagctgcaatggagggtaaagatgaacctcttgagtttaaacgagttctggataatatcaaagcagtttttccatgcccatccgagccagccctatcaaagaatgaactgatcttgaccaccgaatctattatgaaaaagtccgagttcctctgctgccaggactccttcctgcaggagattaagaaattcataaagggtgtgagcgaaaagataaaaaagaccagggataaatatggtattaacgacaacgggacaaccgaacctagggtgctataccagctggacaggatcactccgacacaggtggagaagtttcttgagacttgccgcgataagtacatgcgtgcacagatggagcccggatctgcggtgggggctctttgtgctcagagtatcggcgagcccggaacccagatgacattaaagacattccatttcgccggagtggctagcatgaatatcacccttggagtacctcggattaaggaaatcattaatgcctccaaagccattagcacacctatcatcacggcccagctcgacaaggacgacgacgccgactatgctagactggtcaaggggaggattgagaaaactcttctgggcgagatctctgagtatatcgaggaggttttccttccggatgactgctttattctcgtgaagctctcgttggagcggatacgcctcctaaggctggaagttaatgccgagacagtccgctatagtatctgtacttcaaaactccgagtgaagcccggagacgtggcggtacatggagaggcggtggtgtgtgttactccaagagaaaacagcaaatctagcatgtactacgttttgcagtttctgaaggaggatctgcctaaagtggttgtgcagggaatccctgaggttagcagagccgtgatccatattgacgagcagtcaggaaaggagaaatacaagttgctggtcgagggcgacaatttgcgcgctgtgatggcaacacacggggtgaaagggacccgaacaacctccaataacacctacgaagtcgaaaagactcttggcattgaggccgcaagaacaacgattatcaacgagatacagtatactatggttaatcacggcatgtcaatcgaccgaaggcacgttatgttgctgtccgacttgatgacctataagggtgaagtgctaggcataaccagattcggacttgccaagatgaaggaaagtgttcttatgcttgcctccttcgaaaagaccgccgaccacctcttcgacgccgcatacttcggtcagaaggattctgtttgcggtgtttcagaatgcattataatggggatcccgatgaacatcgggactggcctcttcaagctcctgcataaagctgacagagaccccaatccccctaaacgcccactgatatttgatactaatgagttccatatccctttggttacctag

SEQ ID NO: 235493 - DNA, 489 bp, synthetic construct
  misc_feature 1..489: note = Description of Artificial Sequence: Synthetic coding sequence
  source 1..489: mol_type = other DNA
atgtactacgtgctgcagttcctgaaggaggacctcccaaaagtggtagtgcaaggcatcccggaagtttcccgcgcagtgattcacattgatgaacaaagtggtaaagagaagtataagttgctggtggagggcgacaacttgcgcgctgtcatggctacacatggggtgaaggggacccgaaccacctctaataacacttatgaggtggaaaagaccctgggtatcgaagcggctagaacgactatcatcaatgagatccagtacacaatggtaaatcatggaatgtccattgacagacgccacgtgatgttgctttcagatctgatgacctataagggggaagttctgggcataactaggtttggcctggcaaaaatgaaagaatctgtattgatgttagcctcttttgagaaaacggccgaccacctgttcgacgctgcatactttggacagaaggacagcgtttgcgcctggccacagccgtag

SEQ ID NO: 235494 - DNA, 4110 bp, synthetic construct
  misc_feature 1..4110: note = Description of Artificial Sequence: Synthetic coding sequence
  source 1..4110: mol_type = other DNA
atggtgaaagagcagtttagagagaccgacgtagcaaaaaagatttcccacatctgttttggcatgaagagccccgaggagatgcgccagcaggcacacatccaggtcgtatctaagaacctttactcacaggataaccaacacgcccctcttctgtacggggtattggaccacagaatgggcactagcgagaaagaccgcccttgcgagacctgtggaaagaatttggccgattgcctgggacactatggctacatcgatctcgagctgccctgttttcacgtcggttattttagggctgtgatcggcattttgcagatgatctgtaagacctgttgccacattatgttgagtcaggaagaaaagaaacagttcttagattacctgaagcggccaggactcacatatcttcaaaagagaggactaaaaaagaaaatctccgataaatgccgaaagaaaaatatctgccaccactgtggggcatttaacgggaccgtgaagaagtgcggcctgcttaagataattcacgaaaagtataagaccaacaaaaaagtcgtagatccgattgtgagtaactttctccagagctttgagacagctattgaacacaacaaggaggtggagcctctccttggcagggctcaagagaacttaaatccattggtcgtgttaaacctgttcaaaaggatcccggcagaagacgtgcccttgctgctaatgaacccggaagccggaaagccctcagacctgatcctgacccgtctgctggtacctcccctgtgtatccgcccttctgttgttagcgatctgaaatcgggcaccaacgaggacgacctaaccatgaaactcaccgaaatcatcttccttaatgacgtcataaaaaaacatcgaatttcaggagctaagacccaaatgattatggaagactgggactttctgcaacttcagtgtgctctgtatatcaattccgagctgtctggcataccgctcaatatggctccaaaaaaatggacacgcggtttcgtccagagactcaaaggcaaacagggcagattcaggggaaatctgagcggaaagagagtggacttcagcggtcggacggtaatcagccctgacccgaatctgagaatagacgaagtggccgtgccagtgcacgttgccaaaatcctcacatttcctgagaaggtgaataaggcaaacatcaactttctacgaaaactagtgcagaacgggccagaagtccatccaggtgcgaactttattcagcagcggcacacacagatgaaaaggtttctgaagtacggtaatagggagaagatggctcaagagctgaagtacggtgatatagttgagcgtcatcttatagacggcgacgtagtgctcttcaatagacaaccaagcctccacaaactgagcattatggcccacctagctcgagtcaagcctcacaggacctttcgctttaacgaatgcgtatgcactccctacaatgctgatttcgacggcgacgaaatgaatctgcacctacctcaaactgaggaggccaaggccgaggcactagtgttaatgggcaccaaggctaacctggtgactccccgtaatggagagccactaattgccgcaatccaggattttctgactggggcatacttgctcacccttaaagacacatttttcgatagagctaaagcatgtcagatcattgcaagcatactggtggggaaggatgaaaaaatcaaggtgcggctaccccctcccaccattctgaagcctgtgactttatggactggcaaacagatctttagtgttatcttgcggccatctgacgataatcccgtccgcgctaaccttagaaccaaggggaaacagtactgtgggaagggggaggacctgtgtgcgaacgactcatatgtgaccattcagaactccgagctgatgtccggctcaatggataaagggacgctcggctccggttcgaagaataacattttttatatcctgttgcgcgactggggccaaaacgaggccgctgacgccatgtcccgactcgcacggttagcgccagtgtacctgtcaaatcgcggttttagcataggcataggcgacgttactccgggacagggccttctcaaggccaagtacgaactcctcaatgccggatataaaaaatgtgacgagtacatcgaggccctgaacactggaaagctgcagcagcagcccggatgcacagcggaagaaacgctggaagctctcatcctaaaagaattatctgtgattagggaccacgccggttccgcatgcctgcgggagctggacaagtcaaactcgccattgactatggccctgtgtggcagcaagggctcttttatcaatatcagtcagatgattgcttgtgtagggcagcaagccatatcaggctcaagagttccagacggctttgagaatcgctcactgccacatttcgaaaaacactcgaaactgccagcggctaaaggatttgtcgccaacagcttctactcgggtctgactcccacagagtttttttttcataccatggctgggagggaaggtctggtggacactgctgttaagacagccgagacgggctacatgcagcgtcgcctggtgaaaagcctggaggatctttgttcccagtacgacttgaccgttcggagcagtaccggtgacattattcagttcatttacggaggagacggtctggatcctgctgctatggagggtaaggacgagccacttgaatttaaacgtgttctcgataatatcaaggccgtctttccatgtccatcagagccggcactgtcaaagaacgagctcatcctgactacagaaagtataatgaagaagagtgagtttctgtgttgccaagattcctttctgcaggagattaagaaatttattaagggggtgtcggaaaagatcaaaaagacaagagacaagtacggcatcaacgacaacggtaccactgaaccgagggttttatatcagctggatcggattacccccacacaggtggagaagttcctcgaaacctgccgcgataagtatatgcgagcccagatggaacccggatctgccgtcggtgctctttgcgctcagagaaacataaccctgggcgtcccgaggattaaggagatcatcaacgcttctaaggcaatctcaacgcccattattacagcccagctcgacaaagatgacgatgccgactatgcacgcctggtcaaaggccgaatcgaaaagactctgttgggagagatatcggaatacattgaggaggtgttccttcctgacgactgtttcattctggtgaagctttcccttgaaaggatacggctgctgaggctggaggtcaacgcagaaactgtgaggtatagcatttgtaccagtaagctcagagtcaaacctggcgatgtggcggtacacggcgaggccgtggtttgtgtaaccccaagagaaaattccaagagctcaatgtattacgtgctacaatttcttaaagaagacttgcccaaggttgtagtgcaggggatccctgaagtaagccgtgcagtcattcatatagacgagcagagtgggaaggagaagtacaagctcttagtagaaggtgataacctgcgagccgtgatggcaacacatggcgttaagggcacccggacaacctccaacaacacttacgaggtggagaagactctgggtatagaggcagctagaaccacaattatcaatgagatccaatacacgatggtgaaccatggaatgtctatcgatcgaaggcatgtgatgctcttgtcagacctgatgacctataagggcgaagttctaggaattacccgctttggtcttgcaaagatgaaggaaagcgtgttgatgctggccagttttgagaagactgcggatcatctgttcgatgctgcatactttggacaaaaagactcagtgtgtggggtttcagaatgcatcataatgggcatacccatgaatatcggcaccggcctgttcaagttacttcacaaagctgaccgggatcccaacccccctaagcgaccccttatcttcgacactaatgagtttcacatccccctagtgacatag

SEQ ID NO: 235495 - DNA, 753 bp, synthetic construct
  misc_feature 1..753: note = Description of Artificial Sequence: Synthetic coding sequence
  source 1..753: mol_type = other DNA
atgaaggccaccataatccttctgctgcttgcgcaggtatcttgggctggcccattccaacagcgcggtttatttgactttatgctggaagacgaggcctctgggatcggccctgaggtccccgacgacagggactttgagccatccctaggaccagtctgccctttcaggtgccaatgccacctcagagtggtgcaatgtagcgacttagaactggggacaaaccctctaaaaagttctggaattgagaatggcgcatttcaggggatgaagaagttgtcgtatattaggatagctgacaccaatattacctcaatcccccagggcctgccaccttctctgactgaactccatctggacgggaataaaatcagccgtgtagatgccgcaagcttgaaggggctgaacaacctggctaaactgggactttcctttaatagtattagtgcggtggacaatggcagcctcgcaaacacgccccatctgcgggagcttcatctcgacaacaataagctgacccgggtgcctgggggactggcagagcacaagtacatacaggtcgtgtacttgcacaacaacaatatatccgtagtggggtcctccgatttttgtccacccggacataacactaaaaaagcctcctacagcggtgtttctttattctctaaccctgtgcagtactgggagattcaacctagtaccttccggtgcgtgtacgtccggtccgcaatccagttggggaattataagtag

SEQ ID NO: 235496 - DNA, 3228 bp, synthetic construct
  misc_feature 1..3228: note = Description of Artificial Sequence: Synthetic coding sequence
  source 1..3228: mol_type = other DNA
atgaaagctaatgaaaaagtcacttctgatgccgatcccatgtggtacctgaaatacctgaatatttacgtcggactgccagatgtggaagaatcttttaatgttacgaggcccgtatcgccacacgaatgtcggttaagagacatgacttatagtgcacctatcaccgtcgacatcgagtacacacggggaagccaaaggatcatccgcaatgcactccctattggccgaatgccaatcatgcttaggtcctccaattgtgtactgacaggaaaaacaccagctgagtttgcaaagctcaatgagtgccctctggaccctggcggatactttatagtcaagggtgtcgagaaggtcatcctgatccaggagcagctgtccaaaaataggatcatcgtcgaagctgacagaaaaggcgctgtgggggcatccgtgacatcctccacccacgagaagaaaagcaggaccaatatggccgtcaagcaggggagattttacctgcggcataacacactgtccgaagatattcctattgtgatcatattcaaagccatgggtgtcgaaagcgaccaggagatcgttcagatgataggtacagaggaacatgttatggcggctttcggcccatcacttgaagagtgtcagaaagcacagatctttacccagatgcaggccctaaagtacattggcaacaaggtgaggcggcagagaatgtggggcggtggaccaaagaagaccaagattgaggaggctcgggagctgttggcttccaccattttaacacatgtccctgtgaaggaatttaacttcagggctaagtgcatctacactgccgttatggttcggcgagtgattcttgcgcagggagacaacaaggttgatgacagggactactacggaaacaaaaggcttgaattagctggtcagttgctgtctcttttgttcgaagacctgttcaaaaaatttaactccgaaatgaaaaaaatcgctgaccaggtgattccgaagcaaagggctgcccaatttgatgtagtgaagcatatgagacaggatcaaattactaatggtatggtgaatgccatctcaaccggaaattggagcctgaagagattcaagatggatagacagggcgtgacacaggtcctgtctcggctgtcatacatttcagcgcttgggatgatgaccagaatttccagccagtttgaaaaaacgcgaaaagtgagtggtcctcgaagcctacaaccgtctcagtggggcatgttgtgcccctccgacacccccgagggcgaggcgtgtgggctagtcaagaacctggccctgatgacgcacataacgactgatatggaagatggcccaatcgtcaagctggcttccaacctcggggtggaagacgtgaacctgctctgtggtgaggagttatcgtacccaaatgtttttctcgttttcctcaatggtaacatcttgggtgtcattcgtgatcacaaaaagctggttaacaccttccgtctcatgcggcgtgcgggttacatcaacgagtttgtaagcatatcaacgaatcttacagaccgatgcgtgtatatcagcagcgacggcggaaggctgtgtcggccatacattatagtgaagaaacaaaagcccgctgttacaaataaacatatggaagaactcgcccagggataccggaattttgaagactttctacacgaaagtctagtagagtacttggacgtgaatgaggagaacgactgtaatatagctctctacgaacacactatcaacaaggatacaacgcatctggagatcgaacccttcacgctactgggcgtgtgcgccggtctaatcccatacccccatcacaatcagtcccccagaaacacataccaatgcgccatggggaaacaggccatggggacaatcggatacaatcagcggaaccgtattgatacattgatgtatctcctagcgtacccacagaagccaatggtgaagacaaagacgatcgaactgatcgagtttgaaaagttgcccgcaggtcagaacgctacggtcgctgtaatgtcatactctgggtatgacattgaagatgcactggtgctgaacaaggccagtctcgatcggggttttggaagatgccttgtgtacaaaaacgccaagtgcaccctgaaaaggtacactaaccaaacgttcgataaggttatggggcctatgctggacgcagctacacgtaagccgatctggcgacatgaaatcctcgatgcagacggcatttgtagccctggtgagaaggtagaaaacaagcaggttctagtgaataagtcaatgccaacggtgacccagattcctcttgaaggcagcaacgtcccacagcagccccagtacaaggacgtgccaattacttataagggggctactgactcctacatcgagaaggtgatgatttcctccaacgccgaggacgcttttctgatcaagatgctcctcagacaaaccagacggccagaaattggggataagttttcaagcagacacgggcaaaagggcgtgtgcggcttgattgttccacaagaggacatgcctttctgcgactccggaatttgtcccgatattattatgaacccacacggattcccttctcgaatgaccgtgggaaagcttatagagttactagctgggaaagccggagtccttgacggaagattccattacggaacagccttcggtggatctaaggtgaaggacgtgtgcgaggatcttgttcggcatgggtacaattacctgggaaaagattacgtgacaagcggtattaccggagagccccttgaggcttacatctatttcggacctgtgtactaccagaaactgaaacacatggtactggacaagatgcatgcacgggcacggggtccgagggccgtccttacccgccaacccactgaggggaggtcgagggacgggggattgcggctaggcgaaatggaaagagattgtcttataggttacggggctagtatgctgctcctcgagcgcctcatgatctcctctgacgcatttgaagtcgacgtctgcggacaatgtgggctgctggggtacagcgggtggtgccattactgtaaatccagttgccacgtaagcagcctgcgcattccctatgcgtgtaaactcttgttccaggaattgcaatctatgaacattatcccccgtctaaagctcagcaaatataatgagtag

SEQ ID NO: 235497 - DNA, 633 bp, synthetic construct
  misc_feature 1..633: note = Description of Artificial Sequence: Synthetic coding sequence
  source 1..633: mol_type = other DNA
atggacgacgaagaggagacctacagactgtggaagatcaggaagaccataatgcagttatgccacgatcggggttatctggtgacgcaggacgaactcgatcaaacattggaggaattcaaagcgcagtcgggtgataagccgagcgaaggaagacctaggcggaccgaccttacggtgcttgtggcccataatgacgacccgactgatcagatgttcgtattttttcccgaagagccgaaggtggggattaagacaattaaggtttactgccagaggatgcaagaggagaatatcacgcgagctttaatagtggtccaacaaggtatgacaccgtcagcaaagcagtcactggtggacatggcacctaaatacattcttgaacaatttctccagcaggagctgctcatcaatatcaccgaacacgaactcgtcccagagcacgtagtgatgacaaaggaggaggtgactgaactgctggccaggtacaagcttcgcgagaaccaactccccaggatacaggcaggtgaccccgtagccaggtatttcgggattaaacgtggccaggttgtgaagataatccgaccctccgagaccgccggaaggtatattacctaccggctcgtccagtag

SEQ ID NO: 235498 - DNA, 1173 bp, synthetic construct
  misc_feature 1..1173: note = Description of Artificial Sequence: Synthetic coding sequence
  source 1..1173: mol_type = other DNA
atggaggacccaacactttacattgtcgagcggcctcttccaggctatcccgatgcggaggcccctgagccctcctcagcaggcgctcaagccgctgaggagccttccggcgcaggatccgaagagcttattaagagtgatcaggtcaacggcgtgctagtactttctctgctggataaaattattggcgcagtggaccagattcaactcacacaggcacagcttgaagagagacaagcagagatggagggagccgttcagagtatccagggcgaattgagtaagttaggcaaggctcatgccactaccagcaataccgtatccaaactcctcgagaaggtgagaaaggttagtgtgaatgtaaagaccgtcagaggctctttggagagacaggctggccagatcaagaagctggaggtcaatgaagcagaactcctgcggagaagaaactttaaagtcatgatatatcaggatgaggtaaagttaccagcaaaacttagcattagcaaatctctcaaagagtccgaggcactcccagagaaggagggcgaggagctcggagagggagaaagaccggaagaagatgccgctgccttggagctgtcttcagacgaggccgttgaagtagaggaagttatagaggaaagtagggctgaaagaatcaagagatcgggccttcgaagagtggacgactttaagaaggccttcagcaaagagaaaatggaaaagacgaaagtaagaaccagggaaaatctcgaaaaaactcgactgaagactaaagagaatctcgaaaagacgaggcacacactggagaagcgcatgaacaagttaggaacaagattagtccctgctgaaaggagagagaaattgaaaacatctcgagacaagctgcggaagagttttacccctgaccatgtggtttatgcccgttccaaaaccgccgtgtataaagtgcccccattcactttccatgttaagaagattagggaggggcaagtggaagtgctcaaggccaccgagatggtggaggtgggggctgacgatgatgaaggtggcgctgaaagaggagaagcaggcgatctgaggagaggatcttcccctgatgtgcacgctttgttggaaatcaccgaagaatcggacgccgtcctggttgataagagtgatagtgattag

SEQ ID NO: 235499 - DNA, 1038 bp, synthetic construct
  misc_feature 1..1038: note = Description of Artificial Sequence: Synthetic coding sequence
  source 1..1038: mol_type = other DNA
atggaagaccctactttatacattgtggagagacctttaccaggctaccccgacgccgtggaccagatccagttgacccaagcccagcttgaggagagacaggctgaaatggagggcgctgtgcagtcaatacagggtgagctttcaaagctaggtaaagcccatgccacaacaagcaacacagtctctaagttactggaaaaagtaagaaaggtctcggttaatgtcaagaccgttaggggcagcctggagcgtcaggccggtcagatcaaaaagttagaggtgaatgaagccgagttgctcaggaggcgcaattttaaagtgatgatttaccaggacgaggtcaagcttccagccaaactgagcattagcaagagtctaaaggaatccgaagctttgcccgaaaaagagggagaagaattgggcgagggggagaggcccgaggaagatgccgcagcgctcgaactttctagcgatgaagcagtggaggtggaggaggtaattgaagagtcacgtgctgagagaatcaagagaagcgggctgcgccgtgtggacgactttaagaaggcgtttagcaaggagaagatggagaagactaaagtaaggacccgggaaaacctagaaaagactcgcctcaaaacaaaggagaacctggagaagacgagacataccctggagaaaaggatgaataaactgggaactcggctggttccggctgaacgaagagagaagcttaagactagccgcgataagcttcgcaagtcattcaccccggaccacgttgtgtatgcccgatcgaaaaccgcagtctataaggtgccgccatttacatttcatgtcaagaagatcagagaaggtcaggtcgaggtattgaaggctacagagatggttgaagtgggcgcagacgacgatgagggcggagccgagcgaggagaggctggggatctgagacggggttcttctcccgatgtgcacgccctgctggaaattaccgaagaaagcgacgctgtactcgtagacaaaagtgactcagattag

SEQ ID NO: 235500 - DNA, 2295 bp, synthetic construct
  misc_feature 1..2295: note = Description of Artificial Sequence: Synthetic coding sequence
  source 1..2295: mol_type = other DNA
atgctgctttttgtgctaacgtgccttctggccgtgtttcccgctatctccaccaaaagcccgatttttggtccagaagaggtcaacagcgtcgagggcaacagcgtctctattacatgctactatccacctaccagcgtgaaccgacacactaggaagtactggtgtcgccagggagccagggggggttgtattaccctcatctcctccgagggctatgtgagttccaagtacgcaggcagagcgaacctgactaacttccctgaaaatgggacttttgtggtgaacattgcacagttgtctcaagatgacagcgggagatataagtgcggtctgggtatcaacagtagggggcttagctttgatgtctccctcgaggtgtcgcaaggcccaggacttctaaatgatacaaaggtgtatacagttgacctaggcaggacggttactataaactgtccctttaaaaccgagaatgcacagaagcggaaaagcctgtacaagcagatcgggctctaccctgtgcttgtaattgatagctcgggatacgtgaacccaaattatacagggagaatccgcctggacattcaaggtactggccagttactcttcagtgtggtcattaaccaactacgcctgagtgacgccggacagtacctgtgtcaggccggtgatgactccaattccaataagaagaatgccgacctgcaggtgctcaaaccggaacctgagcttgtgtacgaggacctgagaggaagtgtgacgttccattgtgccctcgggcctgaggtcgctaatgtggccaagttcttgtgtagacagagtagcggcgaaaactgcgacgttgtggtgaatacgctcggaaagagagcccctgcatttgagggaagaattctgctgaaccctcaggacaaagacggctctttctctgtggtgatcactggcttacgaaaagaggatgccggaagatatttgtgcggagcccatagtgacggacagcttcaggaaggctcccctatccaggcttggcagctcttcgtgaatgaagaaagcaccatcccccgaagccctactgtcgttaagggagtggcgggaggctccgtggcggtcctgtgcccgtacaatcgtaaggaaagcaagtcgatcaagtactggtgcctttgggagggggcacagaacggcagatgcccactgttagtggattctgaaggatgggtcaaggcacaatatgaaggtcgccttagcctgctggaagagcctggaaacggtacattcacggtgattttgaaccagctgacttctcgggacgccggtttttactggtgcctaactaacggcgataccctctggcgaaccacagtggagatcaaaattatagagggtgagccgaacctgaaggtgcctggtaatgtaactgcagtgcttggagagactcttaaggtgccttgccattttccatgcaaattcagttcctacgaaaaatactggtgcaagtggaataataccggttgtcaggcactgcccagccaggacgagggcccttccaaagcatttgtaaattgtgatgaaaactctcgcctcgtgagtctcacactcaatttagttactagagccgatgagggctggtactggtgtggtgtgaagcaggggcacttttacggtgagacggccgctgtgtatgtggcagtagaggaacggaaagccgcaggttcccgggacgtctcgctggcgaaggctgatgccgctccagatgaaaaagtcctcgactcagggttcagagaaattgaaaataaggcgatacaggatcccaggctcttcgcagaagaaaaggctgttgcggatacgcgggatcaggcagacggtagcagggcctccgttgacagtggctccagtgaagagcaggggggaagctctcgtgctctcgtgtcaacactggtgccactaggactggtcttggccgttggagctgtggctgtgggcgtggctagagccaggcatagaaaaaacgtggatagagtgagtattaggagttacaggacagatattagcatgtccgactttgagaactccagggaatttggtgccaacgacaatatgggggctagctcaataacacaggaaacctccctggggggtaaggaagagtttgtagccacaaccgaatccacgactgagaccaaggagcctaagaaggccaagagaagcagcaaggaagaagccgaaatggcttacaaagactttttgctacaatcctccaccgtagccgctgaggcccaggacggccctcaggaagcctag

SEQ ID NO: 235501 - DNA, 1596 bp, synthetic construct
  misc_feature 1..1596: note = Description of Artificial Sequence: Synthetic coding sequence
  source 1..1596: mol_type = other DNA
atggacggcatagtccctgatatagcggttgggactaaaagagggtcggacgaattgttctctacatgtgtcaccaatggcccattcattatgtcctcaaatagcgcaagcgccgctaacggcaatgattctaagaagtttaagggcgactctcgttccgctggcgtcccatctcgagtgatccacattagaaaattgcccatcgatgtgactgaaggagaagttataagtttgggcctgccttttggtaaagtgactaacctgttaatgctcaagggtaagaaccaagccttcatagaaatgaataccgaagaggccgcaaataccatggttaattattatacatcagtgacacctgtacttagggggcagcccatttacattcagttctctaatcacaaagagctgaagaccgattcatctccaaaccaggcgagagctcaggccgcactgcaggccgtcaactccgtccagtccggaaatcttgccctagcagctagtgctgccgctgtagacgccggaatggctatggcaggccagtccccagtcctccgaatcatagtcgagaatctcttttaccccgtaaccctggatgtcttgcaccagatcttttctaagttcggcactgtgctcaaaattataacatttaccaagaataatcagttccaggccttgctccagtacgcggatcccgtatccgctcaacacgctaagctttcgctggacggccagaacatctacaacgcctgctgcacactgcggattgatttttcaaaactgacgtcactcaacgtgaagtacaataacgacaaatcacgcgattatactcgacctgacctcccgtcaggagactctcagccgtcattggaccagactatggccgcagccttcggactgtccgtaccaaacgtacacggcgcattagccccacttgccatcccttccgccgcagctgcagccgctgctgccggtcggatcgcgatccccggattagccggagccggaaatagcgtgttactcgtcagcaaccttaaccccgaacgcgttactccccagagtctgttcattctttttggcgtgtatggcgatgtgcagagggtcaagatcctctttaacaagaaagagaacgccctggtccagatggctgatgggaaccaggcccagttggccatgtcccaccttaacggccataaactccacggcaaacctattaggatcaccctgagtaaacaccaaaacgttcagctgccgcgagaaggacaggaagatcaagggctaacaaaggattatggaaactctcctctgcataggttcaaaaagcctggcagcaagaatttccagaatatatttcctccaagcgccaccctgcacctttcgaacatcccgccttctgtttccgaagaggatctgaaggtcctattttcatctaacgggggagttgtaaaggggtttaagttcttccagaaggataggaagatggccctgattcagatgggctctgtggaagaagccgtgcaggctctcatcgatctccataatcacgacctgggggagaaccaccacttgcgcgtgtcatttagcaaaagcacaatttag

SEQ ID NO: 235502 - DNA, 594 bp, synthetic construct
  misc_feature 1..594: note = Description of Artificial Sequence: Synthetic coding sequence
  source 1..594: mol_type = other DNA
atggatggaattgttccagacattgcggtagggacaaaacgggtcacgccccagtctctgttcatcttgtttggagtgtacggagacgtgcagcgcgtaaagatcctctttaataagaaggaaaatgcgttggtgcagatggcagacggaaatcaggcacagttggccatgtcacacctcaacgggcacaagctacatgggaagcccattagaattaccttgtctaagcaccagaatgttcagctgcccagggaaggccaagaagaccagggtctcaccaaagactacggcaacagtcccctacacagattcaagaaacccggttctaagaattttcagaacattttccccccaagcgccaccttgcacttgagtaacatacccccttcggtttcagaggaggacctgaaggtgctgttttcatcaaacggaggagtagtcaaaggcttcaaattctttcagaaggacagaaaaatggcgctaatccagatgggatccgttgaagaggcagtgcaagcacttatagatttacacaaccacgacttaggcgaaaaccatcacctgcgggtgagtttctccaagtcaacaatctag

SEQ ID NO: 235503 - DNA, 1674 bp, synthetic construct
  misc_feature 1..1674: note = Description of Artificial Sequence: Synthetic coding sequence
  source 1..1674: mol_type = other DNA
atggacggcatcgtacccgacatagccgtcggaacgaaaagagggagcgatgagctgttttctacatgcgtgaccaatgggcctttcatcatgagctcgaacagcgcctcagctgcaaatggtaatgactctaagaaatttaagggcgactcccgctctgctggggtccccagtcgggtgatccacattaggaagctacccattgatgtaaccgaaggggaggtgatcagtttaggcctgcctttcggcaaagtcacaaacttgctgatgctcaagggaaagaatcaagccttcatcgagatgaatactgaagaggccgctaacacgatggtaaattactacacttcggtcaccccagtcctccgaggacagcctatctacatccagttctccaaccataaggagctgaaaaccgactcttctcccaatcaggccagggcgcaggccgctctccaagccgttaacagcgtgcagagtggcaatctggccctcgctgcaagcgcggctgctgtggacgctggaatggcgatggctggccagtcacctgtgctaagaataatcgtagagaacctattttaccccgtgacacttgacgttctgcatcagatatttagtaaatttgggacggtgctgaagataattacatttacaaagaacaatcaattccaggcccttctgcaatatgccgacccagtgtcagcccagcatgcaaagctctcccttgacgggcagaacatttataacgcttgctgcacgttgcgcatagactttagcaagcttacaagcttgaacgtgaaatataataatgacaaatccagggattatacacgaccagatctgccttctggagattcccagcccagtctggaccaaaccatggccgcagcttttggcgctcctgggattatatcagcgagtccttacgctggggcaggatttccgcctacgttcgccataccccaggcggcaggattatccgttccgaacgtacacggggctctggcgccactggctatcccatctgcagccgctgccgctgcagctgcgggacgaattgctattcccggtctcgcgggagctgggaactccgtgttgctggtctccaatctcaatcccgagcgtgttaccccccaaagtctcttcatcttgtttggcgtatatggggacgtccagagggtgaagatcctcttcaacaagaaggagaacgctcttgtccagatggctgacgggaatcaggcccaattagctatgtcgcatctgaatggccataagctgcatggcaagcccattcgaatcacattgtccaagcatcagaacgtgcaactgcccagggaagggcaggaggatcagggattaaccaaggactatggcaactccccgttacaccgcttcaaaaagccagggtcaaagaattttcaaaacatttttcctcccagtgcaacactgcacctgtccaatattccaccttctgtgtcagaggaagacttaaaagtgctgttttcaagtaatgggggagtggtgaaaggttttaagtttttccaaaaagacagaaaaatggctctgattcaaatgggctcagtcgaggaagccgtgcaggccctgattgacttacacaatcacgatcttggggagaatcaccatctccgggtttcgttctcaaagagcacaatctag

SEQ ID NO: 235504 - DNA, 1653 bp, synthetic construct
  misc_feature 1..1653: note = Description of Artificial Sequence: Synthetic coding sequence
  source 1..1653: mol_type = other DNA
atggatggaatagtacccgatatcgccgtcggtacaaaaagagggagtgacgaactcttctctacctgtgttaccaacggccctttcatcatgtcgtcaaattcggccagcgcggcaaacggcaatgactcgaagaagtttaaaggcgatagccgatcagcaggcgtgcctagtcgggtgatccacattaggaagttgcctattgatgtgacagaaggtgaagtcataagtctcggactaccattcgggaaggttacaaacctcctcatgctgaaaggaaagaaccaagctttcatcgagatgaacaccgaggaggccgctaacaccatggttaactattatacatccgtcactcccgtgctccgcggtcagcccatttatatccagttttctaatcataaggagctgaagaccgacagctccccaaaccaggcccgagctcaggccgcattacaggccgttaactctgtccagtctggcaacctggctctcgcggcaagtgccgctgccgtggacgccggtatggcaatggccggacagtcccccgttttaaggattatcgtggagaatctgttctatcctgttactctagacgtgctccatcagatctttagcaagttcgggaccgtgttgaagattatcacttttacaaaaaacaaccagtttcaggctctgctgcagtatgccgaccccgtctctgcccagcacgccaaactgagcttggacgggcagaacatttataatgcatgttgcaccctccgaatcgacttctcaaagctgacaagtttaaatgtaaaatacaacaacgacaagtcccgtgactacactaggcctgacttaccgtccggtgatagtcagcccagccttgatcaaacaatggcagccgctttcgctagcccatacgccggtgcgggattccccccaacttttgctattcctcaggctgccggtttgagtgtacctaatgtacacggtgctttagcacctttggcgataccctcagctgccgctgccgctgccgcagccggaagaatagccatccctggtctggccggtgccggaaactcggttctcctcgtgtctaatctgaaccccgagcgcgtaacccctcagtccctttttattctgttcggcgtgtacggcgacgtacagcgagtaaaaatcttgttcaacaagaaggagaacgcccttgtgcagatggctgacggcaaccaggctcagcttgctatgtctcacttgaatggccacaaattgcacggcaagcccattagaattacactgtcaaaacatcaaaacgtccagctcccgagggagggccaggaagaccagggcctaaccaaagattatggtaacagtcctcttcaccgatttaaaaaacctggctctaaaaatttccagaatattttccctccaagtgccacactccatctcagcaatattcccccatcagtctccgaagaggacctgaaggtgctgttctcgagtaacggaggtgtggtgaagggattcaagttctttcaaaaggacagaaaaatggcattaattcagatgggttccgtggaggaagcagtgcaggctctcattgacctgcataatcacgatcttggcgagaaccaccacctcagggtctcctttagcaagagcacgatttag

SEQ ID NO: 235505 - DNA, 1599 bp, synthetic construct
  misc_feature 1..1599: note = Description of Artificial Sequence: Synthetic coding sequence
  source 1..1599: mol_type = other DNA
atggacgggattgttacagaagttgcggtaggcgtgaagagagggagcgacgaactcctgtcagggagcgtgctttccagccctaacagcaatatgtcttccatggtggttaccgccaatgggaatgatagtaaaaagttcaaaggcgaggacaagatggatggtgccccaagccgggtactccacatcagaaagctgccgggtgaggtgactgaaacagaggtgatcgcactgggtctgcccttcgggaaagtcaccaacatcctgatgttaaaaggcaagaaccaggcgtttcttgaactggccaccgaggaggcagccattactatggtgaactattattccgcagtcaccccacacctgcggaatcagcccatctatatccaatactcgaatcacaaagagctcaaaaccgataatacactgaaccagcgggcacaggcggttctgcaagctgttaccgcagtccagactgctaacacgccgctctcaggcacaaccgtctccgaatcagctgtgaccccagcccagtctcccgtgcttcgaattataatcgacaatatgtactatcccgtgacactggacgtgctacatcagattttttcgaaatttggggcagtactgaagattatcaccttcactaagaacaatcagttccaggccctcctgcagtatggagacccagtcaacgctcagcaggctaagctggctctcgatgggcaaaacatctacaacgcttgctgcacgttgagaatagacttttccaaactggttaatctgaacgtaaagtacaacaatgacaaaagccgagactatacgcgcccagatcttccgagcggcgacgggcaacccgctctggatccagccatcgctgcagccttcgctaaggagacctccctgctggccgtgccgggagctttaagtcctttggccatcccaaacgccgcagccgctgctgccgcagcggcagcagggcgtgtgggcatgcctggggtttcagccggaggtaataccgtcctgctggtgtctaacttgaacgaagaaatggtcacgccacagagtctgttcacactttttggggtctatggtgatgttcagcgcgtcaagatcctctacaacaagaaggacagcgcgctgattcagatggccgacggaaaccagagccagctggcaatgaatcacctcaatggacagaaaatgtatggtaaaataatccgcgtgaccttaagcaagcatcagaccgtgcagctgcctcgggaaggactcgatgaccaggggctaacaaaggacttcggtaacagccctctccatcggttcaagaaacccggatccaagaattttcaaaatatctttccaccaagcgctaccctgcatcttagcaacatacctccaagcgtagccgaagaggacctgcgcacattgtttgccaatacaggcggtaccgttaaagcgttcaaatttttccagagggaccataaaatggcactcctgcagatggccacagtggaggaggccatacaagctctgatcgatttgcacaactataacctgggagagaatcaccacctgagggtttctttctctaagtcaacgatttag

SEQ ID NO: 235506 - DNA, 1614 bp, synthetic construct
  misc_feature 1..1614: note = Description of Artificial Sequence: Synthetic coding sequence
  source 1..1614: mol_type = other DNA
atggacggcatcgtaactgaagtcgctgtcggggtgaaacgaggatccgatgagctgttgtctgggagtgtgctgtcgtcaccaaactcaaatatgagtagcatggttgtgaccgccaacgggaatgattccaaaaaattcaaaggggaagataagatggacggagctcccagtagagtactgcacatccgcaaattaccaggagaggtgacagaaacagaagtgattgcattgggcctgccgttcggcaaagtgaccaacatcctgatgctgaaaggtaagaaccaggccttcttagaactagctaccgaggaggctgccataacgatggttaactactattccgcagtgactccccacctgagaaaccagcccatttatattcaatatagcaaccacaaagaactcaagaccgataatactttgaaccaaagggcgcaggccgtgcttcaggcggtgacagctgtgcagaccgcaaatacaccgctgagcggcaccacagtgagtgaatctgccgttacgccagcccaatctccggtgttgagaattattatcgacaacatgtattatcccgtcacactcgatgtcctgcatcaaatatttagtaaattcggtgctgtactaaaaattataacctttacaaaaaacaatcagttccaggccctgctgcaatatggggacccggtaaacgcccagcaggctaagttagcgctggacggccagaacatctataacgcctgctgtactctcaggattgatttttcaaagctggtcaacttgaacgtcaaatacaacaatgataagagccgtgattataccaggcctgatctgccatcaggtgacggtcaacccgcactcgatccggcaatagccgctgcgttcgcaaaagagacatcactacttggcttgcccgtagcagccgtacctggcgcactcagcccactggctattcccaatgccgcagccgcagccgcagccgctgcagctggtagagtgggaatgcccggagtgagcgcgggaggaaacaccgttttgctggtgtccaatctcaatgaggaaatggtcaccccccagagtctattcactctgtttggagtatatggagacgtgcagagggttaagatcctctacaataagaaggattctgccctgatccagatggcagatggaaatcagagccagcttgccatgaatcacctaaatggacagaagatgtatggtaaaatcattcgggtgaccttgtctaaacatcaaacagtacaactgccccgtgagggtttagacgaccagggcctgaccaaggacttcggaaatagccccttgcacagattcaagaagcctggatccaagaacttccaaaacatcttccccccttctgccactctacatttaagcaatatcccacctagtgtggcggaagaggatctcagaaccctgtttgccaatacaggtgggacagtgaaggcatttaaatttttccagcgcgaccacaaaatggcattgctgcagatggccactgttgaagaggccatccaggccctgatagatctgcacaattataatttgggagagaaccaccacctgagagtcagcttttccaaaagcactatctag

SEQ ID NO: 235507 - DNA, 1611 bp, synthetic construct
  misc_feature 1..1611: note = Description of Artificial Sequence: Synthetic coding sequence
  source 1..1611: mol_type = other DNA
atggatggaattgtgactgaagttgccgtgggtgtaaagaggggttctgacgagctcctgtcggggtccgtgctgagctcacctaattctaatatgtcttcgatggttgtcaccgcaaacgggaacgactcgaaaaaattcaagggcgaagacaaaatggacggagcaccatccagagttcttcatatcaggaagttacctggcgaagtgactgagactgaagtgatcgctctggggctgccattcggcaaagtcaccaacatcttaatgctgaaaggaaaaaaccaggcgttcttggagctcgctaccgaagaagcggctatcaccatggtaaattactacagcgctgtcacaccgcatttaagaaatcagccgatctacattcaatatagtaaccataaagagcttaaaaccgacaatactctgaatcagagagctcaggccgtgctacaagcagtgaccgctgttcagactgcaaatacacccttaagtggcacgactgtcagtgagtctgctgtcacccctgcccagtcacccgttctgcggattatcatagacaacatgtactatcctgtcacgctcgatgttttgcaccagatatttagcaaatttggagccgtcctgaaaattataacttttacaaaaaacaatcagttccaggccctactgcagtacggagacccagtaaacgcgcagcaggccaaattggctctggacggccagaatatttataacgcatgctgtacattaaggattgacttctctaaactcgtcaatctgaatgtgaaatacaataatgataaatctcgagattacacccggcctgatttgccgtctggcgacgggcaacctgcgctggaccccgctatagctgccgcattcgccaaagaaacatccctcctaggtctgccagtcgcagctgttcccggtgcccttagccccctcgcgattccgaacgcagccgctgccgcagccgctgctgctgccggtcgggtgggaatgcccggtgtgagcgctggtgggaataccgtactgttggtctccaacctcaatgaggagatggtgactccccaaagtctctttactctattcggagtgtacggcgacgtgcaaagggtcaaaattttatataataagaaagattctgccctgatccagatggcggatgggaaccagtcccagctagctatgaaccacctgaacggtcagaaaatgtatggcaagatcatccgggttacactgagtaaacaccagacagtccaattgccccgtgaggggctagacgaccagggcctgactaaggactttggcaactccccattgcatcgattcaaaaagcctggcagtaagaatttccaaaatattttccctccgagtgccactttgcatctgtccaacatccccccttccgtggctgaagaagatttacgcaccctgtttgccaacaccggcggtaccgtgaaggcttttaaatttttccaggaccacaagatggccctcctgcagatggctactgtggaggaggccatccaggctctcatagacctccataactataacctgggtgagaaccatcatctccgagtgtccttcagcaagtcaactatttag

SEQ ID NO: 235508 - DNA, 1056 bp, synthetic construct
  misc_feature 1..1056: note = Description of Artificial Sequence: Synthetic coding sequence
  source 1..1056: mol_type = other DNA
gggatgaagaggggttctgatgaactcttaagtgggtctgttcttagcagtcccaattcgaatatgtcctccatggtggtcactgctaacggaaacgatagcaaaaagtttaaaggggaagacaaaatggatggggctccttcgcgggtgctgcatattcgcaaactgcctggagaggtaactgaaactgaagtgatcgcactggggctcccgtttgggaaggtaacaaacatcctgatgctaaagggaaagaatcaggctttcctcgagttggcgaccgaagaagcagccatcacaatggttaactactactccgccgtcaccccacatctacgtaaccagcctatctacatccagtattcaaatcacaaggaactgaagacagacaacacactgaaccagcgcgcacaggccgtgctccaagccgtgactgccgtgcagacagccaatacgcctctttctgggactacagtgtcagagtccgcagtgacgcccgctcagagcccagtgctccgcatcatcatagataacatgtattatcccgtgaccctcgacgttctgcaccagatattttctaaattcggcgcagtgcttaagattataactttcaccaaaaataatcagttccaggcccttctgcagtacggggacccagtgaatgctcagcaggccaaattggctctagacgggcagaatatttacaacgcatgctgcacattgcggatagacttttcgaagctcgtgaacctgaatgtgaaatacaacaacgacaagtcgcgcgattacactagaccagacctcccctccggtgatggacaacctgccctggatcccgctatagcagcagcttttgcaaaagaaactagtctgctcggtctcccagtggcagctgtgcccggagcacttagtccactggccattcccaatgctgccgcagcagccgcagccgctgccgctggacgcgtcggaatgcccggtgtctcagccggaggcaatacagtgctgcttgtgtcaaatctgaatgaggaggtgtttatggagatgtgcagcgtgtag

SEQ ID NO: 235509 - DNA, 1647 bp, synthetic construct
  misc_feature 1..1647: note = Description of Artificial Sequence: Synthetic coding sequence
  source 1..1647: mol_type = other DNA
atgtggtctaatctcactttcagcttcttcggcttacgcaccaaagcgaaaaagtacgtcacagtgaataaccgcggatctgacgagctgctgagtggatccgttctgagctcccccaattcaaatatgtcttcgatggtcgttaccgcaaacggtaatgattcaaaaaaattcaagggggaggacaaaatggatggagccccttctagagtgctacacataaggaagcttcccggtgaagttaccgaaaccgaggtaattgccctcggcctgccattcgggaaggtaactaacattctcatgctgaagggcaagaaccaggcattcttggaactggcgaccgaggaggccgcaatcacaatggtcaattactatagcgccgtcactccgcacctgcggaatcagccaatctacatccagtattcaaaccataaggaacttaaaacagacaatacattgaatcagcgcgctcaggcggtgctgcaggcagtaaccgccgtgcagaccgcaaataccccactttccggcaccactgttagtgagtcagcggttaccccggctcagagtcccgtcctgcgaattattatagacaacatgtactaccccgtgaccttggatgtgctacatcagattttctctaagttcggcgctgttcttaaaatcataacgttcaccaagaataaccagttccaggcactgttgcagtacggcgaccccgtaaacgcccagcaggcaaaactggctttagatgggcaaaacatctacaatgcctgttgcactcttagaatcgacttttctaagcttgtgaacctgaatgtgaaatataataatgataagagccgggactatactagacctgacttgccttcaggcgacggtcaacccgctctggatccggcaatcgccgctgcttttgccaaggagacctcccttctgggcttacctgtggctgccgtgccgggtgcattaagccccctggccatccccaacgcagcagctgctgcagctgcagcagccgcaggccgagtcgggatgcccggtgtcagtgctgggggaaacacagttctgctcgtgtcgaacctaaatgaagagatggtgacgcctcagtctcttttcaccctattcggagtttatggggatgtacagcgcgtgaagattctgtataataaaaaagactcggcgttgatccagatggcagacggtaatcagagccaactggctatgaatcacctcaatggtcaaaaaatgtatggcaagatcatcagagtcaccctttctaagcaccagactgtccagctcccccgagaagggttagatgaccaggggctgacaaaagacttcggtaatagccctcttcatagatttaagaagcccggttcaaagaactttcagaatatctttccaccttcagccacactccatctgagtaacatcccaccctctgttgccgaggaggacctgcgcaccctctttgcaaacaccggcggaactgtgaaggctttcaagtttttccagcgggatcacaaaatggccctgctgcagatggcgacagtggaagaggccatccaggctctgatagatctccacaattataatttgggggagaatcatcacctccgagtgtcttttagtaaatcgacaatctag

SEQ ID NO: 235510 - DNA, 1596 bp, synthetic construct
  misc_feature 1..1596: note = Description of Artificial Sequence: Synthetic coding sequence
  source 1..1596: mol_type = other DNA
atggatggcattgttactgaggtcgctgtgggagtcaaacgcggatcagacgaactactttccggctccgtgttgtcatcgcccaactccaacatgagctctatggtcgtgaccgcaaacggaaatgattccaaaaaattcaaaggagaagacaagatggacggtgcaccaagccgtgtgctgcatatacggaagcttccaggcgaagtgactgaaacggaagtgatcgccctgggtctaccgtttggaaaggtcacaaatatcctgatgctcaaggggaagaaccaagctttcctggagcttgccactgaagaagccgcaatcacaatggtgaattactatagcgcggtgacgcctcacctgagaaaccagcccatttacatccaatatagcaatcataaagaactcaaaacagacaacaccctgaaccagagagctcaagccgtgctgcaggccgtgaccgccgtccagacggcaaacacccctctcagcggaacgaccgtttccgagagtgcggtgacccccgctcaatcaccagtgttgcggatcatcatcgacaatatgtactatcccgttaccctcgacgtcctccatcagattttctccaagttcggcgcagtgctgaagataataactttcaccaagaataatcagtttcaggcacttctgcagtatggcgacccggtaaatgctcaacaggcgaaactggccctagacggccagaacatttacaacgcctgttgcaccctgagaattgacttctctaagctggtcaacctgaatgtcaagtacaataacgataagtcacgcgactacacaagaccagacctgccctccggtgatggccagccggctctggatccggctattgctgcagctttcgcgaaggaaacatctctcttggccgtgcccggagctctctcccccctggctattccgaatgctgccgctgcggctgcagcagccgctgcaggcagagtcggcatgcccggtgtgagcgccggtgggaatacagtgctcttggtgagcaacctgaatgaagagatggtaaccccacagagcctctttacattgttcggcgtgtacggggacgtacagcgagtaaaaatactgtacaacaagaaggacagtgccctgattcagatggccgacgggaatcagagccagctggctatgaatcaccttaacggccaaaagatgtacggcaagattattagggtgactctgtccaagcaccagacggtgcagcttccaagggaaggattggacgatcagggcttaacaaaagacttcgggaactcccccctccacagattcaaaaagcctggttctaaaaacttccagaacatctttccaccttctgctaccctccatttatccaacatccccccatctgttgctgaagaagatctgaggaccctgtttgcgaacactggagggaccgtaaaggcctttaagttttttcaggaccacaagatggcactcctccagatggccactgttgaggaagcaatccaggcactgatcgatctccacaactacaatctcggagagaaccaccatttgagggtgagcttttccaagtcaactatctag

SEQ ID NO: 235511 - DNA, 978 bp, synthetic construct
  misc_feature 1..978: note = Description of Artificial Sequence: Synthetic coding sequence
  source 1..978: mol_type = other DNA
atgtcttctatggtagtgactgctaatggcaacgacagtaaaaaatttaagggcgaagacaaaatggatggtgctccttcccgtgtccttcatattaggaagttgccgggagaggtaactgaaacggaggtcattgccctcggcctgccctttgggaaggttaccaatatattaatgcttaagggaaagaatcaggccttccttgaactggccaccgaggaggctgcaatcactatggttaattattatagtgccgtgacaccgcacttaagaaaccagccaatttacatacaatattcaaatcataaagagttgaagaccgataacacccttaatcagagagcccaggctgtactacaagcagttacagccgtgcagactgcaaacacacctctgagtggaacaactgtctcggagtccgccgtgactcctgcccagtcccctgttctccggatcatcatagataatatgtactatcctgtgactctggacgttctgcatcaaattttctctaaatttggggctgtgctcaaaattatcaccttcacaaagaacaaccagttccaagccctcctgcagtacggagaccctgttaacgcccagcaagccaagctagctctcgatggccagaacatatacaacgcttgttgcactctgagaatcgacttcagcaaattagtcaatctaaatgttaagtacaataatgataaatcccgcgattatactcgccctgatctgccgtccggggacgggcagcccgctttggatccagccattgccgcagcttttgccaaggagacatccttactggcagttcctggcgctttaagcccactggccatccctaacgcagctgcggcagcagcagcagctgctgcagggcgagttggaatgcccggtgtctccgcgggtggcaatacagtattactggtttccaacctgaacgaagaagtttttatggaaatgtgtagtgtctag

SEQ ID NO: 235512 - DNA, 615 bp, synthetic construct
  misc_feature 1..615: note = Description of Artificial Sequence: Synthetic coding sequence
  source 1..615: mol_type = other DNA
atgccaggcgtgagcgctgggggaaatactgtgctgttggtgtcaaacctgaatgaggagatggttacacctcagtccctgttcacgctcttcggggtttacggtgacgtacagagagtgaaaattctgtacaacaagaaagattctgcgctgatacagatggccgacgggaatcagtcccagctggccatgaaccacctgaatggacagaaaatgtatggtaagattatcagggtaactctgtcgaaacaccagaccgtgcagctaccccgagaggggctggacgaccagggcctcactaaggactttgggaattcaccactccacaggttcaaaaagccaggaagcaagaattttcagaacatttttcccccaagtgccaccttgcacctcagtaatatcccacctagtgtcgccgaggaggacttgcgtactttgtttgcgaatactggcggtacggtcaaagcgttcaagtttttccagcgcgaccacaaaatggccctgctgcagatggcaaccgtcgaggaagccatacaagcgctaatagatctgcataattataatctgggcgaaaatcaccatttgagggtctctttcagcaagagcacaatctag

SEQ ID NO: 235513 - DNA, 348 bp, synthetic construct
  misc_feature 1..348: note = Description of Artificial Sequence: Synthetic coding sequence
  source 1..348: mol_type = other DNA
atggtgtgcagtccggtcacacttaggatcgctccgccagatcgcaggttctctcgtagtgcgatccctgaacagattatttccagcacgctgagttcaccatctagcaacgcgcctgacccgtgcgccaaagaaaccgtgctctccgcactcaaagaaaaaaagaagaaacgaaccgtggaggaggaagaccagatatttctggatggccaagaaaataagcggagctgcctcgtggacggtctcacagacgcgtcctccgcctttaaagtgccacgcccaggtcctgacacgttgcaatttactgtggacgtattccactttgccaacgacagtcggaatatgtag

SEQ ID NO: 235514 - DNA, 564 bp, synthetic construct
  misc_feature 1..564: note = Description of Artificial Sequence: Synthetic coding sequence
  source 1..564: mol_type = other DNA
atggtgtgcagccccgtcaccctcaggattgcaccacccgatcgacggttctcccgaagtgccatccctgagcaaataataagctcaacactctcgagcccttccagtaacgcccctgacccatgcgcaaaagagactgtgctgagcgccctcaaggaaaagaaaaaaaagcgcaccgtggaagaggaggatcagatattcctcgatggacaagaaaataaaagatcgtgcttggtggatggacttacggacgcctcctctgcatttaaagtgccgagaccaggaccagatactttgcagtttactgtagacgtgtttcattttgctaacgatagcagaaacatgatctatatcacttgccatctgaaggttaccctggcagagcaggaccctgacgagttgaataaggcgtgctcattctctaagccctccaactcttggtttcccgtagaggggcttgctgacatctgtcagtgctgtaacaaaggtgattgcggtactcctagccactcccgcagacagcccagggtcgtcagccagtggtctacaagcgcatcattgtag

SEQ ID NO: 235515 - DNA, 1095 bp, synthetic construct
  misc_feature 1..1095: note = Description of Artificial Sequence: Synthetic coding sequence
  source 1..1095: mol_type = other DNA
atgtccgcgaatagttcaagagttggacagttactgctgcaggggtctgcatgtatcaggtggaagcaagatgtggagggggctgtgtaccatttggctaactgcctgcttcttctggggtttatgggcggttcaggagtctatggatgcttctaccttttcggcttcttgagtgctggttacctttgttgtgtgctatggggttggttttccgcctgtggtctggacatcgttctctggagtttcttgctggctgtggtttgcttgctacagttagcccacttggtctataggttacgcgaggacacactccccgaggagtttgatctcctctataagaccctgtgtcttcccctccaggtccctctgcaaacttataaggaaattgtccattgctgcgaggagcaagtccttactctggcaacagaacagacatacgctgtcgaaggtgagacccctatcaacagactgagtctgctcctgtccggtagggtgagagtgtctcaagatgggcagtttctgcattatatctttccctaccagttcatggactcccctgaatgggagtccctgcagccttccgaggaaggcgtgtttcaggtgacgcttactgccgaaacaagctgttcctatatcagctggcctcgaaagagtcttcatttgctgctgaccaaggaacgctatatctcctgcctattcagcgcgctgctcggctatgacatcagcgaaaagctgtatactctcaatgataaactgttcgctaagtttggactccgctttgatatccgacttccatctttataccatgtgcttgggcctactgctgccgacgccggacccgagagtgaaaaaggtgacgaggaagtctgcgaaccagctgtgtcccccccacaggctactcccacatcccttcagcagactccaccttgttctaccccaccggctaccactaacttcccagcgcctcccacccgcgcacgtctgtctcgtccagatagtggcatactagcctctcggattccgcttcagtcatacagtcaggtgatctctagagggcaagccccactggccccaacacacactccagagctgtag

SEQ ID NO: 235516 - DNA, 1083 bp, synthetic construct
  misc_feature 1..1083: note = Description of Artificial Sequence: Synthetic coding sequence
  source 1..1083: mol_type = other DNA
atgagcgccaattcatcaagagtcggacagctgctgttacagggcagcgcctgcatccgctggaagcaagacgtggaaggggcagtgtaccacctagctaattgtttattgctgctaggcttcatgggaggcagtggcgtgtacggttgcttctatttgtttggcttccttagcgccggttatttatgctgtgtgctctggggatggttcagtgcctgcggcctcgatattgtactgtggagctttctgctggcagttgtctgtctgcttcagcttgcccacctggtgtaccggctgagggaggacacgctgcctgaagaatttgacctgttatataaaacgctctgcctccccctgcaagtgcccctgcagacatataaggaaatcgtgcactgctgcgaggagcaggtgctgacgctagcgaccgagcaaacatacgctgtagaaggcgaaactccaataaacagactcagtctcctcctgagtggtcgggttagagtgtcccaggacgggcagtttttgcattacattttcccttaccagtttatggattcccctgaatgggagtctctccagcctagcgaagaaggcgtcttccaggtgacacttactgctgagacatcttgttcctacattagctggccaagaaaatccctacacctgttgctgactaaagaacgttacatctcttgtttgttttctgctctccttggttacgacatctcagaaaagctgtacaccttgaacgataaactgttcgcaaagttcggattgaggtttgatatcagattacccagtctctaccacgtcctggggcctacagcggctgacgctggtcccgagtccgagaagggcgatgaggaggtgtgcgagccagcagtatcgccccctcaggccaccccgactagtctgcagcagacccccccttgttcaaccccacctgccaccactaacttcccggctcccccaactagagcacggctttctaggcctgattccggcattctggaaatagacgacttcccttcatattttcatcaattcggctttagcgggaaagtcgctgcaggccgtataccctag

SEQ ID NO: 235517 - DNA, 1083 bp, synthetic construct
  misc_feature 1..1083: note = Description of Artificial Sequence: Synthetic coding sequence
  source 1..1083: mol_type = other DNA
atgagcgcaaacagctcacgagtcggccaactgctcctccagggttccgcttgtattaggtggaaacaggacgtggaaggtgctgtttaccatcttgcgaactgccttcttctgcttggttttatgggcggatccggcgtgtacggatgcttctacttattcggattcttgtctgctgggtacctgtgttgtgtcctgtggggatggttcagtgcttgcggcctagacattgtcctgtggagcttcctactcgcagtggtgtgtcttctacagttagcccatttggtctaccggctgagagaggatacgctgccagaggagtttgatctcctgtacaagaccctgtgtctgcctctccaggtgcccctacagacttacaaagaaatcgtgcactgctgcgaagagcaggttttaactctagctaccgagcaaacatacgctgttgaaggtgagacaccgatcaaccggctcagcttgctactgagtgggagggtccgcgtaagtcaggatggacagttcctgcattatattttcccttaccaatttatggactcaccggagtgggaaagtctgcagcctagcgaggagggcgtgtttcaggtcacattgacggcagagacctcttgctcctacatctcatggccaaggaaatccttacacctgctgctgacaaaggagcggtacatctcatgtctgttctctgccctgctggggtacgacatctccgaaaagctgtacacattaaacgataaactgtttgccaagtttggcttgcgtttcgacattagattgccaagcctctaccatgtccttggccctaccgcagctgatgcgggacccgagtccgaaaagggcgacgaggaagtctgtgagcccgctgtttcacctccccaggcaacccctacctcactgcagcagactccaccctgtagtactccacctgctacaaccaattttcccgctccccctactcgcgcacgactgagccgcccagatagcgggatactagagatcgacgattttcccagctacttccatcagtttggttttagcgggaaggtcgcagcgggacgaattccttag

SEQ ID NO: 235518 - DNA, 876 bp, synthetic construct
  misc_feature 1..876: note = Description of Artificial Sequence: Synthetic coding sequence
  source 1..876: mol_type = other DNA
atggaaagaaatagctcactttggaaaaatctcatagacgaacatcctgtgtgcactacgtggaaacaagaggccgaaggggcaatctatcacctggctagcatcctattcgtggtgggattcatggggggtagtggtttctttgggctgctttacgtgttctcgctcctgggcctgggctttctttgttccgccgtttgggcttgggttgatgtgtgtgccgctgatatctttagctggaattttgtgctgttcgttatctgctttatgcagtttgtgcatattgcttaccaagtgcgatctattacattcgcaagagaatttcaggtgctgtatagcagcctgtttcagcctcttgggatctccctccctgttttccgcaccatcgccctgtcatcagaggtcgtaactctcgaaaaagaacattgctatgcaatgcaggggaagacgtctattgacaagcttagtctgctcgtttccggaagaatccgtgtaacggtggacggagagttccttcactatatctttccgctccagtttctcgacagccccgaatgggactcccttaggcctacagaggaggggatctttcaggtcacactcacggccgagaccgactgtcgatatgtcagttggagaaggaaaaagttgtacctgctgttcgctcagcatcgctatatctctcggctgttctccgtgctgattgggtcagacatcgcagataaactgtatgctttgaacgatagagtgtacataggcaaacggtatcattatgatatcaggctgccaaacttttaccaaatgtctactccagaaatacgcaggagccctctgactcagcatttccagaattccaggaggtactgcgataaatag

SEQ ID NO: 235519 - DNA, 306 bp, synthetic construct
  misc_feature 1..306: note = Description of Artificial Sequence: Synthetic coding sequence
  source 1..306: mol_type = other DNA
atgctttttctttgcttcgacaggatcagggtaactgtagatggtgaattcctccattacatattccctttgcagtttctggatagcccagaatgggactcccttcgccctaccgaagagggaatatttcaggtcacacttacggccgagactgactgccgctacgtgagttggagacgaaagaaactctaccttttgttcgcacaacacaggtacatatcaagactgttcagtgttttgattggcagcgatatcgcggataaattgtatgctctcaatgatcgggtgtacattggcaagcgttag

SEQ ID NO: 235520 - DNA, 1386 bp, synthetic construct
  misc_feature 1..1386: note = Description of Artificial Sequence: Synthetic coding sequence
  source 1..1386: mol_type = other DNA
atggccaccttttctaggcaagaattcttccagcagctgcttcagggttgtctgttacccactgcacagcagggcctggaccaaatttggctgctcttagctatatgtcttgcctgccggctcttgtggcgactgggcctgccatcatatctgaagcacgcttctaccgtggcaggcggttttttcagcctgtatcatttcttccagttgcacatggtctgggtggtcctgctgtctttactctgctatctggtgctctttctgtgccgacatagttctcacaggggggtctttctgtctgtgactatcctgatttatctgctgatgggcgaaatgcacatggtggatacggtgacatggcacaagatgaggggagctcaaatgatcgtggctatgaaagccgtttccctggggttcgatcttgaccgcggtgaagtgggaacagtgccatctcccgttgagtttatgggatatctgtacttcgtcgggacaattgtattcgggccttggatatctttccatagttatctacaagcagtccagggcaggcctctgtcctgtcggtggcttcagaaagtggctcgctctctcgcactcgccttattatgtctcgtgctgagtacttgtgtcggtccataccttttcccgtatttcatccctttgaacggggatcgcctgctcaggaacaaaaaacgaaaggcaaggggcactatggtgcgctggttgcgcgcttatgaatctgccgtgtcattccatttctccaattattttgtgggatttcttagcgaagccaccgccacactggcaggtgccggatttaccgaggagaaggatcacctggagtgggatcttacggtttctaagcccctgaacgtcgagttaccgagatctatggtcgaggtagtaacctcctggaacttaccgatgagttattggctgaataactatgtgttcaaaaatgcactcagactggggacattttcagctgtgttggtcacgtatgctgcttctgccctcctgcatggcttttcctttcatctagcagctgtccttctttctttagccttcattacctacgtcgagcatgtgctccgaaaacggcttgcaaggatcctctctgcgtgtgtgttgagcaagaggtgccctcccgactgttcccaccagcacagactgggtctgggcgtgcgggcactcaacctcctgtttggcgcactggcaatcttccacttagcctaccttggcagcctatttgacgtggatgtagacgacactacagaggaacaggggtatggcatggcctacaccgttcacaaatggtccgaactttcctgggcctctcactgggtgacgtttggctgctggatcttttacaggctgataggctag

SEQ ID NO: 235521 - DNA, 1368 bp, synthetic construct
  misc_feature 1..1368: note = Description of Artificial Sequence: Synthetic coding sequence
  source 1..1368: mol_type = other DNA
atggctaccttctcccggcaggaattcttccagcagttgctgcaaggttgccttctcccaaccgctcagcagggattagaccagatctggttgttgctggccatttgtctagcgtgtcggttactatggcgtctcggattgcccagctacttgaaacacgcatccactgtcgctggtgggttttttagtctctaccacttctttcaactgcacatggtctgggttgtcttactcagtctcctttgttacctggtgttatttctttgtagacattctagtcatcgtggtgtctttctctctgtaaccatccttatatacctgcttatgggcgagatgcacatggtggacactgtgacctggcacaagatgcgcggtgcacagatgatcgtcgccatgaaggccgtctccctgggcttcgacttggatagaggcgaggtggggacggtgccatcccccgtggaatttatgggttatctgtactttgtaggcacaatcgtttttgggccttggattagcttccattcgtatttgcaagcagtgcaaggacgcccattgtcctgtcgttggctccagaaagtggctcggagcttagctctcgccctgctgtgcctggttttgtccacctgtgtaggaccatatctgtttccgtattttatccccctcaatggcgataggctccttaggaagggcaccatggtcaggtggctcagggcatacgaatcagccgtatcctttcatttcagcaactactttgtggggttcttgtcagaggccaccgcgacacttgccggagcaggatttactgaggaaaaagaccatcttgagtgggacctgacagttagcaagcctttgaacgtggagcttcctcgatcaatggttgaggtcgtgacgtcatggaacctccccatgtcatactggctgaacaactacgtgttcaaaaacgccttacgactggggaccttcagcgccgtgctcgtgacttatgccgcaagcgcgctgttgcacgggttctcattccatttggcggcagtgctcctgagcctcgcatttataacatatgtagagcacgtactccggaaacgcttggccaggatcctctctgcttgtgtcctgagcaagcggtgtcctcctgattgctcccatcagcaccggctgggcctgggcgtcagggcattaaatcttttgttcggggctctcgcgatcttccatcttgcttacctgggttcattattcgacgtggatgtggacgacaccactgaagagcaggggtatgggatggcttataccgtgcacaaatggagtgaactctcctgggcaagccactgggtaaccttcggctgctggatcttctaccggctgattggatag

SEQ ID NO: 235522 - DNA, 1371 bp, synthetic construct
  misc_feature 1..1371: note = Description of Artificial Sequence: Synthetic coding sequence
  source 1..1371: mol_type = other DNA
atggccaccttttcacgccaggagttttttcagcagcttttacagggatgcctgctccccactgctcaacaggggttggaccagatctggctcctacttgcgatctgccttgcctgccggcttctgtggaggctgggactgccttcttatctgaagcatgcctcaacagtggccggtgggtttttctctctctatcattttttccagctgcatatggtctgggtggtcctcctatctctcctttgttatttagtgctgttcctgtgccggcattctagccacagaggggtgttcctgagcgtgactatccttatctacctgcttatgggcgagatgcatatggtcgataccgttacatggcacaaaatgaggggagcccaaatgattgtggctatgaaagctgtctcactggggttcgatctcgaccgcggagaagtcggaaccgtgcctagtccggtcgagttcatgggctacctgtactttgttgggaccatcgtcttcgggccatggatttctttccactcttacctacaggctgtccagggccgacccctaagttgcaggtggttgcaaaaagtagctaggagcttggcacttgcactcctgtgcctggtgctgagcacttgcgtgggcccatacctcttcccatacttcatcccactgaacggcgaccgtcttttgcgcaataaaaaacgtaaggcacgatggctgagggcctatgagtccgcggtcagctttcactttagtaattattttgtgggctttttaagcgaagccacggcaactctggctggtgctggcttcacagaggagaaggatcacctcgagtgggatctcacggtgtccaaacccttgaacgtagaactgcctaggtccatggtggaggtggtcaccagctggaatttgcccatgagctattggctcaacaactacgtcttcaagaatgccctgaggctgggtactttcagtgccgtgttggtcacttacgccgcaagtgctctcttgcacgggttctcattccacctggcagccgtcctgctgtccctcgcatttatcacgtacgttgagcatgttctacgcaagaggttagcaagaatcttgtctgcttgtgtgctctctaaacgatgtcctccggattgctctcaccagcacagattgggactgggggtacgagctctgaatttattatttggtgccctcgccatcttccatctggcatatctagggtctctattcgacgtagatgtggacgacaccacagaggagcaagggtacggaatggcttataccgtccataaatggtcagagctgagttgggcttcccactgggtcacgttcggttgttggattttttacagacttataggatag

SEQ ID NO: 235523 - DNA, 1368 bp, synthetic construct
  misc_feature 1..1368: note = Description of Artificial Sequence: Synthetic coding sequence
  source 1..1368: mol_type = other DNA
atggctacctttagtcggcaggaattttttcagcagctcctgcaaggttgtctgctgcctacggcccagcaaggcctcgaccaaatttggctcctacttgccatctgtttagcttgcagactcctgtggcggcttggtttacctagttacttgaagcacgcgagcacggttgctggtggcttcttcagcctttaccacttcttccagcttcacatggtgtgggtcgtgttattgtctctcttgtgctacctggtgctgttcttatgcagacattcgtcccatcgcggtgtgtttctctctgtcacaatcttaatttacctgttgatgggggagatgcacatggtggatactgtgacatggcacaaaatgcgaggagctcagatgatagtggccatgaaagctgtgagcctcggctttgatctggacaggggggaggtgggtaccgtgcctagccctgtggagtttatgggttatctctacttcgtaggcacaatcgtattcggcccttggatctcattccattcctacctgcaagccgtgcagggtcgccctctgtcctgtagatggctgcagaaggtggcaaggagtttagcccttgcgctcctctgcctcgtcctgtccacatgcgtcgggccatacttgttcccctacttcatccccctcaacggggacaggttacttcggaaaggtactatggtccgttggctacgcgcttatgagtccgccgtgtcttttcacttctccaattacttcgtcggattcctatcagaggctacagctacactagccggagccggattcactgaggaaaaagaccatctagagtgggaccttacagtctcaaagccattaaacgtcgaacttcctcgctcgatggttgaggttgtcacgtcttggaatctgcccatgagttattggctgaataattacgtgtttaaaaacgcactccggctgggaactttttctgccgtgctcgtcacttacgcagcttccgccctactccatgggtttagctttcatttagcagctgtacttctttcgcttgcgtttataacttacgtagagcacgtgctcaggaaacgactggctagaattctgtctgcttgcgtgctgagcaagagatgcccacctgactgctcccatcagcaccgtctgggcctgggggtacgggcactgaatctgctgttcggcgctctggctatcttccacctcgcttacttaggcagtctattcgacgtggatgtggacgacactactgaggaacagggctatggtatggcctacacagtgcacaaatggtcagaattgtcatgggcctctcactgggtaacatttggttgttggatattctaccgcttaatagggtag

SEQ ID NO: 235524 - DNA, 1353 bp, synthetic construct
  misc_feature 1..1353: note = Description of Artificial Sequence: Synthetic coding sequence
  source 1..1353: mol_type = other DNA
atggcaacatttagtcgtcaggagtttttccaacaacttttgcaaggatgcctgctccccaccgcgcagcagggcctagatcagatttggctcctcctggcgatctgcctcgcttgtagattattatggaggcttggccttcccagctaccttaagcacgcttctacagtcgctggaggtttctttagcctgtatcactttttccagttacacatggtgtgggttgtgctactgtctcttctctgttaccttgtgttgttcttgtgcagacactcatcccatcgaggagtttttttaagcgtgacgatcctgatttatctgctaatgggagagatgcacatggttgatacagtgacatggcacaaaatgaggggggcacagatgatcgtggccatgaaggccgtttctttaggatttgacctggaccggggagaagtgggcaccgtcccatcccccgtggaatttatgggatatctctacttcgtgggaacgatcgtgttcggaccctggatcagctttcatagttatctgcaggcagtgcaaggcaggccccttagctgccgatggctccagaaagtagcaagaagcttggctctggcactgctctgcctagtcttgagtacctgcgtaggaccttatctgttcccctactttatccctctgaacggggaccgcctgctgagaaaatggcttcgagcctatgaaagtgccgtcagtttccatttctctaattacttcgtggggttcctgtcagaagccactgcaaccctggctggtgccggattcacggaggagaaggaccatctcgagtgggacctgacagtgagcaagcccctcaacgtggagctgccccgatccatggtagaggtggttacctcctggaacctgcctatgagctactggctgaacaattatgtcttcaagaatgcactgcgtctgggcacgttctctgcggtgctcgtgacttatgcagctagcgccctgctgcatgggttctctttccatctagccgcagtgcttctctcactcgcgttcatcacatatgtggaacatgtgctaagaaagaggttagctagaattctgtcagcatgtgtgctctctaaaagatgcccccctgactgctctcaccaacaccgcctcggcctgggggtcagggctctgaatctgttgttcggagcactcgcaatctttcacctcgcctatttggggtccctatttgacgttgatgtggacgacacgacagaagagcagggatatggcatggcgtacacagttcataaatggtctgagttgagctgggccagtcactgggtgacctttgggtgctggatcttttataggctgatcgggtag

SEQ ID NO: 235525 - DNA, 1140 bp, synthetic construct
  misc_feature 1..1140: note = Description of Artificial Sequence: Synthetic coding sequence
  source 1..1140: mol_type = other DNA
atggtctgggtggttctgctttccctcctgtgttatttagtgctcttcttgtgccggcattcctcccatagaggggttttccttagcgtcacgatattgatttacctgctgatgggtgaaatgcacatggttgatactgttacgtggcataaaatgaggggggcacagatgattgtagcaatgaaggcggtgtctttggggttcgatctggatcgaggtgaggtcggcacggttccctcacccgtggagttcatgggctacctctactttgtgggaaccattgtctttggaccctggatcagctttcattcatacctgcaagctgtgcagggacggccactgtcatgccggtggttgcagaaggtcgcccgatctttagcactcgccctactgtgtcttgtgctgtccacctgcgtgggcccttacctgtttccctatttcattcctctgaacggagaccggctgctccgcaaatggctgcgggcatacgaatccgccgtgagtttccatttttccaactactttgtgggctttttgtctgaggcaacggcaacacttgccggtgcaggtttcactgaggaaaaggatcacctcgaatgggacttaaccgtttccaaacctctcaatgtagagctcccacgatcgatggtcgaagtggtaacgtcatggaacctgccaatgagctattggcttaataactacgtgttcaagaatgcactgagattgggaacattctctgcagtcctcgtaacttacgctgcctccgccctcttacatggattttcgttccatctggctgccgtattactgagccttgctttcattacttatgttgaacatgtcctgcgcaaacgcctagcacggatcctgtcagcctgcgtgctgtcgaagaggtgtcccccagactgtagccaccagcatcggctcggtttaggcgtgagggcactaaaccttttattcggagccctcgcaatattccacctcgcctacctgggctccctttttgacgttgatgtggacgataccacggaggagcagggttacggcatggcatatacagtccacaaatggagcgagttatcatgggccagccattgggtgaccttcgggtgttggatcttctacaggttaataggttag

SEQ ID NO: 235526 - DNA, 294 bp, synthetic construct
  misc_feature 1..294: note = Description of Artificial Sequence: Synthetic coding sequence
  source 1..294: mol_type = other DNA
atggctacgttttccagacaagaattttttcagcagctgctgcagggttgtctgctcccaacagcccagcaaggactggatcagatctggctcttgttagctatttgtcttgcttgcaggctcctttggcgccttggactcccaagctacctaaagcacgcgagcacggtagccggtggtttcttttcactctaccatttcttccagctgcatatggtttgggtagtgttgctgagcctcttatgctatttggtactgttcctatgcagacacagctctcatcgcggagtgtag

SEQ ID NO: 235527 - DNA, 1386 bp, synthetic construct
  misc_feature 1..1386: note = Description of Artificial Sequence: Synthetic coding sequence
  source 1..1386: mol_type = other DNA
atggctaccttttcccggcaggagttttttcagcagttgttgcaggggtgcctgctcccgacggcccagcagggtctagaccagatttggctgcttctggccatttgcctagcgtgccgactgttgtggcggctgggtctcccctcttatctgaaacacgcctcaactgtggccggagggttcttctcactctaccactttttccaattgcatatggtatgggtcgtgctgctgtccctgttgtgctatctggtgctctttctatgcagacactcctcacaccggggtgtctttctgagcgtcactatcctcatatatttgttgatgggtgagatgcacatggtggacacagtgacttggcataaaatgcgaggtgctcaaatgatcgtagccatgaaggccgttagcctcggatttgacctggaccggggtgaggtaggaacggtgccctcacctgtggaattcatgggctatctatactttgttggcactattgtgtttggtccatggatttcttttcacagctatctgcaggctgtgcaggggaggccactgtcatgccgttggctgcaaaaagtggccagaagccttgctttagcgctcctttgcctggtcctctcgacctgcgtgggcccttacttgttcccttactttatccccctgaatggcgaccgtttgctccgcaacaagaaacgtaaagccagaggcaccatggtgcgctggctgcgggcatatgaatccgccgtgagttttcattttagcaactattttgtggggtttctcagcgaggctactgcaactctcgctggagccggatttaccgaagagaaagaccatctagaatgggaccttactgtatccaaaccgctcaatgtggaattacccaggagcatggtggaggtggtaacatcctggaatctgccaatgagctattggttgaacaactatgtttttaagaatgccctgcggctcggtacattttcagcagtcctagtcacatacgccgctagtgctttactgcatgggttttcattccaccttgccgcagtgttactgtctcttgcatttataacatacgtcgagcacgtgctccgcaagcgcctagcccgaatactgtctgcatgcgtactgagtaaacggtgtccaccagattgtagtcaccagcatcgtctaggcttgggggtgcgtgctctcaaccttctcttcggggcacttgcaattttccatctcgcatatctcgggagtctcttcgacgtggatgtggatgacacgacggaggagcaagggtacggcatggcgtacaccgtgcacaagtggagcgagctctcctgggcctctcattgggtcactttcggctgttggatcttctaccgtttaatcggatag

SEQ ID NO: 235528 - DNA, 2769 bp, synthetic construct
  misc_feature 1..2769: note = Description of Artificial Sequence: Synthetic coding sequence
  source 1..2769: mol_type = other DNA
atgttcctccatagcgtgaacctatggaacctggccttctatgtctttatggtgttcttggccactctggggttatgggatgtgttttttgggttcgaagaaaacaagtgctctatgtcttacatgttcgaatatcccgaataccagaagatcgaactgcctaaaaagctcgccaagagatacccagcgtacgaactctacctgtacggcgagggcagttacgccgaagaacacaaaattctcccactgactgggattcccgttctgtttctgcccggtaacgccggtagctacaagcaagtgcggagtattggtagcatcgctctcagaaaagcggaggacatcgacttcaagtatcactttgactttttttcagtgaattttaatgaagaactcgtggctctgtacggagggtcactacagaaacagacaaagttcgtgcatgagtgtatcaagactatactgaaactatataagggccaagaattcgccccaaaatctgtggccataattggccactctatggggggattggtagccagggcactgctgaccctgaagaacttcaagcatgacctgattaacttactaattacccaggccacccctcacgtcgcccctgtcatgccattagacagattcatcactgacttctatacgacagtaaataactattggatcctgaacgccaggcatataaacttgacgaccctgtccgtcgccggaggctttagggattatcaggtgcgcagtgggctcaccttcctcccaaaacttagccaccatacaagtgcgctgagtgtcgtgtcaagtgccgtgcctaaaacctgggtgtctactgaccacctctccatcgtctggtgtaagcagctgcagcttaccaccgtgagagcattcttcgatttgattgacgccgacaccaaacagattacacaaaactccaaaaaaaagctctctgtgctctatcaccattttataagacacccttcaaagcattttgaggaaaaccccgctattatcagcgatcttaccggcacctctatgtgggtcttggtcaaggtgtctaagtggacttacgtagcctacaatgaaagcgaaaaaatttatttcacttttcccctggaaaatcataggaagatttacacgcacgtgtactgtcaatccacgatgctagacactaactcctggatatttgcatgcatcaattccacatccatgtgcctgcagggagtggatctctcctggaaggcggagttgctgcccactattaaatacctgactctgagactccaggattaccccagtctctcacacttggtagtctatgtgcccagcgtgaggggatctaagttcgtggtggactgcgagtttttcaaaaaggagaagagatacatccagctgccggtcacacacttgttctcattcggattatcatctaggaaggtcgtgctgaataccaatgggctgtactataatctagagctgctgaactttggccagatctatcaggcattcaagattaatgtggtatccaaatgctccgcggtgaaggaagagatcacttctatttatagactccacataccctggagctacgaggactctctcacaatcgctcaggctccttcctctaccgaaatcagtttgaaattacacatcgcccagcctgagaataacacacatgtcgcactcttcaagatgtacacgtcttcagactgtcggtacgaggtgacagtgaagacttccttctcccagatccttggtcaggtcgtccgctttcacggcggagctctgccggcttatgtcgtctctaacatcctcctggcataccggggtcagctatactcgctcttctctaccggctgttgcctagagtatgccacaatgttggacaaggaggctaagccgtataaagtggatcctttcgtcataattataaaattcttactaggatataagtggtttaaggaactgtgggacgtgctgctcctgccggagcttgacgcagtgattctgacctgccagtctatgtgttttcccttgatctcattgatcttgttcctgttcgggacttgcactgcatactggagcggactgctgtcgagtgcatccgtcagactcctatcctctctttggctggcattgaaaaggccgtccgaattacctaaggacatcaagatgatctccccagacttaccattccttacaatcgtccttatcatagtgagctggaccacttgtggggcactggccatcctcctctcctacctgtattatgtgtttaaagttgtgcatctgcaagcttcgttgacaaccttcaagaactctcaaccagtcaatccgaagcacagccgcagatctgagaagaaaagcaatcaccacaaagattcttcaatccaccatctgcggctgagtgccaacgacgcagaggattccctacggatgcatagcacggtcatcaacttgctgacctggattgtcctcctttcaatgcctagcttaatttactggctaaaaaacctgcgatactacttcaaactgaaccctgatccctgcaagccactagccttcatactcatacccacgatggccattctcgggaatacgtataccgtgtctattaagagtagtaagttactgaaaaccacaagccagtttcccctccccctcgccgtgggtgtcatagccttcggttctgcccatttgtacaggcttccatgcttcgtatttattccactcctgctccacgcactgtgcaatttcatgtag

SEQ ID NO: 235529 - DNA, 915 bp, synthetic construct
  misc_feature 1..915: note = Description of Artificial Sequence: Synthetic coding sequence
  source 1..915: mol_type = other DNA
atggaggtcctggagagcaaaaaaattgagctccctaaaaaactggccaaaaggtatcccgcttacgagctctatctttatggcgagggttcctacgccgaggaacacaaaatcctgccactcaccggtatccccgtcttgttcctcccaggcaacgcaggttcttacaaacaggtgcgcagcattggctcaatcgcccttaggaaggctgaagacatcgactttaaataccactttgactttttctcagtcaatttcaacgaggaactggtggcactgtatgggggttcactccagaaacagacgaagttcgtgcacgagtgcatcaaaaccattctgaaactgtacaaaggtcaggagttcgccccaaagtccgtagccatcattggccactctatgggaggccttgtggctagggcgcttctgacgctgaaaaacttcaagcacgatctgatcaatttactgattacccaagctacaccccacgtggctccagtgatgcccctcgaccgctttatcacagatttctacactacagtgaacaactattggattctcaatgccagacacattaacctgacgacgttatccgttgctggaggattccgggattaccaggtccgttccgggctgaccttccttcctaagctctcacatcacacaagtgccttgtcagtggtgagctctgctgttccaaagacgtgggtgtcgacagaccacctgtcgatcgtctggtgcaagcagctgcagcttacaacagtgagggctttcttcgacttaattgacgctgatacgaaacagataacacagaattcaaagaagaagcttagtgttctgtaccaccattttatcaggcaccccagtaaacattttgaagagaatccagccatcatctctgatctgacagggatctag

SEQ ID NO: 235530 - DNA, 1779 bp, synthetic construct
  misc_feature 1..1779: note = Description of Artificial Sequence: Synthetic coding sequence
  source 1..1779: mol_type = other DNA
atgttcctgcatagcgtcaacctgtggaatttagcattctacgttttcatggtgttccttgctaccctggggctgtgggatgtgtttttcggcttcgaggagaataaatgctctatgtcatatatgttcgaatatcctgaataccagaaaatcgagctgcccaaaaagctggcgaaaagataccccgcttatgaactttacctttatggcgagggctcttatgctgaggagcataagatcctcccgctgacgggcattccagtcttgttcttaccgggtaacgccggaagctacaagcaggtacggtccatcggaagcatcgccctgcggaaggcggaggatatcgatttcaagtatcatttcgactttttttccgtgaacttcaacgaggaattggtggcactgtacggcggatctctgcaaaagcagaccaaatttgtacatgaatgcatcaaaactattctgaaactctacaaaggccaagaattcgcaccaaagtcagtggcaattatcggccactcaatggggggactggtggctagggccttgctgacacttaagaactttaagcacgacttaatcaatttgctgattacacaggccactccacacgtggcacctgtgatgccactggatcggttcatcactgacttttacactacggtaaacaactattggatactgaacgcacgacacatcaacctgaccaccctctctgtggcgggaggattccgagactaccaggtgcgttccggcctgaccttccttcccaaactgtcccatcacacttcggccttatccgtggtttcatctgcagtcccaaaaacgtgggtttcaactgatcatctttccattgtgtggtgcaaacaactgcagctgacaaccgtcagggcatttttcgacctgatcgacgcagatacaaagcaaatcacccagaattcaaagaagaagttgtcagtgctgtatcaccatttcatccgccatcccagtaaacattttgaggagaacccagcaattatctccgacctgactggaacaagcatgtgggtgctggtcaaagtgagtaagtggacctacgtcgcgtacaacgagtctgaaaaaatttacttcactttcccactggagaaccacaggaagatctatacccatgtgtattgccagtctaccatgctcgacacgaactcatggatctttgcatgcatcaactctacttcaatgtgtctgcaaggggtggatctatcttggaaggcagagctgctccccacaatcaagtacttgacactccgtctgcaggactatccatccctgtcccacctagttgtgtacgttccatccgtccggggtagtaagttcgtcgtggattgtgagtttttcaagaaggaaaaaagatacattcaacttcctgtgactcatctctttagcttcggtctgtcctcacgcaaggtggtcctaaataccaatggcctgtactataatctggagctgctgaattttggccagatctaccaagcctttaagataaatgtggtgtcgaagtgtagcgccgttaaggaggagatcacatctatttacaggcttcacatcccatggagttacgaggacagcctcacgatcgcccaggccccatcttctaccgagataagcctgaagctgcacattgcccagcctgagaacaacacacatgtcgccctgttcaagatgtacacctccagcgattgcaggtacgaggtcactgtcaagacttcttttagtcaaatcttaggccaagtggtagcttag

SEQ ID NO: 235531 - DNA, 1293 bp, synthetic construct
  misc_feature 1..1293: note = Description of Artificial Sequence: Synthetic coding sequence
  source 1..1293: mol_type = other DNA
atgtttcttcactctgtgaatctgtggaacctggccttctacgtattcatggtctttctcgctaccctgggcttgtgggacgtgttctttggctttgaggagaacaagtgctcaatgagctacatgtttgaataccctgaataccagtctagcgcagtgccgaagacatgggtctcaactgaccatctatctattgtgtggtgtaagcagctgcagttgaccacagtgcgcgctttcttcgacctgattgacgccgacactaagcagatcacgcagaacagtaagaagaagcttagcgtactatatcaccattttattcgccatcccagcaaacacttcgaagaaaatcctgcaattatctcggatctcaccggcaccagtatgtgggtgctcgtaaaggtgtctaagtggacctacgtggcctacaacgaatctgagaagatctatttcacatttcctttagagaaccacaggaaaatttacactcatgtgtattgtcagtctacaatgctggataccaatagctggatttttgcatgtattaacagcacttccatgtgcttacagggggtggacctctcttggaaggcagagctactccctacaattaaatacctcaccctcaggctacaggactacccatctctgtcgcatcttgttgtgtacgttccgagcgttagaggatcaaagttcgtcgtagattgcgagttctttaagaaagagaagcgttacatccagctcccggtcacacatctttttagctttgggttaagcagccggaaagtggtgcttaatacgaacggcctgtactacaatctagagcttcttaattttggacagatttaccaggcttttaagattaacgtagttagcaaatgctcagccgttaaggaggaaatcacctctatataccgattgcatatcccttggtcttatgaggatagtctgaccattgcacaggcaccttcatccacggaaatcagcctcaagctgcacatcgctcagcctgagaacaacacacatgtggctctgtttaaaatgtacacctcaagtgactgccggtacgaagtgacggtgaagacttcgttttcccagatattggggcaggtggtgagattccatggaggcgctcttcctgcttacgtagtctccaacattctactcgcatacagaggacagctgtacagcctgttttctacagggtgttgtctggaatacgccaccatgcttgacaaagaggcaaagccttacaaggtcgatccctttgtcatcattattaaatttttactgtag

SEQ ID NO: 235532 - DNA, 774 bp, synthetic construct
  misc_feature 1..774: note = Description of Artificial Sequence: Synthetic coding sequence
  source 1..774: mol_type = other DNA
atgtcgcgccctctgattactagatctccggcatcccctctaaataatcaaggcattccaacaccagcccagctgacgaaatccaatgccccagttcatatcgatgttggtggacacatgtacacttcatcactggcaacactgacgaaataccccgaatcccgtattgggcgtctgttcgacgggacagaaccaattgtcctggatagcttgaagcaacattacttcatcgaccgcgacggtcagatgtttcgctacatcttaaactttctcaggactagcaagctactcattccggacgacttcaaggactatacccttctgtacgaggaggcaaaatattttcagctgcaacccatgctcctggaaatggagcgatggaaacaggatagagaaacagggcgattcagccggccttgcgagtgcctggtcgttcgggtcgctcctgatcttggggagcgaattactctgagcggggacaaaagtttgatcgaagaagtatttcccgagataggggatgtgatgtgcaactcagtcaacgctggctggaatcacgacagtacccacgtgattcggtttcccctgaacggctactgtcaccttaattctgttcaggtacttgagcgcctgcaacagcggggttttgagatcgtcggatcttgcggtggaggcgtcgattcctctcaattttccgaatacgttctgcgcagagaactgagaaggactccaagagtgccttctgtgattcgcatcaagcaggaaccactggattag

SEQ ID NO: 235533 - DNA, 774 bp, synthetic construct
  misc_feature 1..774: note = Description of Artificial Sequence: Synthetic coding sequence
  source 1..774: mol_type = other DNA
atgtccaggccactgatcactcggtcaccggcatcccctttgaataatcagggaattcccacccctgcacagctgactaagtccaatgccccagtgcatatagacgtgggaggccacatgtacacatcctccctggccactttaacaaagtatcccgaatcccgaatcggaaggttgttcgacggcactgaacccattgtgctggattctctgaaacagcactactttatcgatcgcgatggccagatgttccgctacattctcaacttcctgagaacaagcaagctgcttattcccgatgatttcaaagactacaccctgctttacgaggaggctaagtacttccagctgcagcctatgctcttggagatggagagatggaagcaggacagagaaaccgggcgattcagcagaccgtgtgagtgtctggtggtaagagtggctcccgacctgggcgagcgcattaccttgtctggcgacaaatccctgatcgaggaggtttttccggaaatcggggacgttatgtgtaactccgtcaatgctgggtggaatcatgattcgactcacgtgatcagattccctctcaatggctactgccatctcaatagtgtccaggttcttgagagattacagcagaggggtttcgaaatcgttggctcctgtgggggaggtgtagattcctctcagttttcagagtacgtgttaagaagagaacttaggcggacacctagggtaccttccgttattcgtataaaacaagaaccactggattag

SEQ ID NO: 235534 - DNA, 2598 bp, synthetic construct
  misc_feature 1..2598: note = Description of Artificial Sequence: Synthetic coding sequence
  source 1..2598: mol_type = other DNA
atggcacgcatgccagggtcgggggactgcaatacctcagcgggtggatctgccagcgcagctgccgcagcggcagaaaacaatggcgagcgtggggagggtgaaagaggtgctggcggtcgcggtagacgacatagccgccctcactactgttccgccggtgaggaagaagaggaggaagaggaagaagatgaaattcaggaggtccagatcacaggggacgaagaagaggaagaggacgggggagggggattggaggaggatgaagaagaagaggaagaggaggagatgggactagactgggatgaacccttggagccagaggactccgccggagaggaactggaaccggagcccgtccacatgattaacatggaccagagcgccgcactggagccagaagctcccccacggctactcgccccacgtgcccgtggaggccctcctggggatgggagtgagttggaccctgacgtgctccagcgcccagaacgagcgagactctctgagaacacaaggctggcgaccagatatgcggtgcgaatatttagagagtatctgtctgaaaaagcccagtcacccgacttcgaaaccatggacaagggagcattgtgccgggtgctgcggtctttttatgctgaagccagatctaagagcgggcagctctacagtaagagttcattgatctctatccggtcctcactgaatcgatatctgaacgaacctccttactgcagaacacttgatctgaccaaggaccccgaactccggagtgccaacctcactttggccgctgtcattcgaaaactggaagagcagggtgccggacccgttgtgcagaaacaggctattacacgcgctgatctgcgcaagttgtacacatcgtcagtgttttccactaacacaccattcgggctactcaacaaggtctggttcgaaacctgtatgtatttttgcacccgcggaagagaaaatcagcgcgagctcgaagaggacagcttcggactcgcaatggacgaagacgggcgaaagttcgtgtatttcaaatcactaggaccctaccataagagtagaagctcctcctggtccaagaagagagccgaatcatccgatgaggagaacctgccccgtatgtacgagaccggtacggagttctgcccatatgcctcctttgtgaagtacctgtcaaaacgtaacccgctgtgcaaggcattctttcagcgaccacgggatcactgttctgagggggacgttacctggtacgagaacaaggcaatcggaaagaacctcttagggacccgcatgcagatgttgtcaaaggctgccaaactgagtaaaacctacactaaccactgtatcggtgcagtctccattgccaccctgaattcaatcgcagggataggcaccaagttgggatctcccgcaccgcaggggtgttatgcagaagcccttaatggtgccgcacgacaccacagtcatcaccccccaacccaccctagccatcaccaccggccacaaccaccctctcttggcaatacctatattttgccaaaggacagtcaagtaggtcctgatgttaaaagtgaagccgcaccgaagagggctctgtatgaatctgttttcggctccggggagatctgtgggcctacctctccaaagaggttgtgtatccgcccatcggaacccgtggacgctgtggtggtggtgagcgttaagcatgaccctttgccactgctgcccgaagctaacgggcaccgttccaccaacagcccaactatcgtgagtcccgctatagtgagcccaacccaggattccagacctaacatgtcccgccctctgatcacacggagcccagcatctcccttgaacaaccaaggtattcccaccccagcgcagctgaccaaaagcaacgctccagtacatatcgatgtgggcggtcatatgtatactagcagtctggccaccctcaccaaataccccgaatcaagaatcggacgcttgttcgatgggacagagccaatcgttctggacagcctcaaacaacattactttattgatcgggatgggcagatgttccgctacatcctgaactttctgagaacttccaaactcctgatccctgatgactttaaggattatactctgttatatgaagaggccaagtattttcaactgcagcccatgctgcttgagatggaaagatggaagcaggacagagaaacaggacgttttagccggccttgcgaatgcctggttgtacgggttgctccggaccttggggaaagaatcaccctctccggagataagtctctaatcgaggaggtattccccgagatcggagacgtgatgtgcaattcagtgaatgccggttggaaccacgactccacccacgtcattcgcttccctttaaacggatattgccacctcaattctgttcaagtactggagagattgcagcagaggggtttcgagatcgttggttcctgtggtggtggcgtcgattccagtcagttctccgagtatgttctgcgccgtgagctgagacgtacaccccgagtgccttctgtgatccggattaaacaagaaccactcgattag

SEQ ID NO: 235535 - DNA, 774 bp, synthetic construct
  misc_feature 1..774: note = Description of Artificial Sequence: Synthetic coding sequence
  source 1..774: mol_type = other DNA
atgtctcggcctctgatcaccagaagccccgcatcaccgttgaataaccaaggcatacccactcccgcacagctgacaaaatccaatgcacctgttcatatagatgtgggaggacacatgtacacatccagccttgccactttgaccaagtatcccgaaagccgcatcggaagactattcgatggaacagagcccatcgtgcttgatagtttaaagcaacactactttatagatagagatgggcagatgttcagatatatcctaaactttctgcggacctctaaattactcatccctgatgacttcaaagattataccttactctatgaggaggcaaagtacttccaacttcaacctatgttgcttgaaatggagcgatggaaacaggatagagagacaggacgtttttcaaggccctgtgagtgcctggtcgttcgggtagcccctgacctgggagagcggatcactttatctggagataagtcactgatcgaggaggtgttccccgagataggggacgtcatgtgtaattctgtaaacgccggttggaaccacgattcaacccatgtcatcagattcccattgaatggctattgccacctaaactccgttcaggtcctggagcggctgcaacagaggggcttcgagattgtcgggagctgtggagggggagtggactccagtcagtttagtgaatatgtcctgcggcgagaactcagaagaacaccacgcgtgccttcagtgataaggataaagcaggaacccctggactag

SEQ ID NO: 235536 - DNA, 1044 bp, synthetic construct
  misc_feature 1..1044: note = Description of Artificial Sequence: Synthetic coding sequence
  source 1..1044: mol_type = other DNA
atgcgcgttgtggtcatcggtgccggtgtaatcggccttagcactgccctctgtatccacgagcggtatcattccgtgttgcagccactcgacatcaaagtttacgcagaccgattcacccctctgactactactgacgttgccgcaggactgtggcaaccgtacctgagtgaccctaataaccctcaggaggcagattggtcccagcagaccttcgattacctgctcagtcacgtgcactcacctaatgcggagaacttgggcctgttcctaatatctgggtacaatttgttccacgaggccatcccggatcccagctggaaggataccgtgctcgggtttaggaaactgacccccagggagttagacatgttccccgactatggatatggctggttccacacttctctgatactggaaggaaaaaattacttgcagtggttgacagagaggctgactgaacggggagtgaaattttttcagagaaaagtggaaagctttgaggaggtagccagggagggcgcagatgtgatcgtgaactgcactggtgtgtgggccggagcactgcaacgcgatcctctccttcaacctggtcgtggccagattatgaaggtggatgcaccctggatgaagcactttatcctaacgcatgatcctgaaagaggcatttacaattctccttatatcatcccaggtacgcagacggtcacgctaggcggaatctttcaattgggaaattggtctgagctgaacaatatacaagaccacaatacaatctgggagggctgctgtagattggaacctactctcaagaatgctcggataattggcgagaggacaggcttccggccagttcgacctcaaattaggctagagcgggagcagttaagaaccggtcctagcaacactgaagttatccataattacggtcacggcggatacggattgactattcactgggggtgtgctctggaagctgctaaactattcggcaggatcctggaagaaaagaaactaagcaggatgccccctagccatctgtag

SEQ ID NO: 235537 - DNA, 399 bp, synthetic construct
  misc_feature 1..399: note = Description of Artificial Sequence: Synthetic coding sequence
  source 1..399: mol_type = other DNA
atgcttaaaaacatcgagctgtttgataaactgtctctccgcttcaacggccgagttctgttcataaaggacgtgataggggatgagatctgctgttggagcttttatggacagggaaggaaaattgcagaagtttgctgcacgtcaattgtctacgcaacggagaagaagcagacgaaagtagaattccctgaggctagaatctatgaggaaaccctgaacatcctcttgtacgaggcccaagatggcagagggcctgataatgcccttctggaagccacaggcggtgccgctggacgttcccaccaccttgacgaagacgaagaaagggaaaggatcgagcgggtgcgacggatccacattaaacggccagacgaccgcgctcatctccaccagtag

SEQ ID NO: 235538 - DNA, 840 bp, synthetic construct
  misc_feature 1..840: note = Description of Artificial Sequence: Synthetic coding sequence
  source 1..840: mol_type = other DNA
tgaagatactgtagatctcccttctggagcggctacgggaatttttactccctccagaaatctgggttcttacctaccctgggaacagtacaacccttcaactactgtaagtcaggatggattctgatagaccggtgtgggaagcacttcggcacaatcttaaactatctaagagacggggctgtgccgttgcctgaatcccggagggaaattgaagagctgctggcagaagctaagtactatttggttcaaggacttgtcgaggaatgtcaggcagcactgcaaaacaaggatacctacgagcccttctgcaaggttccggtgatcacttccagcaaagaagagcagaaattaatcgcaaccagcaataagcccgcagtgaagcttctgtacaatcgatccaataacaaatacagctacacctccaatagtgatgacaatatgctgaagaatatcgaactgttcgacaaactgtctttaagattcaatggtcgggtactcttcatcaaagacgtgatcggtgatgaaatttgttgttggtccttctatggccagggcaggaagatcgccgaagtatgctgtacaagtatagtgtacgcaactgaaaaaaaacagacgaaggtggaattcccggaggctagaatctacgaagagaccttgaacattctgctctacgaagcccaagatggccgagggccagataacgcactgctggaggcaaccggtggcgcagccggaaggagccatcatctcgatgaagatgaggagcgggagagaatcgagcgagtaaggcggatccacatcaagagacccgacgatcgagcccatcttcatcagtag

SEQ ID NO: 235539 - DNA, 864 bp, synthetic construct
  misc_feature 1..864: note = Description of Artificial Sequence: Synthetic coding sequence
  source 1..864: mol_type = other DNA
atgtcaggagagagcgttgtctcttctgcggttcctgctgccgcaacaaggaccacatcgttcaaaggtaccagcccaagcagcaaatacgtgaagctgaacgtgggtggggcactgtattacaccaccatgcaaacccttactaaacaggacactatgctcaaggcgatgttcagtggcagaatggaagtgcttactgactcggaagggtggattttaatagatcgctgcggcaaacattttggaactatcctcaattatttaagggatggggcagtgccattgccagagtctcgaagggaaattgaagagctactggccgaagccaagtattacctggtgcaggggctcgtcgaggagtgccaggccgcactgcagaacaaagatacgtacgagccattttgcaaggtcccggtcatcacctcttctaaagaggagcagaagttgatcgctacctccaacaaacccgctgtgaaactcctttataaccggtcgaacaacaagtactcgtacaccagggttctgtttatcaaagatgtaatcggcgacgaaatctgttgttggtctttctacgggcagggacggaagattgcggaggtgtgctgtacaagtatagtatatgctacagagaagaagcagacaaaggtggagttccctgaagccaggatttacgaggagactttaaatattctcctttatgaagcccaggacggcagaggacccgacaacgctctgctggaggcaactgggggagctgctgggaggtcccatcacctggacgaggacgaggaacgggagcggatagagagggttcgtcgtatccacataaaaaggccagacgatagagctcacctgcaccaatag

SEQ ID NO: 235540 - DNA, 468 bp, synthetic construct
  misc_feature 1..468: note = Description of Artificial Sequence: Synthetic coding sequence
  source 1..468: mol_type = other DNA
atgatggccgtattcacaagcctgtggagcccttaccagatgctcttttgcagcaattctgatgataatatgcttaagaatatcgaactgtttgacaagctctccttgaggttcaacgggagggttctttttatcaaagatgtgattggagatgaaatttgttgttggtctttctacggacagggcaggaaaattgccgaagtctgttgcaccagcatcgtctacgccacagaaaagaagcagacaaaggtggagttccccgaggctagaatttacgaagaaacacttaatatcttgctttatgaggcccaagatggccgagggcctgacaatgctttgctcgaggcgactggcggtgcagctggcaggtcccaccacctcgacgaagatgaagagagggagaggattgaacgagtgcgtagaattcacatcaagagaccagatgaccgagcccacttgcaccagtag

SEQ ID NO: 235541 - DNA, 990 bp, synthetic construct
  misc_feature 1..990: note = Description of Artificial Sequence: Synthetic coding sequence
  source 1..990: mol_type = other DNA
atgtctgccgaggcatcagggccagcagctgctgcagccccttccctggaggctcccaagcctagtggtctggagcctggacctgccgcatatggtctgaagccattaacaccgaacagtaagtatgtgaagctcaacgttggaggcagtttacattacactacactcaggactctaaccggacaggacacaatgctgaaggcaatgtttagcggtcgcgttgaggtcctgactgacgcaggaggctgggtcctgatcgaccggagcggccgacactttggtacaatccttaactatcttcgggacggcagtgtgcctctgcccgaaagcactagagaactgggtgagttgctgggcgaggcccgttactatttagtccagggactgattgaagattgccagttggctctccaacagaagcgcgagaccttgtcaccactgtgtctgattcccatggttacaagtccaagggaggagcagcaactgttagcatccacctccaaacctgtagttaagctgctacataatcgctctaacaacaagtattcttacactagcacttccgacgacaacctactaaaaaacatcgagctttttgataagttagcgttgagatttcatgggagactactgtttctaaaggatgtgctcggtgacgagatctgttgttggtccttttacggccaagggaggaagatcgccgaggtgtgctgtacctctatcgtctatgcgactgagaagaagcaaacaaaggtagagttccccgaagcgcgtatctttgaagaaactcttaatatccttatatatgagacacctagaggccctgacccagcccttcttgaagcaacaggaggagcagcgggagctggtggagccggtcgtggggaagatgaggagaatcgagagcacagggtgcgcaggattcacgttagacggcacatcacacacgacgagcggcctcacggacagcagatcgtcttcaaggactag

SEQ ID NO: 235542 - DNA, 990 bp, synthetic construct
  misc_feature 1..990: note = Description of Artificial Sequence: Synthetic coding sequence
  source 1..990: mol_type = other DNA
atgagcgccgaggcttccggacccgctgccgctgctgcaccaagcctggaggcacccaaaccatccggccttgaacccggaccagctgcttacgggctgaagcccttgacaccgaattccaaatacgttaagttgaacgtggggggatctcttcattacaccacactgagaaccttgaccggccaggataccatgttgaaagccatgttctcgggacgtgtcgaagtgctcacagatgcgggagggtgggtactcatcgatcggagcggccgacacttcggcactattctgaattatctccgtgatggtagcgtgccgctgcctgagagcactcgcgagctgggcgaactactgggtgaggccagatattatctggtacaggggctgatcgaagactgccagctggcactccagcagaagcgggaaacattaagtccactgtgtttgattccaatggttactagccctcgggaagaacaacagttacttgccagcacaagcaaaccagtggtcaagctcttacataatcgctctaacaataagtactcctataccagtacatcagatgacaatctgttgaagaatatcgagctcttcgataagttggcattgaggttccatgggcgactgctctttttgaaagatgtcctgggagacgaaatttgctgctggtctttttacggccaggggaggaaaatcgctgaagtgtgctgcacatcaatcgtgtacgcaaccgagaaaaagcaaacaaaggttgagttccctgaggccaggatcttcgaagagaccttgaacatcctgatctacgaaacacccagaggtcctgatcccgcactactggaagcaaccggcggagctgctggcgcagggggtgccggaagaggtgaggatgaggagaatcgggagcaccgcgtccgcagaatacatgtccgtcgccacattacgcacgacgagcgcccacacggacagcagatagtgtttaaggactag

SEQ ID NO: 235543 - DNA, 1287 bp, synthetic construct
  misc_feature 1..1287: note = Description of Artificial Sequence: Synthetic coding sequence
  source 1..1287: mol_type = other DNA
atggcactcagtggaaactgcagccgatactacccccgagagcaagggagcgcggtcccaaacagctttccagaggtcgtagaattgaacgtggggggtcaggtctacttcacccggcactcaacacttatttctattccgcactccttgctctggaagatgtttagccccaagcgagacaccgccaatgatttggccaaagatagcaaaggtagattcttcatagatcgagatggttttcttttcagatatatcttggactacctgcgcgacaggcaagtggtgctccccgaccatttcccagagaaaggaaggctgaagcgagaagctgaatacttccaactgccagacctggtcaaactgcttacacccgacgaaataaagcaaagtcccgatgagttctgccattcagatttcgaggatgccagccagggaagtgatacgagaatttgtccgccaagttctctgttacctgctgaccgcaagtggggctttatcactgttggctacagaggtagttgcacactgggaagggaaggacaggctgacgccaagttcagacgggtgcctcggatcctagtctgtggacggatttctctggctaaagaagtattcggcgaaacacttaatgagtccagagatcctgatcgggcacccgagaggtacacaagtaggttttacctaaaattcaaacaccttgagagagctttcgatatgctctctgagtgtgggtttcacatggtggcgtgcaactctagtgtgaccgccagttttataaatcagtacactgacgataagatctggagttcttatacagagtacgtgttctatagagagcccagccgctggtcacctagccattgtgactgctgctgcaaaaatggcaagggggataaagagggagaaagcggaaccagctgtaatgatctatcaaccagttcttgcgactcccaatcagaggcaagttccccccaggagaccgtcatttgtggaccagtcacgaggcagacaaatatccagacattggaccgaccaatcaagaaaggcccagtgcaattgatacaacagtcagaaatgagacgcaagtccgacttgctgaggaccttgaccagcggttcccgggagtctaacatgtcatcaaagaagaaagccgtcaaggaaaagctctctattgaggaggagttggaaaagtgcattcaggactttctaaagattaaaatcccagacagatttcccgagaggaaacacccttggcagagtgagctcctgagaaaatatcacctctag

SEQ ID NO: 235544 - DNA, 1287 bp, synthetic construct
  misc_feature 1..1287: note = Description of Artificial Sequence: Synthetic coding sequence
  source 1..1287: mol_type = other DNA
atggccctctccggaaactgcagccgttactaccccagggagcagggttcagctgttcccaacagcttccccgaggtcgtggaattgaatgtaggcggacaggtttacttcacacgtcacagtactttgatatcaattcctcacagtcttctctggaaaatgttttcccctaaacgggacacggcaaatgacttagctaaggattctaaaggcaggtttttcattgacagagacgggtttctgttccgttatatcttggattaccttagggaccgacaggtggtcctccctgaccactttcctgagaaggggaggctaaaaagagaagccgagtactttcagctcccagatctggtgaagctgcttactcccgacgaaatcaaacagtccccagacgagttttgtcactccgacttcgaagatgcatcgcaggggagcgacacccggatttgcccgcctagtagcttgctgcctgccgatcgaaagtggggatttatcaccgtggggtacaggggctcatgcaccctgggaagagagggccaagccgatgcgaaatttcgtagggtgccccgaatcctggtgtgcgggaggatttccctcgccaaagaagtgtttggagaaacacttaatgagagccgagaccctgaccgagcccctgaaaggtacacatcccgcttttatttaaagttcaagcacctcgagcgagccttcgacatgctttctgagtgcgggtttcacatggttgcgtgtaacagctccgtgaccgcttcgttcattaaccagtatacagacgacaaaatttggtctagttatactgaatatgtgttctaccgcgaacccagtcgatggtccccttctcactgtgattgttgctgtaagaacgggaaaggagataaggaaggcgaatctggcacttcttgcaacgatctatcaacttcctcttgtgactcacagtctgaagcgtcctctccccaagaaacagtgatttgcggccctgtaactcgccagactaatatccagactctcgatcgccctattaagaaaggacctgtccaactcatccagcagagtgaaatgagaaggaagagtgatctgttgcgaactttaacaagcggctcccgagagagcaatatgagctcaaaaaaaaaggctgtcaaggaaaaattgtccatcgaggaggaactggaaaagtgcattcaagatttcctgaaaattaagatccccgaccgctttcccgaacggaagcatccctggcagtctgaacttttgcgcaagtatcacttgtag

SEQ ID NO: 235545 - DNA, 792 bp, synthetic construct
  misc_feature 1..792: note = Description of Artificial Sequence: Synthetic coding sequence
  source 1..792: mol_type = other DNA
atggccgagttgcagttggaccccgctatggcaggtctcggaggtggaggcggatcaggtgtgggcgatggaggcggtcccgtcagaggcccaccaagtcctagacccgcagggccaactcccaggggccatggtaggcccgcagctgccgttgcccagccactggagccaggcccaggcccacccgagcgggctggtggcggaggtgccgctagatgggtcagactgaatgtgggcggtacatactttgtcaccacaaggcagaccctgggcagagagccgaaatctttcctgtgtcgactatgctgtcaggaagatccagagctggactccgataaggatgagaccggcgcttacttgatcgatagagatccgacttactttgggccaatcctgaattatctcagacacggaaaactaatcataacaaaggaactggccgaggagggagtgctggaggaagccgagttttacaacatcgcgtccctcgtgcgcctggtgaaagaacgaatccgggacaacgagaatcgtaccagccagggacccgtgaagcatgtttatagagtgctgcagtgtcaggaagaagagctgacccagatggtgtctaccatgtccgatggatggaagttcgagcagcttatcagcatagggtcttcttataattacggcaatgaagaccaggcagagtttctgtgcgttgttagccgggagttgaacaatagtactaacggcatcgtgatcgaaccctctgaaaaggctaagattctgcaagagaggggctcgagaatgtag

SEQ ID NO: 235546 - DNA, 738 bp, synthetic construct
  misc_feature 1..738: note = Description of Artificial Sequence: Synthetic coding sequence
  source 1..738: mol_type = other DNA
tcactaccaaggaacggtccagccagattaagggctgggagctccgggggaggtggcggaccacggtggcgcaactgctcttggaccagacgatggcggggttgggagggcgctcccggtcctggaccacctgaacgcgctgggggaggaggggcagccaggtgggttcggcttaacgtgggcggtacttactttgtcaccacaagacagacccttggcagagagcctaaaagcttcctgtgtcgactgtgttgccaggaagaccctgagctcgacagcgataaggacgagacaggtgcctacctgatagaccgtgatcctacttactttgggcctattctgaattaccttcggcatggcaaactcataatcactaaggaacttgccgaagagggcgtgttagaagaagccgaattttacaatatcgcttctcttgtgcggctcgtaaaggagcgcatccgggataatgagaaccgtactagccagggacctgtgaagcatgtgtacagagtactgcagtgtcaggaggaagaacttactcagatggtttccaccatgagcgacggctggaaattcgaacagctgatatctatcggtagctcttacaactacggaaatgaagaccaggccgagtttctgtgcgtggtgagtagagaactgaacaactctactaacggtatcgtgatcgagccctccgagaaggcgaagattctgcaagagcgcggatcccgaatgtag

SEQ ID NO: 235547 - DNA, 2448 bp, synthetic construct
  misc_feature 1..2448: note = Description of Artificial Sequence: Synthetic coding sequence
  source 1..2448: mol_type = other DNA
atggccggtggacattgcggctcatttcctgccgctgccgctgggtccggagagatcgtccagctgaacgtggggggaaccagattttccacctccagacagaccttaatgtggattccggacagctttttcagtagcctgttgtccggcaggatttctactttgagagatgaaaccggtgctatttttattgatcgggatcccgcagcatttgctcccattcttaatttcttgcggaccaaggagctggatctgcgtggagtctccatcaacgtgcttcgccacgaagccgaattttatgggatcacaccactcgtgcggaggctgcttctgtgcgaagaattggagcgctcctcatgtgggagcgtgctttttcatggctatctcccccctccagggatccctagccggaaaatcaataatacagtgagatcagccgattcacgaaacgggcttaactccacagagggggaagccagaggaaacgggacccagcctgttttgagcggcactggggaagaaacagtgagattagggtttcctgtggatcccagaaaggtgttaattgttgcaggtcatcataactggatcgtggctgcgtacgctcatttcgccgtttgttatagaattaaagagagttcaggttggcaacaagtgtttacctctccttatttagactggacaattgaaagggtcgcccttaacgctaaggtggttggcggtccccacggtgataaggacaagatggtagccgtcgcttctgagtctagcatcatattgtggtccgtccaagacggcggatctggctccgagataggtgtgttctcactcggggttcctgtggacgctctgttcttcattgggaaccagctggtcgccacctcccatacagggaaagtgggggtctggaatgctgtgacacaacattggcaggtccaagatgtcgtgcccataacgtcgtatgatacagccggttcatttctgttgctgggttgcaataatgggtcaatctattacattgatatgcaaaaattcccactacggatgaaggacaacgatttattggtgacagaactgtatcacgatccatccaatgacgccatcacggccttgtcggtgtatcttactccgaagacttctgtaagcggaaactggatcgaaatagcctatggcacctcatctggggcagtgcgggttatcgttcagcaccctgaaaccgtgggcagcgggccacagttattccagacttttactgtccaccgcagtcctgtgactaaaattatgttgagcgagaagcacctggtgagcgtgtgtgctgataacaatcacgtgcgtacctggaccgtaacacggttccggggaatgatcagcacacagcctggaagcacccctctcgcctcatttaagatcttgtccctcgaggagactgagagccacgggagctactcctctggaaacgacatcggaccattcggagaacgcgacgaccaacaagtgttcatacagaaggtcgtgcctattacaaataaactgttcgttaggctgtcctctactggaaagcggatctgtgaaatccaggctgtagactgtaccacaataagcagtttcaccgtcagggaatgcgaagggtcttcgcggatgggaagccgccctaggcgctacctgttcacgggccacaccaatggtagcattcagatgtgggacctgaccacagcgatggatatggtcaataaaagcgaagacaaagatgtgggcggtcccacggaggaggagttgctcaagttgctggatcagtgcgacttaagtacctcccgatgtgcaactcccaacatatcccccgctaccagcgtggttcagcactcccacctgagggaaagcaattctagccttcagttgcaacaccatgacactactcatgaagccgctacctacggctctatgaggccatacagggaatctcccctgttggcacgcgcaagacgtaccgaatcattccactcgtacagagatttccaaacaatcaatctgaacagaaacgtggagagggctgtgcccgagaacggtaacctgggaccaattcaggccgaagtcaagggagccacgggcgagtgtaacatatcagaacgcaagtcccctggtgttgagatcaagagcttgcgcgaactggactcagggcttgaagtacataagatcgctgaaggcttcagcgaatcaaaaaagaggagtagcgaagacgaaaatgagaacaagatagaattccgaaagaaggggggattcgaagggggtggtttcttaggtcgaaagaaagtgccctacctggcttcttcaccgtcaactagtgacggtggaactgactccccagggacggcgagtccatcccctacaaagacaacaccatcaccaagacacaagaagagtgatagcagcggacaggagtattctctgtag

SEQ ID NO: 235548 - DNA, 723 bp, synthetic construct
  misc_feature 1..723: note = Description of Artificial Sequence: Synthetic coding sequence
  source 1..723: mol_type = other DNA
atggccggagggcactgtggaagttttcctgccgcagctgccggatccggagagatcgtacagttgaatgttggcggaaccaggttcagcacaagcaggcaaactcttatgtggatcccagattctttcttcagcagccttttgagtggcagaatttccactctcagagatgaaaccggggcaattttcattgaccgggaccctgccgcattcgccccaattctgaactttctgaggaccaaagagctagatctacggggagtgagtattaatgtgctgagacacgaagccgaattctacggcatcacgcccctggtgcgccgactgctgctgtgtgaggaactcgaaaggagctcttgcgggagcgtgctcttccacggatatctgccacctcccggaattccatctagaaagattaataacacagtgcgatccgctgattcacgcaacggtttgaacagcactgagggtgaggcgaggggtaatggcacacagccagtgctgagcggcacgggggaggaaacagttcgcctggggtttcctgtggatcctaggaaggtgctcatagtggcaggtcatcacaattggattgtggctgcgtatgcccacttcgctgtctgctatcgggtcttctggctgggcaccgtgggtcacgcatgtaaccccagtaccctaggcggaagggatggatggtctagccgtagcgcgagaccgacgtggtag

SEQ ID NO: 235549 - DNA, 567 bp, synthetic construct
  misc_feature 1..567: note = Description of Artificial Sequence: Synthetic coding sequence
  source 1..567: mol_type = other DNA
atgaaggacaacgatctgttggtgactgagctataccatgatccttccaacgatgctattaccgctctcagcgtgtatctcactccaaagacctctgtttcaggtaattggatcgaaatcgcttatggcactagttccggtgccgtcagagtgatcgtccagcatcccgagactgtcgggtcaggaccacaactcttccagacgttcacagtccataggtctccagttaccaagatcatgctttccgagaaacatctcgttagtgtgtgcgccgataataaccacgtgcgaacttggacagtaacacgatttcgcggaatgatcagcacacagcctggaagcacgcccttggccagctttaagattctttctctcgaggagactgagtctcatggcagttatagcagcgggaacgacattggacccttcggggagcgcgacgaccagcaggtgtttatccagaaagtagtgcctatcactaataagctattcgtgcgattgtctagcaccggcaaatctctgtgtggcgtttcccttgtctctcggtcttcccaggagcccacgtag

SEQ ID NO: 235550 - DNA, 642 bp, synthetic construct
  misc_feature 1..642: note = Description of Artificial Sequence: Synthetic coding sequence
  source 1..642: mol_type = other DNA
taattctctacaagccgtcaaacgttaatgtggataccagactcctttttttcatcactgttgagcggcagaatctccaccctgcgtgacgaaacgggtgcgattttcattgatcgcgaccccgcagcctttgcacccatcttaaacttcttgaggaccaaagagttggacctgcggggagtttccattaacgtccttagacacgaggccgagttttatgggattaccccactggtgcgacgccttctactgtgtgaggaactggagcggtccagctgtggctccgtcctgtttcacggctatttgccccctccagggatccccagccgcaagataaacaatactgtgagatcggccgactctcggaatggactgaacagtacagagggtgaagcgaggggcaatggcactcaacccgtgctctcaggaactggcgaggaaactgttcggttaggattccctgttgacccaagaaaggttctgatcgtggccggacaccacaattggatagtggcagcttatgctcactttgctgtctgctatagagtgttctggcttggaacagtcggccacgcctgtaatcccagcaccctaggtggaagagatggttggtcctcacggagcgccaggccaacatggtag

SEQ ID NO: 235551 - DNA, 507 bp, synthetic construct
  misc_feature 1..507: note = Description of Artificial Sequence: Synthetic coding sequence
  source 1..507: mol_type = other DNA
taggcactgtcggtgtatctgacccctaagactagcgtgtccgggaattggatcgagatagcttatggcacctcttccggtgccgtgagagtgattgttcagcacccagagactgtcggtagcggtccacagctcttccaaacattcacagtccaccgcagccccgtaaccaagatcatgctgtccgagaaacacctcgttagcgtttgcgccgataacaatcatgtacggacatggaccgtgacaagattcaggggtatgatctcaacccagccaggttctactcccctcgcttctttcaaaattctaagcctggaggagaccgagagccatggaagctactccagtggcaatgatattggaccatttggagagcgggacgaccagcaggtcttcatccagaaggtggtgcctatcactaataaactgttcgtgcggctgtcatctaccggtaagagtctgtgcggggtgagtctggtgagcagaagctcacaggaacccacctag

SEQ ID NO: 235552 - DNA, 870 bp, synthetic construct
  misc_feature 1..870: note = Description of Artificial Sequence: Synthetic coding sequence
  source 1..870: mol_type = other DNA
atggtggtggtgaccggccgagaacccgatagccgacggcaagatggcgcaatgagtagtagcgacgccgaggacgattttctagagccagcgacaccgactgctacacaggcgggacacgctctccctctccttccgcaggagttccccgaggtggtgcctctgaatataggcggagcacactttacaacccgccttagtactctccgctgttatgaagatactatgctggcagcgatgttttcaggtcgccattacattccaactgattcagaagggaggtacttcatagatagagacggaactcactttggagatgtcctgaatttcctccgtagcggcgatctccccccacgcgagcgcgttcgcgctgtctataaagaggcacagtattatgctattgggccactcctggaacaacttgaaaacatgcaaccattaaaaggagaaaaggtccggcaggcattcctgggtctgatgccatactataaggatcatcttgagcgcatagtggagatcgcacgactgagagccgtacagcgcaaagcaaggttcgccaaactaaaagtgtgtgtgtttaaggaggaaatgcccataaccccctacgaatgcccactgcttaacagcctgcggttcgagcggtcggaatctgatggtcagctattcgagcatcactgcgaggtagacgtaagtttcggaccttgggaggcggttgcggacgtttatgatctgcttcactgcctggtgaccgacctatcagcacagggactgactgtcgatcaccagtgcatcggggtgtgcgacaagcatttggtaaaccattactactgtaaacggccaatatacgaattcaaaattacttggtggtag

SEQ ID NO: 235553 - DNA, 1728 bp, synthetic construct
  misc_feature 1..1728: note = Description of Artificial Sequence: Synthetic coding sequence
  source 1..1728: mol_type = other DNA
gtcagcaggaaaaagatgagcctcaaatcagaacggagaggaatccatgttgaccagagtgacctgctttgcaagaaggggtgcggctactatggtaaccccgcttggcagggattctgctccaagtgttggcgggaggagtatcacaaggcgagacagaaacagatccaagaagattgggagctggcagaaagagtcctactgtgttacccgggatggtctgccatggtccagttccagctgaccgctacatcggcctcgtgggcacaggtaatcctgctgctgcagccacccaatgtgctcggccttcaagccctgcagcgagaggaggaagaggccttcgcttcctcccaatccagtcaaggggctcagtcactgaccttctctaagtttgaggaaaagaaaaccaacgagaaaacgagaaaggtcacaactgtaaagaagttttttagtgcctcctcacgagtgggcagcaaaaaggagatccaggaggcaaaagctccctctccatcgattaaccggcaaactagcatcgagaccgatcgcgtgtccaaggagtttatcgaattcctgaagacattccacaagacaggccaggagatctataagcagactaaactgttcctagagggtatgcactacaagagagatctttccatagaagaacagtctgaatgcgcacaggatttctaccacaacgtcgctgagcgcatgcaaacaagaggtaaggaaagacgattccatcacgtcgggcaggcaggtcttgaactcctcaccagtggcgatcctcccgcaagcgccagccagtctgcaggaaacacaggcgttgagcccccacatcccgcagttccgcctgaacgggtggagaaaataatggatcagatcgaaaagtatataatgacacggttatacaagtacgtcttttgcccggagaccacagatgatgaaaagaaggacctggctatacagaaaaggatccgagcgctccgctgggtcactccgcagatgctgtgtgtaccggtgaacgaagacatccctgaggttagtgacatggtcgtgaaagcaatcacagatatcatcgaaatggacagtaagcgagtcccaagagataagctggcgtgtataactaaatgctctaagcacatattcaatgccattaagattactaagaatgaaccagctagcgcagacgattttttacctactttgatttacatcgtgctgaaggggaacccgcctaggcttcaaagtaacatccaatacatcacgcgcttttgtaatccaagtaggctgatgaccggggaggatggttactattttacaaacctgtgctgcgctgtggccttcatcgagaaactggacgctcagtctttgaacctgtcacaagaggacttcgaccgctatatgagcgggcaaacctcacccaggaagcaggaggcagaatcctggagtcccgacgcatgccttggcgtgaagcaaatgtacaagaacctggatctgctgagtcagctgaatgaacgacaggagcggattatgaacgaagctaaaaagctggagaaagacttaatcgactggactgacggcattgccagggaggtgcaagatattgtagagaagtacccactggaaatcaaacctccgaatcagcccctcgccgctatcgacagtgaaaacgtggaaaatgataaactgccaccacccctgcagccccaggtgtatgcgggttag

SEQ ID NO: 235554 - DNA, 1596 bp, synthetic construct
  misc_feature 1..1596: note = Description of Artificial Sequence: Synthetic coding sequence
  source 1..1596: mol_type = other DNA
atgtcactgaaaagtgagaggcgaggaatacatgtagatcagagtgatctactctgcaagaagggttgtggatactacggcaatccagcttggcaagggttctgttcgaaatgctggcgcgaagagtaccataaagctcgacagaaacagatccaggaagactgggagctggctgaaagggtactcctgtgttacccgggatggagtgctatggtacagttccaactaacggccacgtctgcgagttgggcacaagttatccttctgctacagcccccaaacgtactgggcctgcaggccctccagcgtgaggaggaagaggctttcgcaagctcccaatccagtcagggcgctcagagcctgacgtttagtaagttcgaagaaaagaagaccaacgagaagacaaggaaagttacaaccgtgaaaaaatttttcagcgcctcatcccgagtcgggagcaagaaggaaatccaagaggctaaagcgcctagcccttcgattaaccgccagacttctattgagaccgacagggttagtaaggagttcattgagtttctgaaaacatttcataagacgggacaggagatctacaagcagaccaaattgttcctggagggcatgcactacaagagggatctatcaatcgaagaacagagtgagtgtgcccaagacttctaccataatgtagccgaaaggatgcagacacggggaaaagtccctccagaaagggttgaaaaaatcatggaccaaatcgaaaagtacattatgacaaggctttacaaatatgtgttctgccccgaaactacagacgatgagaaaaaagatcttgccattcagaaaagaattcgcgctttaaggtgggttactccccaaatgctttgcgtccccgtcaatgaggacattcctgaggtgtccgacatggtggtgaaggctatcactgacattatagagatggactcgaaaagggttccccgagacaagctggcctgcattactaagtgctcgaaacatatctttaatgcaatcaagatcaccaagaatgagcccgcttcagctgatgacttcctaccaaccctgatctacatcgtgctgaagggcaatccccctagactgcagtccaatatccagtacatcacgcggttctgtaatccctctcggttgatgaccggggaggatggttattatttcacaaatttatgttgcgctgtcgcatttatagagaaactcgatgcgcagagccttaacctgtcccaagaggacttcgacagatatatgtcaggccaaacatcccctcgaaagcaagaggccgaaagttggtctccagacgcatgtttaggcgtgaaacaaatgtacaaaaacctggatctcttgtcccagttgaacgaacggcaagagcgcatcatgaatgaggcaaaaaagctggagaaagatctcattgattggaccgacggaattgccagagaagtgcaggatatcgtggagaagtacccactggaaataaaaccccctaaccaacctctggccgctatcgattccgagaacgtggagaatgacaaactgcccccaccactccagccacaggtttacgctgggtag

SEQ ID NO: 235555 - DNA, 1476 bp, synthetic construct
  misc_feature 1..1476: note = Description of Artificial Sequence: Synthetic coding sequence
  source 1..1476: mol_type = other DNA
atgagtttaaagtctgagcgccgaggaattcacgtggatcagagcgatctcctgtgtaaaaagggctgcggatactatggtaatccagcatggcaaggcttttgtagcaagtgctggagagaggagtatcataaggccaggcagaagcaaattcaggaggactgggagcttgcggaacgacttcagagagaagaagaggaagccttcgccagctctcaatcttcccaaggagctcagtcattgaccttcagcaaattcgaggaaaaaaagactaatgaaaagacgagaaaggtgaccaccgtgaagaaatttttttccgcatcttcaagggtaggcagtaagaaagaaatacaggaagccaaagcgccatccccttcaatcaaccggcagactagcatcgagaccgacagagtatccaaggagtttattgagtttcttaagactttccataaaacaggacaggagatatacaagcagactaagctgttcctggagggcatgcactataagagagacctctccatcgaagagcagagtgaatgcgcccaggatttctaccataacgtggccgaaagaatgcaaacccgcggtaaggtaccacccgagcgcgtggaaaagattatggatcagattgagaaatacatcatgacacggctctacaagtatgtcttttgccctgagacaacagacgacgagaagaaagacctggccatacagaaacggattcgagcactgaggtgggtcacaccccagatgctctgtgtgcctgtgaatgaagacattcctgaggtatctgacatggtggtaaaagccataaccgacattatcgagatggacagcaagcgggtgcccagggataagttggcttgcattacaaagtgctcgaaacatatctttaacgccattaaaatcaccaagaacgaaccagcttctgctgacgatttccttcctactctgatttacatcgtcctgaagggaaatccacccaggctccaatccaatatccagtatattaccaggttttgtaacccaagccgcttgatgacaggggaggacggctattattttaccaatctgtgctgtgccgtggcatttatcgagaaactggacgcccaatccctgaatttgagtcaggaagatttcgatcgctatatgagcggacaaacaagtccccgaaaacaggaggctgagagctggagccccgacgcctgtcttggggtcaaacagatgtacaaaaacttagatctcctgtcacagctaaacgagaggcaggagaggattatgaatgaagctaaaaagctcgagaaagatctcatcgactggaccgacggtatcgctagggaagtccaggacatcgtcgagaagtatccgcttgaaatcaaaccacccaatcagcctctggcagccatcgactccgagaatgtcgaaaacgataaattgcctccgccacttcagccacaggtatacgccggatag

SEQ ID NO: 235556 - DNA, 1476 bp, synthetic construct
  misc_feature 1..1476: note = Description of Artificial Sequence: Synthetic coding sequence
  source 1..1476: mol_type = other DNA
atgagtctgaagtctgaaagaagaggaatccacgttgaccagtctgacctgttatgtaaaaagggctgtggctattatggcaatcctgcctggcagggcttttgctccaaatgttggagagaggagtatcacaaagcacgccaaaagcagatccaggaggactgggaattggccgagaggttgcagagagaagaggaggaagctttcgcctcctcccagagtagccagggagcccagagcttaacttttagcaaattcgaggagaaaaaaaccaatgagaagacacgaaaggttacaaccgtcaagaagtttttcagtgcctctagcagggtcggctctaagaaggagattcaggaggctaaggcgccttctccttcaattaacaggcaaacctcaatcgagaccgatagagtttccaaagaatttatcgaatttctaaaaacctttcataagaccgggcaagagatttacaagcaaacaaaactttttctggaaggtatgcactataagcgagatctgagtatcgaggagcaatccgagtgcgctcaggatttttaccataatgtggctgaacggatgcaaacacggggtaaggtcccgcctgaaagagtggaaaaaattatggaccaaattgagaagtatatcatgactaggctgtacaagtatgtcttctgccctgagacaacagacgacgagaaaaaggacctggctatccagaaacggatacgggctctgaggtgggtaaccccacagatgttatgtgttcccgttaacgaggacatccctgaagtctccgacatggtagtaaaagcgatcacagacatcatagagatggatagcaaaagggtcccacgtgacaagctggcttgtatcacaaaatgttcaaaacacatcttcaatgccattaagataactaagaacgaacccgcatcagccgatgattttctgcctactctgatatacattgttctgaaaggtaacccgccacgcctccaatctaatatccaatatattacccggttctgcaacccctccaggttaatgactggagaagatggatattattttaccaacctgtgctgcgctgtagcttttatcgagaagctggatgctcagtcgcttaacttgagccaagaagactttgacagatatatgagtggacaaacctccccacggaaacaggaagcagagtcatggtcccccgatgcctgtctgggagtcaagcagatgtataaaaatctggacctgctgagccagctcaatgagcggcaggagcgcataatgaacgaggctaagaagctagagaaggacctgattgattggactgacggaatcgccagggaggtccaggatatcgtggagaaatatcccctcgagatcaaacctccaaaccagcctctcgcagccatagactcagagaacgtggaaaatgataagttacctccccctctgcaacctcaggtatatgcaggatag

SEQ ID NO: 235557 - DNA, 1224 bp, synthetic construct
  misc_feature 1..1224: note = Description of Artificial Sequence: Synthetic coding sequence
  source 1..1224: mol_type = other DNA
atgagcttgaagagtgaacgacgaggaatccacgtggatcagtctgatctgctgtgtaagaaaggctgtggttactacggcaatcctgcgtggcagggcttttgcagcaagtgttggcgcgaagagtaccataaagcccgacagaaacagatacaagaggactgggagctggcagaaaggctgcagcgtgaagaagaggaagcttttgcatcaagccagtcctcccagggagcgcagagtctcacttttagtaagtttgaggagaagaaaacgaacgagaagacacgcaaggtgactactgttaaaaagttcttcagtgcctccagtagagtggggagtaaaaagcccccagaaagagttgaaaagataatggatcagatcgagaaatacattatgacacgactctacaaatatgtgttctgtcccgagaccaccgatgatgaaaagaaagacctggcaatacaaaaacgcatcagagcacttcggtgggtgaccccacaaatgctctgtgtcccggtcaatgaggacattccggaggtctcagacatggtggtcaaggccatcaccgacatcatcgaaatggactcgaagcgcgttccccgtgacaagttagcctgcatcacaaaatgctccaagcacattttcaatgccattaagatcacaaagaacgaacctgcttccgccgatgacttcctcccgacactgatttacatcgttctgaaggggaaccctccaaggttgcagagcaatattcaatatattacaagattctgtaatccttcccggttaatgacgggggaagatggctattatttcaccaacctgtgctgtgccgttgcattcatcgagaagttggacgcacaatcccttaacctaagccaggaggacttcgatcggtatatgtctggtcaaacttctcctcggaagcaagaggccgaaagctggtccccagacgcttgtcttggtgttaagcagatgtacaagaatttagacctcttgtctcaactgaatgagaggcaggagagaatcatgaacgaggcaaagaagttggaaaaagatctgatcgattggaccgatggaatagctcgtgaagtgcaagatatagtggagaagtaccccttggagataaaacctcctaatcaacccttggccgctatagactctgaaaatgtagagaatgacaaactgccaccgccacttcaacctcaggtgtatgcgggatag

SEQ ID NO: 235558 - DNA, 867 bp, synthetic construct
  misc_feature 1..867: note = Description of Artificial Sequence: Synthetic coding sequence
  source 1..867: mol_type = other DNA
atggtggtcgtgacgggcagggagcctgattctcggagacaggatggtgcaatgagcagttccgatgcagaagatgacttcctggagcctgcaactccaaccgcgacacaggcgggtcacgcactcccactgctgccacaggagtttcctgaagtggtgcctctgaatatcgggggagcccatttcacaaccagattgagtacactcagatgttacgaagacactatgctcgcagctatgttctcaggcaggcattacatccccacggattcggaagggagatactttatagatagagacgggacccactttggcgatgtgctcaacttcctgaggtctggtgacctcccaccccgagaaagggtcagggctgtatacaaggaggctcagtactatgccattggccctctgctggaacaactggaaaacatgcagcctctcaaaggagagaaggtcagacaggcatttctggggctaatgccctattataaggatcacctggagcggattgtggagatcgccagactgagggcagtgcagcggaaggctagatttgctaagctgaaggtgtgtgtgtttaaagaggagatgcctatcaccccctatgagtgccccctgctgaacagcctccgcttcgagagaagcgaaagcgatgggcaactgtttgaacaccactgcgaggtagacgtgagtttcgggccatgggaagctgtggccgacgtgtatgatttgctccattgcctggtgactgatctttctgcacaaggtctcactgtggatcatcagtgcataggcgtgtgtgacaagcacctagtcaaccattactattgcaaacgtccgatttatgagtttaaaatcacctggtag

SEQ ID NO: 235559 - DNA, 663 bp, synthetic construct
  misc_feature 1..663: note = Description of Artificial Sequence: Synthetic coding sequence
  source 1..663: mol_type = other DNA
atgaagggatacgggcacacggtgccgctgtctgacggagggaaagcgttctgcatcatttacagcgtgatcggcattccatttacgctactttttctgacagcagtggtgcagcggattaccgtgcacgtcacccgcaggcccgtgctttatttccacatccggtgggggttcagcaagcaggtcgtcgccattgtacatgccgttttactaggttttgttacagtgagctgcttttttttcatacccgctgccgttttctctgttctggaggatgactggaattttttggagtctttctatttctgcttcatcagtctgtccacaataggccttggagattacgtgcctggggaaggctacaaccaaaaattcagggaactctacaagattggaataacgtgctatctgctacttggtctgatcgctatgcttgtggttctcgagaccttctgtgagctccacgagctcaaaaaattccgcaagatgttttatgttaagaaggacaaagacgaggaccaggtgcatattatagaacacgaccagttgagctttagttccataaccgaccaggcggctgggatgaaagaggatcagaagcagaatgaaccttttgtggccacccaatcctctgcatgcgtcgacggcccagccaatcattag

SEQ ID NO: 235560 - DNA, 1011 bp, synthetic construct
  misc_feature 1..1011: note = Description of Artificial Sequence: Synthetic coding sequence
  source 1..1011: mol_type = other DNA
atgctacagagcttggccggttcatcctgcgtgagattggtggaacgacatcggtctgcctggtgcttcggctttcttgtgctaggctacttactctacctggttttcggggcagtagtgtttagctctgtagaactgccatacgaggacctcctccgccaggagctccgcaagctgaaaagacggtttcttgaggaacacgaatgtctcagcgagcagcagttggagcagtttctgggtcgcgtgttggaagcttctaactacggagttagcgttctcagcaacgccagtggaaactggaactgggatttcacatccgctctattcttcgcctcaactgttctttccaccactggttacggccacaccgtgcccctcagtgatgggggaaaagctttttgcattatctattccgttataggaatccccttcacgctgctattcctgactgctgttgtgcagagaatcaccgtccatgttacgcgaagaccagtcttatacttccacattcgatggggttttagtaaacaggtggtggctatcgtccatgcggttcttctcggttttgtgactgtctcgtgttttttctttattcccgcagccgtttttagcgtcttggaggatgattggaacttcctggaatccttttacttctgcttcattagcctctcaaccatcggtctgggcgactacgtccctggggaaggatacaaccagaagtttcgtgagctgtacaaaattggaataacctgctacctccttctgggactcatagcgatgctggtcgtcctggaaacgttctgtgaactgcatgagctcaagaagtttcgtaaaatgttctatgtaaaaaaggacaaagatgaggaccaggtccatatcatcgaacatgaccagctcagcttctctagcattacagaccaagcggctgggatgaaggaggaccaaaaacagaacgagccgtttgttgcaacccagtcatccgcttgcgtggacggccctgccaatcactag

SEQ ID NO: 235561 - DNA, 729 bp, synthetic construct
  misc_feature 1..729: note = Description of Artificial Sequence: Synthetic coding sequence
  source 1..729: mol_type = other DNA
gttctccgggtcctcagcccagacctcgtccgcagactcctaaatctggcagtccgcgcatttcaggtcccgaaaggcgagtcccttaatttcccagagagtactccaggatatggtcataccgtccccctttcggatggaggaaaggctttttgtattatctactcggtgattggaattccttttacattgttgttcctgacagccgtggttcagcggattacggttcatgtaacccgccgacccgtcctctattttcatataagatggggtttctctaaacaagtggtggccattgttcacgctgtgctcttgggctttgtaacggtgagttgttttttttttattccagctgccgtgttctcagtactggaggacgactggaatttcttagaaagtttctacttttgtttcatttccctgagtaccattgggctgggggattacgtccccggtgagggctataaccagaaatttagagaactttacaaaatcggaatcacttgctacctgcttcttggtctcatcgctatgctcgtcgtcttggaaactttctgcgagctacacgaactcaagaaatttagaaaaatgttttacgtaaaaaaggataaggatgaagatcaggtccatatcatcgaacacgatcagcttagtttttcctccattacagatcaggctgcaggcatgaaggaggatcagaagcagaatgagccattcgtggcgacttag

SEQ ID NO: 235562 - DNA, 1632 bp, synthetic construct
  misc_feature 1..1632: note = Description of Artificial Sequence: Synthetic coding sequence
  source 1..1632: mol_type = other DNA
atggaagacggtttcaagggcgaccgaactgaaggctgcagaagcgactctgtggcagttcctgctgcagcccctgtgtgccaaccaaagagtgcaacaaatgggcagcctcccgcacctgctcccacaccgacacctcggctcagtatttcctcacgagccactgtggttgcccgaatggagggtacatcccagggcggattgcaaacagtgatgaaatggaagaccgtggtggcaatttttgttgtggtggtcgtatacctggtcacaggaggtctggtgttccgggcactggagcagccattcgaaagtagtcagaaaaatacaattgcactcgagaaagcagaatttctgcgggatcatgtctgcgtttcacctcaagagcttgagaccctgattcagcatgctctggatgcagacaacgcaggcgtctctcctatcggcaatagcagcaacaacagttcacactgggacctgggctccgcctttttctttgctggcaccgtcattacaacaatcggttacggcaacatcgcccctagcactgaagggggtaagattttttgcatactgtatgcaatcttcggcattccgctattcgggttcttattagccggtatcggggatcaacttggaacgatctttggaaagtctatcgcccgagtcgaaaaggtcttccgcaagaaacaggtctcacagacgaagattcgagtcatatccacaatcctgtttatcctggcgggttgtatcgtctttgttacaatcccggctgtaattttcaaatacatcgaggggtggacggcactggaatccatctacttcgtggtggtaactctgacgactgtgggattcggggactttgttgcaggtggcaacgctggaatcaattatagggaatggtataagcctctggtatggttctggatcctggtgggtttagcttattttgcagccgtcttgagcatgatcggcgattggttgcgcgtgttatccaagaaaaccaaagaagaggtcggagagatcaaagcgcatgccgcagaatggaaagcaaatgttacagccgagttccgggagacccggcgtaggctttctgtggaaattcacgataagttacagcgagcagcaacaatccgcagcatggagaggcggaggctggggctcgatcaaagggcccacagtcttgatatgctaagccccgagaaaagatccgtgtttgctgccttggatacaggcaggttcaaggcctccagtcaggagagcattaataacaggcctaataacctcagacttaaagggcctgaacagcttaataagcatggacagggagccagcgaggataatattatcaataagtttgggtcaacgtcaaggctcaccaaacgaaagaacaaggatttaaaaaagacactgcctgaggacgtgcagaagatctataagacgttccgcaattattctttagacgaggagaagaaagaggaagagacagagaaaatgtgtaactctgacaattcctccactgctatgctgactgactgcattcagcaacatgctgaattggaaaatggcatgatcccaacggataccaaagacagggaacccgaaaataattctctactcgaagaccggaactag

SEQ ID NO: 235563 - DNA, 1632 bp, synthetic construct
  misc_feature 1..1632: note = Description of Artificial Sequence: Synthetic coding sequence
  source 1..1632: mol_type = other DNA
atgaaattccccattgagacaccacgcaaacaggtcaactgggacccaaaagtggccgtgcccgctgcagcgcctgtatgtcagcccaaatcggcaactaacggacagccacccgcacccgctccaacaccgactcctagactatccatttcctccagggctactgttgtggccagaatggagggtacgtcacagggaggcctgcaaactgtcatgaagtggaagacagtcgtggctatcttcgtcgtggtggtggtatatttggtcacagggggtctggtgttccgcgctctcgaacagccgtttgagtcctctcagaagaatacaattgcattagagaaggcggagttccttcgcgaccatgtgtgtgtctctcctcaggagctggagaccctgatccagcacgcactggacgccgataatgccggagtgtctcccattggaaactcttcaaacaacagttctcattgggacctcgggtctgcctttttttttgccggtaccgttatcacaacaatcggttacggcaacatcgctccctcaactgagggcggaaaaatcttctgtatcctctatgcaattttcgggataccgctgtttggttttctgctcgccggaataggtgaccagctaggcactattttcggaaagtctatcgccagggtggagaaggtttttaggaagaaacaagttagccagactaaaattagagtcatttccactatccttttcatactggctggatgcatcgtatttgtgactatacctgccgtcatattcaagtacattgaggggtggaccgccctggagagcatatattttgttgtcgttacgttgaccacagtcgggttcggcgactttgtggcaggcggaaatgccggaatcaactaccgcgaatggtacaaacccctggtgtggttctggatcctagtcgggttggcctactttgccgcagtgttatccatgataggagactggctaagagtgttgtctaaaaaaaccaaggaagaggtgggcgagataaaggcacatgctgctgagtggaaagctaatgtgactgctgagtttagagagacacgcagacggctcagtgtcgaaatacacgacaaattgcagcgggctgccacaattcgctccatggagaggcgaaggctgggcctggaccaaagggcacactctctggatatgctgagccccgagaaacgcagcgtcttcgccgcactcgatactggcagattcaaggcttcatcccaagagtctatcaacaataggccaaataatctgcgtttgaaaggtcctgaacaactcaacaagcacggccagggggcttcggaggacaacattatcaacaaatttggtagcacgagcaggctgacgaagaggaaaaataaggatctcaagaagactctgcctgaggatgtgcaaaagatctacaaaacgttccgtaactattcccttgacgaggaaaagaaagaagaagagaccgaaaagatgtgcaattccgataacagctcaacagccatgctgaccgattgcattcagcagcatgccgagttggagaacggcatgatccccaccgataccaaggatagggaacccgaaaataacagcctactggaggaccgcaactag

SEQ ID NO: 235564 - DNA, 1617 bp, synthetic construct
  misc_feature 1..1617: note = Description of Artificial Sequence: Synthetic coding sequence
  source 1..1617: mol_type = other DNA
atgttctttctgtataccgacttctttctttccttagttgccgtccctgctgctgccccagtttgtcagcctaagtccgctacaaatggtcaaccacccgcacctgccccaacccctacaccgaggctttccattagttcacgggctacagtcgtcgctagaatggagggaacaagtcagggaggcctccagactgtgatgaaatggaaaactgttgtcgctatattcgttgtcgtggtggtttatttagtaaccggtggtctcgtctttcgggctttggagcagccgtttgagtcaagtcaaaagaataccatcgcccttgaaaaagcagagtttctgcgagaccacgtgtgcgtgtctccgcaggagctcgagacattgatccagcacgcgttggatgccgataatgccggagtatctccaataggtaattctagcaataattcttcccattgggaccttggatccgcctttttcttcgccggaactgtgattacaactattggctatgggaacatcgcgccttctaccgagggtggcaagatcttctgtattctctacgccatcttcggcattccgttgtttggctttctcttggctggcatcggcgatcaactgggcactatctttggaaaaagtattgcacgtgtggagaaggtatttaggaaaaaacaggtgtcccagactaagataagagtgatctcaaccatcctgtttattctggctggctgtatcgtctttgtgaccattccagcagtgattttcaagtatattgagggatggacagcacttgagtccatttactttgtggtggtcaccctcaccacagtcggcttcggcgatttcgtagccggaggaaatgccggaataaattacagagagtggtataaaccactggtatggttctggatcctagtggggctcgcttatttcgccgctgtgctgtcaatgatcggtgactggttacgggtactgtcaaaaaagacgaaggaggaggtgggcgagatcaaagcccacgctgctgagtggaaggctaacgtaaccgccgagttcagggagactaggaggcgcctgtcagtagagatacatgacaaactgcagcgcgctgccactatcagaagtatggaaaggagacggctcggcctcgatcagagggctcatagcttggacatgttgtccccagaaaagcgcagcgtgttcgcagccttagatacgggacgtttcaaggcttctagtcaggaaagtatcaacaacagacccaataacttgcgcttaaaaggcccagagcagctcaacaaacatggccagggagcaagcgaggacaatatcatcaataagttcgggagtacgagcaggctgaccaagagaaaaaataaggatctgaagaagaccctgcctgaggatgtccagaagatttataaaacctttcggaactattcccttgacgaagagaaaaaggaggaagaaaccgagaaaatgtgtaattccgataattcctccaccgcgatgctgaccgactgtatccagcagcacgctgaactggaaaatggtatgatccccaccgacacaaaggaccgcgaaccggaaaacaatagtctattggaggaccggaactag

SEQ ID NO: 235565 - DNA, 1293 bp, synthetic construct
  misc_feature 1..1293: note = Description of Artificial Sequence: Synthetic coding sequence
  source 1..1293: mol_type = other DNA
atgagtagccgctcaccacgccctcccccacgccgttctaggcgccgacttccaaggccgagctgctgttgctgctgctgtcgacgctcccatctgaacgaagataccgggcgttttgtcctgttggctgccctgataggactatacctggtcgcaggggctaccgttttcagcgctttggagtcccccggagaggctgaagcacgcgctcgctggggggcaacgttgaggaatttttccgcagcacatggagtcgccgaaccagagctgcgagcctttctacgtcactatgaggccgcacttgctgccggtgttcgggctgatgccttacggccacgctgggatttcccgggagctttttacttcgtgggaaccgtggtcagcactatcggctttggcatgactaccccagccacagtaggcggaaaagctttcctgatcgcctacggtctgtttggttgcgctggaacaatcctgtttttcaatctgtttctagaacggataatttcactgctagctttcattatgagggcctgtcgtgagcggcagcttcggaggagtgggctgcttcctgctaccttccgtcgagggagcgctctcagtgaggcagatagtctcgccggttggaagccgtctgtttaccacgtgctgttgatcctgggtctttttgccgtcttgctgtcatgttgcgcgtctgcaatgtatacctctgtcgagggttgggactatgtggattcgctgtatttctgctttgtcactttttcaacaatcggcttcggagacctggtatcatcccaacacgctgcctacagaaaccagggtctttaccgcctgggaaattttctgttcatcttgctaggcgtttgctgtatttacagtctatttaacgtgatctccatattgattaagcaggtactcaactggatgctgcgtaagctgagctgccggtgttgcgccagatgctgtccggcacctggggctccactcgcgaggaggaacgccattacacctggtagtcgactccggagacgcttagccgcactgggagcagacccagccgctcgggattccgacgccgagggcagacgactcagcggcgaactgataagcatgagagacctcaccgctagtaataaggtgtcacttgccttgctccagaaacagctgtccgaaacagcaaatggctatccgcgatctgtctgcgtgaacactagacagaacggattctccggcggtgtgggcgctctgggcatcatgaataaccgactggccgagaccagcgcaagtagatag

SEQ ID NO: 235566 - DNA, 1227 bp, synthetic construct
  misc_feature 1..1227: note = Description of Artificial Sequence: Synthetic coding sequence
  source 1..1227: mol_type = other DNA
atggctgggagggggttcagctggggtcccggacacctgaacgaggacaatgccaggtttctgttgttagcggcactgatagtgctttatttgctggggggagctgcagtgttttcggcactggaactcgcccatgagaggcaagccaaacaacgatgggaagaaaggcttgctaatttctcacgtggccacaatttgagccgagatgagctcagaggatttctgcgacactatgaagaggccaccagggccggtatacgcgtcgacaacgttcggcctaggtgggacttcaccggcgcattctattttgtcgggaccgttgtctctaccattgggttcggcatgaccactcccgctaccgttggcggtaagatcttcctaatattctacgggctggtgggttgctcctcgaccattttgttctttaatctgtttctggaaagactgataacgatcattgcttacattatgaagtcctgccatcagcgccagcttcgcagacgtggggctctcccccaggaatccctcaaggacgcaggtcaatgcgaagttgattctctcgcagggtggaagccctctgtgtattacgtaatgctgatcctatgtaccgcctctatcttaatcagttgttgcgccagtgctatgtacactcctatcgaaggctggagctacttcgacagtctgtacttctgcttcgtggccttcagtacaatagggtttggggatcttgtttcgtctcagaacgcccactatgagtcgcaggggttatacagatttgcaaatttcgtattcatcctgatgggcgtctgttgcatctatagcttattcaacgtgatctccattttaatcaagcaatccctgaattggattctccgcaagatggactcagggtgttgccctcagtgccagaggggcttgttgcgctccagaaggaatgttgtcatgccaggatccgtgcggaaccgttgtaatatttcgattgagactgatggagtagccgagagcgacacagatggccgaaggctttcaggcgagatgattagcatgaaggatctgctggccgctaacaaggctagccttgcaatccttcagaagcaactctcagagatggccaacggctgtcctcatcagacctccacactggctcgggataacgaattttctgggggagtgggcgcatttgcaattatgaacaacaggctcgcggagacctctggcgatagatag

SEQ ID NO: 235567 - DNA, 993 bp, synthetic construct
  misc_feature 1..993: note = Description of Artificial Sequence: Synthetic coding sequence
  source 1..993: mol_type = other DNA
atgcgacggccttctgtgcgggctgctggtcttgtactgtgtactctgtgctaccttctggtgggtgcagcagtgttcgacgcactggagtccgaagcagaaagtggcaggcagcggctgctggtgcagaagcggggagccctcaggcgaaagttcggcttttccgcggaagattatcgcgagctagagaggttagcactccaggcggagccccacagggccggtagacagtggaagttccctggctctttctacttcgccattaccgtaatcactaccatcgagtacgggcatgctgccccaggcacagattcgggcaaagtcttttgcatgttttacgctctactggggattcctctcaccctagtcaccttccagagtctgggggagcgtttaaacgccgtggtcagaaggctgctgcttgcggcaaagtgttgcctcggcctgaggtggacctgcgtgtcgaccgagaacctggtagtggcagggcttttagcatgcgcagccacgctcgctctgggagccgtagccttctcgcattttgaaggatggacttttttccacgcttattactactgtttcattaccctgactacgattggctttggagattttgtggcactacagtcaggggaggccttgcagcgtaaacttccttacgttgcgttctcttttctgtatatcctcctgggtctgactgtgataggtgcattcctcaacctggtcgtgttacgtttcctagtggcaagcgccgattggcctgagagggctgcccgaacacccagtcccagaccgccaggagccccagaaagccggggattatggttaccccgacgtccagctagatccgtcgggagtgccagcgttttttgtcatgtgcataaacttgagagatgcgctcgcgataatcttgggtttagtccccctagctcccccggagtagtcagaggagggcaagcccctcggcttggcgctagatggaagagtatctag

SEQ ID NO: 235568 - DNA, 789 bp, synthetic construct
  misc_feature 1..789: note = Description of Artificial Sequence: Synthetic coding sequence
  source 1..789: mol_type = other DNA
atgccatccgctggactgtgcagttgctggggcggtagagttctgccacttctgcttgcatatgtatgctatctgctgctgggtgctacgatattccagctcttagaacgacaagccgaggctcagtctagggatcagtttcagctggaaaaactcaggttcctcgagaactatacctgcttggatcaatgggcgatggagcagtttgtccaggtgatcatggaggcgtgggtgaaaggggtcaaccccaaaggtaactctaccaatccgtctaactgggatttcggctcctccttttttttcgctggtacagtagtgaccaccatcggctatggtaacttggcgccatcaacggaggccggacaggtgttttgtgtattttacgccctcctgggaattccactcaacgtaatttttctgaaccacctgggaacggggctaagagcccatcttgctgcaatagaacggtgggaagacagacccagaaggtcacaggtgttgcaggtgttgggcctagccctgtttctcactctgggtaccctcgtcatcttgatattcccccctatggttttttcccacgtggagggctggagcttctccgagggattctacttcgcttttatcactctcagcactattggttttggcgattatgtcgtgggactcaggcaagggtgtggggcaaaagccgcacctggaaggaggcctcggagagggagcactgctgcccgtggagtgcaggtgacgcctcaggattttcccatcagcaagaaggggctcggcagttag

SEQ ID NO: 235569 - DNA, 930 bp, synthetic construct
  misc_feature 1..930: note = Description of Artificial Sequence: Synthetic coding sequence
  source 1..930: mol_type = other DNA
atgccaagtgctggactgtgcagctgctggggcggacgcgtgctgcccctcctcctcgcatatgtgtgttacctgctgctcggtgccactattttccaactgctggaacgtcaggccgaagcccagagtagggatcagttccagctggagaaactgcgctttctggagaactatacctgtctagatcaatgggctatggaacaatttgttcaagtcatcatggaagcatgggtaaagggtgtgaaccccaaggggaacagtacgaatccctccaattgggactttggttcctcattcttttttgctggaaccgtggtgactactatcgggtatggaaacctggccccaagtaccgaggctggccaggttttttgtgtgttctacgctctcctgggaattccgctcaacgtcattttcctgaatcaccttggtactgggttgagagctcatctggcagcaattgaaagatgggaagataggccgaggagatcccaggtccttcaggtgctcgggctggccctgtttcttaccctgggaacacttgtcatactgatcttcccgccaatggtgttcagtcatgtagaggggtggtccttcagcgagggtttttacttcgcttttatcactctctcaaccattggttttggtgattacgtggtcggtacagaccccagcaagcactatatttccgtgtaccggtcgttagctgctatatggatcttgttgggcctggcctggctggccctgatcctgcccctaggccctcttttactccaccgatgctgtcaactctggttgctctccttgaggcaaggctgcggggcaaaggccgctccaggaaggagacccagacgcggttcaacagctgcacgcggagttcaagtcactccacaggattttcctatttcaaagaaagggctggggagctag

SEQ ID NO: 235570 - DNA, 969 bp, synthetic construct
  misc_feature 1..969: note = Description of Artificial Sequence: Synthetic coding sequence
  source 1..969: mol_type = other DNA
atgccatccgccggactttgcagctgctgggggggaagagtcctgcccctcctgctcgcctatgtctgttacctactcctgggagcaaccatttttcagctcctggagcggcaggctgaggcccaaagcagggatcaattccagttggagaaacttcgctttctagaaaactacacttgccttgatcaatgggctatggagcagtttgtgcaggtgattatggaggcctgggtgaagggagttaaccctaaaggcaactctaccaatccaagtaattgggatttcgggtctagcttcttttttgccggaactgtggtgacaacaattggctatggcaacctggccccttccactgaggccggtcaggtgttctgcgtcttttacgccctccttggcataccactcaacgtgatcttcctcaatcaccttggcaccggtttgcgcgcacacctcgcggctatcgaacggtgggaagaccgtcccaggagatcccaggtactgcaggtattgggattagctctgtttctgactctggggacgctggtgatcctcatcttccccccaatggtgttcagccacgtggagggatggagcttctcagaaggcttttactttgcctttattactctctcaactatcgggttcggagattatgtggtaggccacccgcttaatttcattacacctagcggcctgctgcccagccaggagcccttccaaaccccacacggcaagcccgagtcccagcagatccctgggagttttcagaaggtgtctagcatgaatgtctggcccctgagtggaatgcattctccaggcctggctttccctcttcccgattgcaatatccctgaccaggaacggttcaggcctcttcacccgggagcatggaagttttggcctcttccactgccaagcagtaatagtaaatgggccccaatgtggcttggaagttcagcgcaggtctag

SEQ ID NO: 235571 - DNA, 885 bp, synthetic construct
  misc_feature 1..885: note = Description of Artificial Sequence: Synthetic coding sequence
  source 1..885: mol_type = other DNA
atgccttcagccggattgtgcagctgctggggaggccgtgtccttccattactcttggcctacgtgtgctacctgctactgggggcaacaatctttcagttgctggagcgtcaggccgaagcccagagcagagaccaatttcaattggaaaaattgaggtttctggagaactatacctgcctggaccagtgggccatggaacagttcgtgcaggtgatcatggaggcctgggtgaagggagtgaatccgaaagggaatagcaccaacccgtcaaactgggacttcggaagctccttcttctttgctggcacagtggtgaccactatcggatacggcaacctggcgcctagcacggaggccggtcaggtgttctgcgttttttacgccctcttggggatcccactcaacgtaattttcctgaatcatttgggtactggccttagagctcatctcgccgctattgaacgctgggaagatcgacccaggcgaagtcaggttctccaagtgttggggctggccctctttctcaccttgggtacactcgtcatcctgatcttcccccctatggtgttctcgcacgtcgaggggtggtcgttttcggaagggttttatttcgcctttattacactgtcaacaatcgggtttggggactatgtagttggaaccgacccgagcaaacattacatttcagtttatcggtctttggccgcaatctggatcctgcttggcctagcctggttggcactgattctgcccctcggccctttgttattacatcgatgctgccagctttggctcctgagccgaggcctcggcgttaaggacggggcagctagtgaccccagtggactcccgcgtccccagaagataccgatttctgcgtag

SEQ ID NO: 235572 - DNA, 594 bp, synthetic construct
  misc_feature 1..594: note = Description of Artificial Sequence: Synthetic coding sequence
  source 1..594: mol_type = other DNA
atggaacagttcgtgcaggtgattatggaagcgtgggtgaagggggtgaatcccaagggcaatagtactaatccctcaaactgggacttcggctccagcttcttttttgccggtaccgttgtgaccaccatcggttatgggaacctggccccttcaacagaggcgggacaggtattctgcgtcttttacgcccttttggggatccccctgaacgtgattttcctaaaccatctaggtacagggctgagagcccatctggccgctattgagaggtgggaagacaggccacgcaggtctcaggtgctgcaggtgcttggtctggcactgtttcttaccctggggacgctagtgatattgatttttcctccaatggtcttctcgcacgttgagggatggtccttttctgagggtttctactttgccttcatcacattgtccactatcggattcggagattatgtcgtgggattaagacagggttgcggagcaaaagccgcaccgggaagaagaccaaggagaggtagcacagcggcacggggagtgcaagtgactcctcaggacttcccaatctccaagaagggattgggatcctag

SEQ ID NO: 235573 - DNA, 999 bp, synthetic construct
  misc_feature 1..999: note = Description of Artificial Sequence: Synthetic coding sequence
  source 1..999: mol_type = other DNA
atgtaccggcctagggctagagcagctcccgagggccgagtgcggggttgtgccgtgccatcaacagtcctcttgctgctggcctatttggcgtacctggcccttggaaccggggttttttggacgttagaaggaagggcggctcaagacagctcacggtcttttcaacgggacaaatgggaactcctacagaattttacttgtctagatcggcctgccctggattccctcatccgcgatgttgtgcaagcttacaaaaacggagcctcactgttgtctaacaccacatctatggggaggtgggaactggtgggaagcttctttttttctgtgagtacaatcaccaccatcgggtatggtaatcttagccctaatactatggctgcacgcctgttttgcatattctttgccctggtggggattcctttaaatttggtggtgcttaatcgtctgggacatctaatgcagcagggcgtgaaccactgggcctcgaggctcgggggaacttggcaagacccagacaaagccaggtggctcgcagggagcggtgccctgttgagcggcctccttttgtttctgctgctgcccccactattgtttagccatatggagggttggtcctatactgaagggttttatttcgcctttatcactctgtctacggtaggcttcggggattacgttattggcatgaatccgagccagcgctaccctctctggtacaagaatatggtcagcctgtggatcctgttcggcatggcctggttggccttgatcatcaagttgattctgtcccagctggagacacccggtagagtgtgcagttgctgccatcatagctccaaggaggatttcaagtctcagagctggagacaggggcctgaccgagaaccagaatcccactcacctcagcagggctgttatcctgaggggccaatgggcataatccagcacctggagccatctgcccatgccgcaggttgcggtaaggattcttag

SEQ ID NO: 235574 - DNA, 816 bp, synthetic construct
  misc_feature 1..816: note = Description of Artificial Sequence: Synthetic coding sequence
  source 1..816: mol_type = other DNA
atgtacaggcccagagccagggccgcacctgagggcagagtgcgaggctgtgcggtaccgagcaccgtgctgctgctgctggcatacttagcatacttagcgctgggtaccggcgtgttttggaccttggaaggcagggcggctcaggattcatctaggagcttccagagagacaaatgggaacttctccagaatttcacatgtctcgaccgccctgcactggattctctcatcagggatgtggtgcaggcctacaagaatggtgcaagtctattgtccaacactacctccatgggccgttgggaactcgtgggatccttctttttcagtgtttccaccatcactactatagggtatgggaacctgtcacccaatactatggccgctcgccttttctgcatctttttcgcactggtggggatccccttgaacttggttgtgctcaatcgcctgggacacttgatgcagcagggcgtcaatcactgggcatccaggctaggcggtacatggcaagacccggataaggcgaggtggctcgcgggaagcggagcattgctgagcggcctgctgctgtttttgttactgcctccccttctgtttagtcatatggaagggtggagctacaccgaggggttttacttcgctttcatcacgctttccacggtcggtttcggcgattacgttatcgcctcatgtctgatcagtgacacacgcaagccgaatagggattggcagaccctagagagaactagtaagtccagtgggggtctgctgaagtacaggttcctagccggacatggcggatcccacttgtag

SEQ ID NO: 235575 - DNA, 1155 bp, synthetic construct
  misc_feature 1..1155: note = Description of Artificial Sequence: Synthetic coding sequence
  source 1..1155: mol_type = other DNA
atggaagtgagtggccatccacaggctcggaggtgctgcccggaggctcttgggaagttgttcccagggctatgcttcctctgtttccttgtaacttacgccctcgtgggggctgtcgtgttttctgcaatagaagacggccaggtcctcgtcgccgctgacgatggcgaatttgaaaagttcctggaagagctttgtagaatcctgaactgttcagaaacagtcgtggaggacagaaagcaggaccttcagggccacttgcaaaaagtgaagcctcagtggttcaatcgcaccacccactggtcctttctttcaagcctgtttttttgttgtaccgtcttcagcactgtgggatacgggtacatctatccagttactcggttaggcaaatacctttgcatgttgtacgccctatttggaattcccctgatgttcctggtgctgaccgacactggagacatcctcgccactatactctccacaagctataataggtttaggaaattcccatttttcaccagacccttactgtccaagtggtgccccaagtctctgttcaagaaaaagcctgaccctaaacctgcagatgaagcagtgccccaaatcattatttccgccgaggagcttccgggtccaaaattaggaacttgcccatcacgaccgtcttgctctatggaactgtttgagcgctcccacgcattagaaaagcaaaacacactccagttgccaccgcaggccatggaacgctccaactcctgcccagagcttgtactgggcagactatcatatagcataatcagcaacctggatgaggtgggacagcaggtggagcgtcttgacatcccgcttcccatcatcgccttgatcgtgtttgcatatatctcatgcgccgctgccatcctgcctttttgggaaacccagcttgacttcgagaacgcattctacttctgtttcgtgactcttacaacaatcgggttcggagacacagtccttgagcaccctaacttttttctgttcttctcaatctatattatagtgggaatggagattgtatttattgcctttaaactagtgcaaaataggctcatcgacatctacaaaaatgtgatgctgttcttcgcaaaaggtaagttttaccatctggtgaagaagtag

SEQ ID NO: 235576 - DNA, 459 bp, synthetic construct
  misc_feature 1..459: note = Description of Artificial Sequence: Synthetic coding sequence
  source 1..459: mol_type = other DNA
atgatgaacccgcgtgccaaacgggacttttacttagctgcacccgacctgctggatccgaagtctgctgcccagaactcaaaacctcgcttgtcattctctacgaaacctaccgtcctagcatcccgtgtagaatcagataccacaattaatgtcatgaaatggaagacagtgagtaccatatttcttgtagttgtgctgtacctgattataggcgctacagtcttcaaggcccttgagcagcctcacgaaatcagtcagcggacaaccattgtcatccagaagcagaccttcatcagtcaacattcctgcgtgaatagcaccgagttggacgaactcattcaagatctcgagacgtctcatcatgctcagaaggctgccaaatactctgtgtcttccatgccgtattgggagttccctagcctggtattcagttggctcgagctagaaattagctag

SEQ ID NO: 235577 - DNA, 1236 bp, synthetic construct
  misc_feature 1..1236: note = Description of Artificial Sequence: Synthetic coding sequence
  source 1..1236: mol_type = other DNA
atggccgcacccgacctgctcgaccctaaaagcgctgctcagaacagcaaacctaggctgtctttttcgaccaagcctacggtgttggcaagcagggtagagagtgacactacaattaacgttatgaaatggaagacagtgtccacaatatttttggtggtagtgctgtacctgataattggagctacagtttttaaagctttggagcagccacacgagatcagtcagcgcaccaccatcgtgatacagaagcaaacgttcatatcccagcactcttgcgttaacagcacagaattggatgaactcattcagcaaatagtggccgcaataaatgctggcattattccactcggaaacaccagtaaccagatttctcattgggatctggggagtagctttttcttcgccggaactgttatcaccaccattgggttcggaaatatcagtcctagaaccgaaggagggaaaatcttttgcataatttatgccttactcgggatccctctttttggatttctgctggcaggtgtgggcgatcagctgggaacaatcttcggaaagggcatcgccaaggttgaggatacttttatcaaatggaatgtcagtcagacaaaaatacggatcatcagcaccattatttttatccttttcggatgtgtcctgttcgtggccctgcccgctattatcttcaagcacattgaggggtggtcggcgctggatgccatctacttcgtggtaatcaccctcaccactattggcttcggcgattacgtagccggtggcagcgacattgagtatctggatttttacaaaccagtggtatggttctggattttagtcgggctcgcctattttgctgccgtgctgtctatgatcggagactggttgagagtcatttctaagaagactaaagaggaagtaggcgaattcagagcccacgcggctgagtggaccgccaatgtcaccgctgagtttaaggagactaggaggcggctgagtgtggagatttacgacaaatttcagcgggctaccagcatcaaacgcaagctgtctgccgaactcgcaggcaatcataaccaggagcttaccccctgcagacgtaccctgagtgtgaatcatctaacaagcgagagagacgttctgccaccactcttgaagaccgaaagcatctacttgaacggactgactcctcattgtgcaggcgaggaaatagccgtaatcgaaaatatcaagtag

SEQ ID NO: 235578 - DNA, 1269 bp, synthetic construct
  misc_feature 1..1269: note = Description of Artificial Sequence: Synthetic coding sequence
  source 1..1269: mol_type = other DNA
atgatgaatccgagagcaaagcgagatttttatctggcagctcctgatctcttggatcccaaaagcgcagctcagaatagcaaacccagactgtccttttctacaaagcccacagtgttagcctccagggtggaaagtgacacaactatcaacgtgatgaaatggaaaaccgtgtctacaatttttttagtcgtggtgttgtacctgattattggagccacagtgttcaaggccctggagcagccgcacgagatttcccagagaactaccattgtgatccaaaagcagaccttcattagccagcactcttgcgtaaattcgaccgagcttgacgagctgattcagcaaattgtggcagctatcaatgctggaatcatacccttgggtaacacttcaaaccaaatcagtcattgggacttgggtagctcttttttcttcgcaggcaccgtgataaccacaattgggttcgggaatatctccccacgcactgaaggaggcaagatcttttgtatcatttacgcccttctcggtatcccactgtttggtttccttctggccggtgtcggtgaccagctagggaccatctttgggaagggtattgccaaagtggaggatacattcatcaagtggaatgtatcccaaacaaaaattcgaatcatcagcacgataatcttcattctcttcggatgcgtgctctttgtggctctgcctgctataattttcaagcatatcgagggatggtccgcccttgatgctatatattttgtggtcatcacactgaccaccatcggattcggcgactatgtagcagggggaagcgatatagaatacctggatttctacaaaccagtggtgtggttctggatcctggtcggactggcttattttgcggctgttctgagtatgattggcgattggctcagagtgatctctaaaaagacaaaagaagaagttggcgagttcagggcccatgccgcagaatggacagcgaatgttacagctgaattcaaagagacaagaaggcgtctctccgtggaaatctatgacaaatttcagagggctacgtcgatcaagcgaaagttgtccgctgaactggctggcaatcataaccaggagttaacgccatgcagaagaactctgtctgtcaatcacctcacttctgagagggacgtgttgcccccattactcaagacggagtccatttatctgaacggattaactccccactgtgctggcgaagagatcgctgtgatcgagaacattaagtag

SEQ ID NO: 235579 - DNA, 1281 bp, synthetic construct
  misc_feature 1..1281: note = Description of Artificial Sequence: Synthetic coding sequence
  source 1..1281: mol_type = other DNA
atgctgccatcggcctctcgcgaacgacctggctatcgggcaggagtcgcggcaccagaccttctcgaccctaagtctgccgctcaaaacagcaagcctagattaagcttttctactaaacctacagtgctcgctagccgcgtcgaaagtgacactaccatcaacgttatgaagtggaaaacggtgtcaacaattttcctggtggtggtgctgtatttgatcattggtgcgacagtattcaaggccctggagcagccacacgagatttcgcagcgaactaccatcgtgatccagaaacagacttttatttctcaacactcttgcgtgaacagcaccgagctcgatgagctcatacagcaaatcgtggccgcaattaacgccggaatcatccctcttggaaacaccagtaatcaaatctcccactgggacctgggcagttccttcttctttgccggaactgtgattaccacgatagggtttggaaatatctcacccagaacggagggtggcaaaatattttgcataatttatgcactgctcggtatcccattgttcggttttctgctggcaggggtaggagatcagctcggtactattttcgggaaaggcatcgctaaagtcgaagacacattcataaaatggaatgtcagtcagaccaagatccggatcattagcactattatatttatcctgttcgggtgcgttctgttcgtggcacttccagcaatcatcttcaagcacatagaaggttggtccgccctcgatgccatatacttcgttgtgatcaccttgaccacaataggttttggcgactacgtagcgggtgggtccgatatcgagtacctcgatttttataaaccagttgtgtggttctggattcttgttgggttggcctactttgcagccgtgctgtccatgataggtgactggctaagagtaatttcgaaaaagactaaggaggaggttggggaattcagagctcacgccgcagaatggactgccaatgtcacagccgagttcaaggaaacaagacggagattgtctgtcgagatatacgataagttccagcgcgcaacctcaatcaaacggaaactgtcagccgagctcgccggaaatcataaccaggaattgacaccctgccggaggacactctccgtgaaccacctcacctcagaacgtgatgtactgccccctctattgaaaacggaatcaatctatctgaatgggttgactccacattgtgccggtgaagagatcgccgtcatcgaaaatattaagtag

SEQ ID NO: 235580 - DNA, 687 bp, synthetic construct
  misc_feature 1..687: note = Description of Artificial Sequence: Synthetic coding sequence
  source 1..687: mol_type = other DNA
atgatgaatccacgtgctaagcgcgatttctacctggcagcacccgatttgttggatcctaaaagcgcggctcagaattcaaaaccacggttgagcttcagcacgaaacccacagtcctggcaagcagagtcgagtctgacaccaccatcaacgtcatgaaatggaagacagtgtcgacaatctttctggtcgtcgtactgtacttaattatcggggctactgtgtttaaggcccttgaacagccacacgaaatcagtcagagaaccaccatagttatccaaaaacaaactttcatctcacaacactcatgtgtcaactcaaccgagctggacgagctgattcagcagattgtcgcagctatcaacgctggaatcatccccctcggtaatacatctaatcagatttcccattgggacctgggcagttcattctttttcgcagggacagtgattacgacgattggtttcggcaacatctcccccaggaccgaaggaggcaaaattttctgtattatctatgcactcctaggaattccccttttcggattcctcctggcaggggtcggggatcaactggggacaatatttggaaaagggatagctaaggtggaagatactttcatcgtagaccccattctgaacatttggacaagcatcagtctgagttgtggttcaggatccctgtag

SEQ ID NO: 235581 - DNA, 471 bp, synthetic construct
  misc_feature 1..471: note = Description of Artificial Sequence: Synthetic coding sequence
  source 1..471: mol_type = other DNA
atgctgccctccgcaagcagagagaggcccggatatcgtgccggtgtcgcagccccagatctcttggaccccaagtccgcggctcaaaactcaaaacccagactgtcattcagtactaagccaactgtcctcgcttcccgggtggagtcagatactaccatcaacgtaatgaaatggaaaacagtttcaactattttccttgtggtcgtgctgtacctcattatcggcgctaccgtcttcaaggcactggagcagcctcatgaaattagccagcgaacaactattgtcatacagaaacaaacatttatcagtcagcatagttgtgtgaattccactgaactcgacgagctcatccaggacctcgaaacaagccatcatgcccagaaagctgctaaatacagcgtgagctccatgccttattgggagttcccgagtttagtcttcagctggctggaactggaaatctcctag

SEQ ID NO: 235582 - DNA, 459 bp, synthetic construct
  misc_feature 1..459: note = Description of Artificial Sequence: Synthetic coding sequence
  source 1..459: mol_type = other DNA
atgatgaaccccagagctaaacgggatttttacctcgctgcccctgaccttctggacccgaagtcagcagctcagaactctaagccaaggctctcattctcgaccaagccaactgtgcttgccagcagagtggaatcagacaccaccattaatgtaatgaagtggaagacagtgagcactatattcctggtggtcgtattgtacctgatcataggcgctactgtgttcaaggcgctggaacagccacacgaaatatctcagagaaccactattgtcattcagaagcagaccttcatttctcaacactcttgcgtcaattctacagaactggatgagcttatccaagaccttgaaacatcacaccatgctcagaaggccgcaaagtattctgtctcgtctatgccctactgggaattcccttccctagtgttttcgtggttggaattggagatttcgtag

SEQ ID NO: 235583 - DNA, 1185 bp, synthetic construct
  misc_feature 1..1185: note = Description of Artificial Sequence: Synthetic coding sequence
  source 1..1185: mol_type = other DNA
atgaagagacagaacgttcgaaccttggccctaatcgtgtgcacgtttacttatctgctcgtcggggctgctgtttttgacgctctcgagagtgagccagaactcatcgagcggcagcggctagagctccgacaacaggagctgagagcacgatacaacctatctcagggcggatatgaagagctggaaagggtcgtgctgcggctgaagccgcataaagccggtgtccagtggcggtttgcaggctcattttattttgctatcacggtgatcaccaccattgggtacgggcatgcggctccctcgaccgacgggggaaaagttttttgtatgttctacgctctgctgggaatccctctcaccctggtcatgtttcagtccctgggggagcggattaataccctagtgcggtaccttctacacagagccaaaaaggggctcggcatgagacgcgctgacgtgagcatggctaatatggtgcttatcggtttcttctcttgtatctcaacattatgtatcggcgcagcagccttcagtcactatgaacattggaccttcttccaggcttattattattgcttcattacactgactacaatcgggtttggagactacgttgcacttcagaaggaccaggctctgcagacacagccgcagtatgtcgccttttccttcgtgtatattctgaccggtctaacagtgataggggcatttctcaaccttgtggtgctgcgatttatgaccatgaatgctgaggacgaaaagagggacgctgaacacagggcactgctcactcgtaacgggcaggcaggcggtggaggaggcggtgggagcgctcacaccactgatacagcttcgtccaccgccgctgctggtggtggtggatttcgcaacgtgtatgctgaagttcttcactttcagtccatgtgcagctgcctttggtataagagtagggaaaaactgcagtattccatccctatgatcattcctcgagatttatctaccagcgacacttgcgtggaacagagccattctagtcccggaggcggaggaaggtactctgacactccaagtaggagatgtctttgctctggggctccacgatcagcgatatcctctgtctccacgggtctgcattcactttccactttccggggactgatgaaaaggcggtcctcggtttag

SEQ ID NO: 235584 - DNA, 816 bp, synthetic construct
  misc_feature 1..816: note = Description of Artificial Sequence: Synthetic coding sequence
  source 1..816: mol_type = other DNA
atgtttcagagcctgggcgagcgtatcaacactctggtgaggtacctgctccaccgggcaaaaaagggactgggtatgcgtcgcgcagatgtttctatggctaatatggtgctgattgggtttttctcatgtatttccacactgtgcataggtgcagctgccttttctcactacgaacactggaccttttttcaggcctactactattgtttcataacattaacaacaatagggttcggcgactatgttgcactgcagaaggatcaggcgctacagactcagccgcaatacgtggcgttctcttttgtgtacatcctgaccggtctgacagtcatcggcgcattcctcaacctcgtggttctgagattcatgacaatgaacgctgaggatgagaagagggacgccgagcacagggccctcttgaccagaaacgggcaggccggtggtgggggagggggaggcagtgctcatactacagacacagcctcttccaccgcggcagctgggggaggcggattccggaacgtttacgcagaagtgctccattttcagagcatgtgcagttgtctgtggtataaaagcagggaaaaactccaatacagtataccaatgataatcccacgcgatctttcaacgagtgacacatgcgtggagcagtctcatagctcccccggaggcggtggaaggtatagcgataccccatctcggaggtgcctttgttcgggggcacccagatctgcaatctcgtcggtaagtactggacttcactccctctcaaccttccggggtttgatgaagcgtcgttctagtgtgtag

SEQ ID NO: 235585 - DNA, 1182 bp, synthetic construct
  misc_feature 1..1182: note = Description of Artificial Sequence: Synthetic coding sequence
  source 1..1182: mol_type = other DNA
atgcggagcacaacacttctagctctcctcgccctggtcttgttgtatctggtctctggggctctcgtgttccgagccctggaacagccccatgaacagcaggcacaaagagaactcggggaagtacgggaaaaattcctgagggcccacccctgtgtgtcagaccaggagctgggacttttaatcaaagaagtcgccgatgccctcggaggcggagctgatccagagacaaatagtacttccaattcttcccactccgcatgggacttggggtctgcgtttttctttagtggtaccatcatcaccaccatcggctacggcaatgtcgccctgaggacagatgccggacgcctgttctgtatcttttacgctctggttggcattcccctgtttggtatactactggccggagtcggcgatcgtcttggctcatcattacggcacgggattgggcatatcgaagccattttcttaaaatggcacgtgcctcccgaattggtgagagtcttgtcggccatgttattccttctgattgggtgcctactgttcgtcctcactcctacattcgtcttctgctatatggaggactggagcaaactggaagctatctacttcgtcattgttactttgaccacagtgggttttggtgactacgttgctggcgcagaccctcgacaggacagtccagcataccagcctttggtgtggttctggatcctccttggcctggcttactttgcctctgtgttgaccactataggaaactggctgagggtggtgtcacgcaggaccagggctgagatggggggactgacagctcaggcggctagttggactgggacagtcaccgccagggtgacccagagagcgggaccggctgctcctcccccagaaaaggaacagccgcttcttcccccacccccttgccccgctcagcctctggggaggccacggtcgcccagcccacctgagaaagctcagcccccttccccccctaccgcttccgcgttggattacccctccgagaatctggcctttatcgatgaatcttctgacacacagagcgagaggggttgtccattgcctcgggcaccccgtggtcgcaggcggccaaaccctcctcgaaaacctgtaaggccaagaggtccgggacgaccccgagacaaaggtgtgccagtgtag

SEQ ID NO: 235586 - DNA, 1182 bp, synthetic construct
  misc_feature 1..1182: note = Description of Artificial Sequence: Synthetic coding sequence
  source 1..1182: mol_type = other DNA
atgaggagcaccacactgttagcactgctggcactcgtgctgctatatctggtttctggggctctggtcttccgcgctctagagcagccccatgagcaacaggcacagcgtgaactgggagaagtgcgcgagaaatttttacgggcacacccatgcgtctccgaccaagagctgggactcctgattaaagaggttgcagacgccctgggcggaggggcagatccagagacaaattccacttccaatagctcacacagcgcctgggatctgggttccgcgttcttcttttccggcacaattattactactattgggtacggcaatgtggcattgagaaccgacgcaggcagacttttctgtatcttttatgcgctcgttgggatcccgctctttggtatcctactcgccggagtgggcgaccggcttggtagctcattaaggcatgggattggacacatagaagctatttttttaaagtggcacgtcccccctgaactggttcgggttttatccgccatgctgttcctactcatcggatgcctgctgtttgtcctgacccccacatttgtgttctgctatatggaggactggagcaagcttgaagctatttactttgttattgtcaccctgaccacagtgggtttcggcgactatgtggccggagccgatccgcgtcaggatagccctgcctaccagcctctcgtctggttttggatactactggggctagcctattttgcatctgtgctcaccaccattggcaattggttacgagtggtatctaggcggacccgcgcagagatgggtggcttaactgcccaagcagcctcttggaccgggactgtaaccgcgagggtaactcagagggccggacctgccgcacccccacctgagaaagaacagcccctgttaccccctcctccatgcccagcccagccgcttggaaggcccaggagcccttccccacctgaaaaggcccagcctccaagtccccctaccgcatctgcgctggactaccctagtgagaatcttgcttttattgatgagtcttccgatacacagagtgagaggggttgtccgcttcccagggcgcctcgtggccgaagacgtcccaatccccctcggaaacctgttcgccctcgtggcccaggacgtccgcgtgacaaaggagtgcctgtctag

SEQ ID NO: 235587 - DNA, 1182 bp, synthetic construct
  misc_feature 1..1182: note = Description of Artificial Sequence: Synthetic coding sequence
  source 1..1182: mol_type = other DNA
atgcggtccaccacgctgttagcccttctggcactcgtgcttctgtatctcgtgtcgggggctctggtgtttagggctctggagcaaccccacgaacagcaggcgcagcgcgagctgggcgaagtacgagagaagttcctgcgcgcacacccttgcgtcagtgaccaggaactgggccttctgatcaaggaggtggctgacgctctgggtggcggtgctgacccagaaactaactctacttccaacagcagtcactcagcttgggatctgggcagtgctttctttttcagcggaacaattattactacaattggttatgggaacgtggccctacgcactgacgccggaaggttattttgcattttctacgcccttgttgggatcccactttttggaattctcctcgccggtgtcggcgaccggctgggttcatccctgcgtcacggaattggtcacatagaggcaatcttcctaaagtggcacgtcccccctgagctggtaagagttctcagtgctatgctgttcttgcttattggctgcctgctgtttgtcctgacacctacgtttgttttttgttacatggaggattggtccaagctggaggcaatctattttgtgattgtcactttaactacagtgggttttggggactacgtggcaggtgcggaccctcgccaggatagccctgcctatcaacctctagtgtggttctggatcttgctcggcctcgcctatttcgccagcgttctgacaacaatcggcaactggctccgcgtggtctctcgtagaacccgggctgaaatggggggattgacagcccaggctgcatcctggacaggcaccgtaacggctcgtgtcacacagagagcgggaccggctgcccctccccctgaaaaagagcagccactgttacctcccccaccttgccccgctcagcctctgggtcgccctcgaagccccagtccacccgaaaaagctcaacccccttctcctcctacggcttccgccctggactatcctagcgagaacctcgcgtttattgatgagtcttccgacacccagagcgaacgagggtgtcctctcccaagggcacccagaggccgacgtcgacccaacccaccaagaaagcccgtacgacctagaggcccaggacgccctcgcgacaaaggggtgcccgtctag

SEQ ID NO: 235588 - DNA, 1257 bp, synthetic construct
  misc_feature 1..1257: note = Description of Artificial Sequence: Synthetic coding sequence
  source 1..1257: mol_type = other DNA
acaaccgctccccaggagccgcctgcccgacccctccaggccggatccggggcagggcctgcacctggtcgggcaatgagatctacaaccctgcttgccctccttgctcttgttctgctgtacctggtatcaggcgcattggtgtttagagccctggagcagcctcacgaacagcaggcacagcgggaacttggggaagtcagggagaaattcctcagggcccatccctgtgtgtcggatcaggaattgggcttgctcattaaagaggtggccgatgcccttggcggaggcgctgatcccgagacaaactccacctccaatagctcccactccgcctgggatctggggagcgcctttttcttctcaggcactatcatcaccaccatcggctatggcaatgtggctcttagaaccgatgctggcaggctgttttgcattttttatgctttggtgggtatcccactcttcggtattctcctggctggcgtgggcgaccgccttggtagcagcctgaggcatggaattggccacatcgaggccatctttctgaagtggcacgtgcctcctgaactggttcgagttctgagcgctatgctgttccttcttatcggttgcttgctcttcgttctgacccctacattcgtgttttgctacatggaagactggtctaaattagaagctatctatttcgtgattgtgaccttaacgactgtcggcttcggggattatgtcgccggtgccgatccccgtcaggattctcccgcatatcaacctctcgtatggttttggattcttcttggcctcgcctacttcgcttccgttctgactactatcggaaactggctaagagtggtgtcaagacgaacccgcgcagaaatgggaggcttaaccgctcaagccgctagctggaccggaacagttacggcacgggtcactcagcgggctggccctgcagcgcctccacctgagaaggagcagccactgttacctccccctccatgccctgctcagcccctaggtcgccctagaagcccatccccgcctgagaaggcccaacctccctccccacccacagcatcagcactggattatccatctgagaaccttgctttcatcgacgagtcgtccgatacacaatctgaacgcggttgccctttgcccagagccccacgaggcagacgcaggcccaatcccccacgaaaaccagtgagacccaggggccctggcagacctcgggataaaggcgtccctgtctag

SEQ ID NO: 235589 - DNA, 1368 bp, synthetic construct
  misc_feature 1..1368: note = Description of Artificial Sequence: Synthetic coding sequence
  source 1..1368: mol_type = other DNA
gtccatgctagcgtgcataccagggtgagagggctgtgggtgccctggagaggccgtcatgcccatggcggtagagggtgtcgcggagtatgtggggaatgtaggtgggtcaccacagcgccacaggaaccccctgccagacccctgcaggctggatccggagctggccctgccccaggcagagccatgagaagcaccacactgctggctctcctggcactcgtactcctgtacttagtcagcggcgctctagtctttcgtgctctggagcagccccatgagcagcaggcacagcgcgaactcggcgaggtccgagagaagtttctgagggcgcacccgtgcgtgtccgatcaggagttaggcctgttaattaaagaggtggctgatgccctgggtggaggagctgatccggaaactaattctacttccaattccagtcattccgcttgggacctggggtccgcattcttcttcagtggcactattattacgaccatcggatatggaaacgtagcactcaggacagacgcgggtcgcctgttctgcatattttatgccttagtgggaatccctctctttggcattctgctggccggtgtaggcgacagactgggttcctctctcagacatggaataggacacattgaagccatcttcttgaaatggcatgtacctccagagttggtcagggtgctgtctgccatgctgttcctgctgattggatgcctcctcttcgtactgaccccaacttttgtgttctgctacatggaagactggtccaagcttgaagcaatatactttgttatcgtgacattgactaccgtcggatttggagactatgttgcaggcgctgaccctaggcaagacagccctgcgtaccagcctctcgtttggttctggatcctgctgggtcttgcatatttcgcttctgttttgactaccattggaaattggctgagagttgtgagcaggcggactcgagcggagatggggggtttaacggcccaggctgcatcatggacaggcactgtgacagccagggtgacgcagagggccggtcccgcagcaccacctccagagaaggaacagcccctcctcccgcctcctccttgtccagcccagccgctggggaggccccgtagtccctcacccccagaaaaggctcagccacccagtccccctacagccagtgcattggattacccttctgaaaacctggccttcattgatgagtcttccgacacccagtccgagcgagggtgccctctgccacgtgctcccagagggaggaggcggcctaatccccctaggaagccagtccgccctcgcggacccggaaggccaagggataaaggcgttcctgtgtag

SEQ ID NO: 235590 - DNA, 1500 bp, synthetic construct
  misc_feature 1..1500: note = Description of Artificial Sequence: Synthetic coding sequence
  source 1..1500: mol_type = other DNA
atggtcgatagaggacctctgcttaccagcgcaattatcttttacctcgctatcggtgctgcaatcttcgaggtgttggaggagccacactggaaagaagctaagaaaaattactacacccaaaagcttcaccttctcaaggagttcccctgccttggacaggagggcctggataagatcctggaggttgtctcagatgcagcgggacagggtgtagctattaccggtaaccagacattcaataactggaactggcctaatgccatgatcttcgctgccactgttatcactacaatcggctacggtaatgtagcgccaaaaacgccggctggtcgactgttctgtgttttctatggcctgttcggcgtccctttatgcctcacctggatcagtgctctgggcaagtttttcggcggtagagccaagcgcttgggccaatttctcacaaagaggggcgtgtcgctgaggaaggcccagatcacatgtaccgtcatctttatagtttggggcgtgctggtacatcttgtaattccccctttcgtcttcatggtaaccgagggatggaactatatcgagggcctgtactactccttcattacaatttcaaccatcggtttcggagacttcgtcgccggagttaatccctccgccaattatcacgccctctatagatacttcgttgagttatggatctatctggggctggcatggttatctctgttcgtgaactggaaggtgtccatgtttgtcgaggtccacaaagctatcaagaaacggaggcggagacgcaaggaatcttttgaatccagcccccactcgaggaaggcactgcaggttaaaggctcaactgcaagtaaagatgtgaatattttctccttcctgtccaagaaagaagagacgtataatgatttgatcaagcagatagggaaaaaggcgatgaaaacgtccggtggtggcgaaactggtcccggaccgggactggggcctcagggaggagggcttccggcactgcccccaagtctggtcccgcttgtggtgtacagcaaaaacagggttccaaccctggaggaagtgtctcagactctccggagcaaggggcacgtcagtagatcccccgatgaggaggcggtggcgagagcccctgaagacagtagtcccgctccggaggtcttcatgaatcagctggatcggattagcgaagagtgtgagccctgggatgctcaagactaccatccacttatcttccaggatgctagcatcacttttgtcaatacagaagcaggcctgagcgatgaggaaactagtaagtcgtcactagaagataatttagccggagaggagtccccacagcaaggcgctgaggccaaagctcctctgaacatgggcgagttcccatcgagcagtgaaagtacatttacctccaccgagtccgagctgtccgtgccatacgaacagctgatgaacgaatacaacaaagcgaattcaccaaagggcacctag

SEQ ID NO: 235591 - DNA, 942 bp, synthetic construct
  misc_feature 1..942: note = Description of Artificial Sequence: Synthetic coding sequence
  source 1..942: mol_type = other DNA
atgcgcagaggggctctgctcgcgggtgctttggctgcatatgccgcttacctggtgctgggggcactgctggtggctcgactggaggggccacacgaggctagattgagggccgaacttgaaaccctgcgagctcaactgttgcagcggagcccttgcgtggcagcacccgcactcgacgcattcgttgagagggtactggccgcaggtcggctaggtcgcgtggtgcttgctaatgctagtggaagcgccaacgcgtcagacccagcctgggatttcgcctctgccctgtttttcgcaagtacactgattacaacggtgggatacggatacaccactcccttgactgatgcagggaaagctttcagtattgcctttgctttgctgggggtgccaacaaccatgttactgctcaccgctagcgcccagagactcagcctactgttaacccacgtccccctgtcatggttaagcatgagatggggatgggacccccgtcgagcggcttgctggcatcttgtggcactcctgggagtggtggtcacagtttgtttcctggttccagctgtaatatttgcccatctagaagaagcctggagttttctagacgctttctacttttgtttcatctcgctgagtactattggattgggggattatgtgccgggtgaagcgcctggtcagccgtaccgggctttatacaaggttttggttactgtctatttattcctcggtcttgtcgccatggtgctggtactgcagaccttccggcacgtgtccgacctgcacggcttgactgaactgatacttctgccccctccctgcccagctagtttcaacgcagatgaagacgacagggtagatatcctgggtccccagccagagtcgcatcaacagctcagtgcgtcctcccatactgactatgccagcatcccaaggtag

SEQ ID NO: 235592 - DNA, 924 bp, synthetic construct
  misc_feature 1..924: note = Description of Artificial Sequence: Synthetic coding sequence
  source 1..924: mol_type = other DNA
atgggaggactccgtccctggtctcgctatggcctgctggtggtcgcacatctactcgcattgggccttggggcagtcgtgtttcaggctcttgagggacctccagcatgccggctgcaggcggaactccgtgcagaactggccgcatttcaggccgagcaccgtgcctgcctgccgccaggcgcattagaggagctgctgggcacagcactggccactcaggcccacggcgtgtccactcttggcaactcttccgaaggtagaacttgggatttgccttctgcactgcttttcgctgcatccattctaacaacgacgggatacgggcatatggccccactgagtcccggtgggaaggcattttgtatggtctatgccgcactgggtttgcccgcatcactcgcgctggtggctactctcagacattgtttgctcccggtgcttagtaggcctcgggcttgggtagcggtgcactggcagctttcaccagccagggctgccctgttgcaagccgtggcgctggggttgctagtagcaagtagttttgtgctgctcccagccttggttttgtggggcctccagggggactgttccctgttgggtgctgtctacttctgcttctcttcccttagtactattggtctcgaggacctcttaccgggtcgcggtcgctcactccatcccgtcatttaccatttggggcaattggcactgttaggttacctcctgctcggactgctggcgatgctactggcagtggagaccttctctgaattgccccaggttagagcaatgggcaagttctttagaccttcagggccagtcaccgccgaggaccagggaggtattctaggccaggacgagctcgctttatcaaccttacccccagccgctcccgcttccggccaggctcccgcttgttag

SEQ ID NO: 235593 - DNA, 759 bp, synthetic construct
  misc_feature 1..759: note = Description of Artificial Sequence: Synthetic coding sequence
  source 1..759: mol_type = other DNA
atggggggtctgcgcccttggagcaggtatggacttcttgtcgtggcgcatctgctcgcccttggcctgggcgctgtggtcttccaagctcttgagggacctccagcttgccggcttcaggcagagctccgcgcagagctggccgcttttcaggcagagcaccgagcatgcctgccccctggcgctctggaggaattgcttggtacagcactggctacacaggcccacggcgtgtctacgctcggcaattccagtgaaggtcgaacctgggacctcccgagcgctttgttgtttgcagccagcatcttgacaactacaggatatgggcatatggctccactctcccctggcggaaaggcattttgcatggtttacgcggcactcggactacctgcctcactggccctcgttgctacactgaggcattgcctcctccctgtcctttcccggcctcgggcatgggtggctgtccactggcaattgtcacctgctcgggctgccctgttgcaggctgtggctttgggcttgctcgtggctagctcattcgtgctgctgcctgcactggtgctttggggccttcagggagactgctctctgctcggagccgtttatttttgttttagctctttatctaccattggacttgaagacctccttccagggcgtgggcgaagtctgcatcctgtaatctaccatctggggcagctcgccctcctaggcggtggtacttcccttcagggcaccgcctgggagggttag

SEQ ID NO: 235594 - DNA, 774 bp, synthetic construct
  misc_feature 1..774: note = Description of Artificial Sequence: Synthetic coding sequence
  source 1..774: mol_type = other DNA
atgggtggtctgaggccttggagtcgatatggcctgcttgtcgtggcacatctgctcgccttagggcttggtgccgttgtgttccaggccctggaaggccctcccgcatgtagactgcaggccgagcttcgggctgagctggccgcttttcaagctgagcatcgcgcttgtttgccccctggcgcactggaagagcttctaggaaccgctttagccactcaggcccatggcgtgagtaccttgggcaattcgtctgagggcaggacttgggatcttcctagcgccctgctgttcgccgcatcgatcctgacaaccactggatacggccatatggctccgctctcacccggaggaaaagcattttgtatggtttacgctgctttaggtttgccagcctccctggccctagttgctacactcaggcactgcctgttgcctgtcctctccagaccacgagcttgggttgccgtgcattggcagctcagtccggctagagccgctctgctccaggccgtggctctcggcctgctggtggcctccagcttcgtcctgctaccggctctggtcctgtggggacttcagggggattgctcacttctcggagcagtttacttttgctttagctcactatcgaccatcggacttgaagatctcctgccaggccgaggcagaagtcttcatcccgtcatttaccatctgggtcaactagcattgttgggcaaaagcagccacctcaccgcatgcggcggtcgcggaaagagatcactcgactag

SEQ ID NO: 235595 - DNA, 759 bp, synthetic construct
  misc_feature 1..759: note = Description of Artificial Sequence: Synthetic coding sequence
  source 1..759: mol_type = other DNA
atgggagggctgcggccatggtcacggtatggcctcttggtggttgcccaccttctagccctaggattaggtgcggtggtattccaagccctggaaggccctccggcttgtaggctgcaagctgaacttagagccgaactggccgcatttcaggctgaacatcgagcctgcctgcctcccggagccctggaagagctactcggaaccgccctggccacccaagcgcatggtgtgagcactctcgggaacagctcggagggaagaacatgggatctgccctctgctcttctcttcgcggcatcgatattaacgacgacaggctatggtcatatggcccctctctctccaggcggtaaggccttctgcatggtgtacgcggcactgggtctgcccgcttcactagccctggtggctactttaaggcattgtttgctgcctgttctcagccgccctcgggcatgggtggctgtacactggcagttatcccccgcaagagccgctctgcttcaggcagtggctctgggactgctggtggctagctcattcgtgttattgcccgctctggtgctttggggtctccaaggggactgctctctgctgggggctgtttacttttgcttcagctcgctgtctaccatcgggctcgaagatctcttacccggtaggggccgtagtcttcatcctgtcatttatcacctgggtcaactcgctctcctgggaggcggtacctcactccagggaactgcttgggaagggtag

SEQ ID NO: 235596 - DNA, 87 bp, synthetic construct
  misc_feature 1..87: note = Description of Artificial Sequence: Synthetic coding sequence
  source 1..87: mol_type = other DNA
tgactgcatcccgtgatttaccatctgggccaattagcgctgctgggaggcggaacctctttgcaggggacagcctgggaagggtag

SEQ ID NO: 235597 - DNA, 1125 bp, synthetic construct
  misc_feature 1..1125: note = Description of Artificial Sequence: Synthetic coding sequence
  source 1..1125: mol_type = other DNA
atgaagaggcagaatgttcggacactttccttgattgtatgcacttttacctacctgcttgtgggggcagctgtgtttgacgcgttagagtcagaccatgaaatgagggaggaggaaaagctaaaggctgaggagattaggattaaagggaaatataacatcagtagcgaggattacagacagctcgagcttgttattttgcagtctgagcctcatcgggcaggtgtgcagtggaagtttgcgggaagtttctactttgccattaccgttatcacaaccattggatacggacatgctgcccctgggacagacgcaggcaaggccttttgtatgttctacgccgtgctcggcatcccactcaccttagtcatgtttcagtcactcggagagagaatgaacacgttcgtgcgatatttactgaagaggatcaagaagtgctgtgggatgaggaatacggatgtgagcatggagaacatggttactgtgggattcttcagctgtatgggaactctgtgcatcggggctgccgcattctcccagtgcgaagaatggtcttttttccacgcctattactattgctttataacattgaccacaattggctttggcgattatgtcgctttgcagactaagggggctttgcagaaaaaacccctctatgtggcgttctccttcatgtatattctcgttggcttaacggtgatcggagcttttttgaatctagttgtgctgagatttctcacgatgaacagcgaagacgagagaagggatgctgaggaaagagcaagtttggcgggtaatcgaaacagcatggtcatccatatcccagaggagcccaggccatcccggcctagatacaaagctgatgtgcctgatctccaaagtgtgtgcagctgcacatgctatcgaagccaggactatggtgggcgttccgtggcgcctcagaacagcttctccgcgaagttggctccgcactattttcactcaatcagttacaagatcgaagaaatttctccgagcacactgaaaaactcactctttcccagccccatcagctcgatctccccaggactgcacagtttcactgatcatcaaagactaatgaaacgcaggaaatccgtgtag

SEQ ID NO: 235598 - DNA, 1125 bp, synthetic construct
  misc_feature 1..1125: note = Description of Artificial Sequence: Synthetic coding sequence
  source 1..1125: mol_type = other DNA
atgaaaagacagaacgtgcgcaccctttcacttatagtatgcacgtttacctatctgctcgtcggggctgccgtatttgacgctttagagtccgaccatgagatgcgggaagaggagaaactcaaggccgaagagattaggataaagggcaagtataacatctccagtgaggactatcgccagctggagctggtcatcctccaatctgaacctcatcgagctggcgtacaatggaagttcgcaggttctttctactttgctatcacagtgatcacgaccattgggtacgggcatgctgcaccaggtacagacgcaggcaaggccttctgcatgttctatgcggtgctcgggattcccctaacactagtgatgttccagtcacttggcgaacggatgaatacttttgttaggtacctgctgaaaagaatcaagaagtgctgtggcatgagaaatacagatgtgagcatggaaaacatggtgaccgtggggtttttttcatgcatggggaccctgtgcatcggtgcagcggcttttagccaatgcgaagagtggtcatttttccacgcctattactattgtttcatcactctgaccaccatcggcttcggggactatgtcgcccttcaaaccaaaggagccttgcaaaagaaacccctgtacgtggcattctccttcatgtatatactggtgggacttaccgtgataggcgcttttctcaatttggtggtgctgcgcttcctgacgatgaatagtgaggatgaaagacgggatgcagaagagagggcctctctggcaggaaatcgcaacagcatggttattcacattcctgaggagcctaggccgagccggccacggtataaggcggatgttcctgacctgcagtcggtttgtagttgcacttgttatagaagccaggactatggaggtagatctgtggctccccagaattccttttccgctaaacttgccccacattattttcattctatttcctacaaaatcgaagaaattagcccctcgaccctcaagaattcactgttcccttcccctatcagctcaattagccccggactgcacagtttcaccgatcatcaaagactgatgaagagacgtaagagtgtctag

SEQ ID NO: 235599 - DNA, 1125 bp, synthetic construct
  misc_feature 1..1125: note = Description of Artificial Sequence: Synthetic coding sequence
  source 1..1125: mol_type = other DNA
atgaagcggcagaacgtaagaaccctgtcgctgatcgtttgtacttttacgtatctactggtaggtgcagctgtgttcgacgctctcgaatctgatcacgaaatgagggaggaggagaagttaaaagctgaggagatcagaatcaagggcaagtacaatatcagttccgaggactaccgccagctcgagcttgtgatcttgcagagcgaacctcaccgcgctggcgtgcagtggaaattcgccggaagtttttattttgccattacagtgattactactataggatacggccacgctgccccaggcactgacgctggcaaagcgttttgcatgttttacgcagttctgggcatccccctgaccctggtcatgttccagtctctcggtgaacggatgaacactttcgtgagatacctcctcaaacgcatcaaaaagtgctgcggcatgaggaatacagacgtgagcatggaaaatatggttactgttggttttttcagctgcatggggacactgtgtatcggcgcagccgctttctcccagtgcgaggagtggtccttttttcatgcttattactattgtttcattactctgactactataggctttggagactatgtcgcccttcagaccaaaggtgcactccagaagaagccactgtacgttgctttctcttttatgtatatcctggtgggtttaacagttattggtgcattcctcaacctggttgtgctgcgatttctgaccatgaactctgaagacgaaaggcgggacgcggaagaaagggctagcctcgccggaaaccgcaattccatggttatccacatccccgaagaacccagaccctcacggccacgctataaagctgatgtgcctgacctgcaatcagtatgtagttgtacttgttaccgatctcaggattacggaggcagatctgtcgcccctcagaattccttcagcgctaaactcgcaccacactactttcacagcatctcctataaaattgaagagatctccccgtcgactctgaagaactctctcttccctagccccatctccagtatctctcctgggctgcacagctttacagaccatcagcgactgatgaagaggcgaaaatccgtgtag

SEQ ID NO: 235600 - DNA, 3693 bp, synthetic construct
  misc_feature 1..3693: note = Description of Artificial Sequence: Synthetic coding sequence
  source 1..3693: mol_type = other DNA
atggcacgcgcaaaactgccaagatctccctccgagggaaaagctggtcctggaggcgctcccgcaggcgctgccgcaccagaagaaccacatggcctgtctcccctgttgccagctcgcggtggtggctctgtggggtctgacgtgggccagcggctgccagtcgaagacttttccctggatagttcacttagccaggtgcaggtcgaattttatgtgaatgaaaatacttttaaggagagactgaagcttttctttattaagaaccagaggtcttcccttcggatacgactgtttaacttttcactgaagttactcacatgccttttatacatagttcgggtcctgttggatgatccagccctgggtatcggctgctggggttgtccaaaacaaaattattcctttaacgacagcagctctgaaatcaattgggcacccatcctgtgggtggaaagaaaaatgaccctctgggcaatccaggtgatagtggcaatcatctcctttctagagaccatgctgctgatatatttaagctacaaaggcaatatttgggaacagatctttcgtgtttcgtttgtactagagatgataaatacccttccttttattatcacaattttctggcctccactgaggaacttattcattcccgttttcctgaattgctggctcgcaaaacatgccctggaaaacatgattaacgattttcacagagccatactgcgcacgcaatcagccatgttcaaccaggtgctcatcttattctgcacacttctgtgccttgtcttcactggaacgtgtggcatacagcacctagagcgtgctggcgagaatctgtccttactcacttccttttatttctgcatagtcactttctccacagtcgggtatggagatgtgacgcccaaaatatggcctagtcaattgctcgtggtgattatgatctgtgtggcactggtagtgctgcccctgcaattcgaagaattagtctacctgtggatggagcggcagaagtctggcggaaactactctagacacagagcgcagaccgaaaaacacgtggtactgtgtgtttcttctttgaagatcgatttgctgatggacttcttgaatgagttttacgcacatccacggctccaggattactatgttgtgatactgtgcccaaccgaaatggatgtccaagtgagaagggttctccagattcccctctggagccaaagggtgatctacctacaagggtctgctcttaaggaccaggacctaatgcgagccaaaatggacaatggcgaagcatgtttcatcttaagttctcgcaatgaggtggaccggactgcggctgatcaccaaaccatcctaagagcctgggctgtcaaggattttgcaccgaactgtccgctgtatgtccagatactcaaaccagagaacaagtttcatgtgaagtttgctgatcacgtagtctgtgaagaggaatgtaagtatgccatgctggcactcaactgcatctgccccgctacaagtacgctgatcacattactagtccatacttcgagagggcaagaaggccaagaatccccggagcaatggcagcgaatgtatgggagatgctccggaaacgaggtgtatcacattaggatgggagatagtaagttcttcagagagtatgaaggcaagtcatttacttacgctgcgttccacgctcacaaaaagtatggtgtgtgccttatcggcttaaaaagggaggacaataagtctatcctgctgaatccaggcccacgccatatactggccgcttccgatacttgcttctatatcaatatcacaaaggaggaaaactccgcatttattttcaaacaggaggagaaacggaagaaacgagccttctctgggcaggggttgcatgagggaccagccagattgcctgtacattccatcatagcgtccatgggcaccgtcgcgatggacctgcaaggaaccgaacatagacctacccagtctggtggcggtggtggagggtccaaattggcactgcccacggagaatggcagtggatccaggcggccttcgattgcgcctgtactggaacttgctgattcaagtgccttattgccctgcgacttactaagtgaccagtccgaagacgaagtaaccccaagtgacgacgagggactgagtgtcgttgaatacgttaagggttacccgccaaacagcccatacatcggcagctcccctacgctctgccatctgctccccgtgaaggctcccttctgctgtttacggctcgacaaagggtgcaaacacaattcttacgaggacgcaaaagcatacggcttcaagaataagctaatcattgtgagtgcagagactgcaggcaacgggttgtacaacttcatcgtgccgttgagagcttattatcgctccagaaaggagctgaaccccatcgtgctcctgcttgacaacaaaccggaccatcattttcttgaagcgatctgttgttttccaatggtctactatatggaggggtcagtggataatttagatagcctgcttcaatgtggcatcatctatgctgataacctcgttgtagtcgataaggaatccactatgtcggctgaagaggactacatggctgatgccaaaaccattgtgaatgtgcagacaatgttccgcttgttcccaagtctgagtataaccaccgagcttactcatccgtcaaacatgcgttttatgcaatttcgggctaaggattcttactcgctggcattgtctaaactggagaagcgggaacgcgagaacggctctaacctcgcattcatgtttagacttcctttcgccgctggacgtgtcttcagcatctccatgctggacaccctcctgtaccagagtttcgtgaaggactacatgatcactatcacccggctgctgctggggctggataccacgccaggctctggatatttgtgcgcaatgaagatcactgaaggtgatctgtggatccggacatatgggagactgtttcagaagctgtgtagttcaagcgccgaaatccccatcgggatttatcggaccgagtcccatgtatttagtacttccgaaagtcagatcagcgtcaacgtcgaagactgcgaggacacaagggaagttaaaggcccttggggcagccgagccggaaccggtggatcaagtcagggacgccataccggagggggagacccagcagagcaccctctcttgcgccgaaagagcttacagtgggctagacggctctcccggaaggcacccaagcaggccggtagagcggcagccgcagaatggattagccaacagcgattgagtctttacaggcgttcagaacgccaggaactttccgagttggtgaagaatagaatgaaacacttggggttacctacaacagggtacgaagatgtggctaacctgacagcatcagatgtaatgaaccgggtgaacctgggctacctgcaggatgagatgaacgaccaccagaatacattgagttacgtgctgattaatccccctcccgacacaaggctggagcctagtgatatcgtgtatctgattcgtagcgatccactggcgcatgttgcctcttcttctcagtcccggaagagcagttgtagtcacaagttgagctcctgcaacccagagacccgagatgagacacaactatag

SEQ ID NO: 235601 - DNA, 3771 bp, synthetic construct
  misc_feature 1..3771: note = Description of Artificial Sequence: Synthetic coding sequence
  source 1..3771: mol_type = other DNA
atgcccctgcctgatggcgcaagaacccccggaggagtgtgtcgggaagcacggggtggcggttataccaacagaacgtttgaattcgatgatggacagtgcgcgccaagacggccatgtgctggggacggagccctcctagacaccgccggattcaagatgagtgacttagacagcgaagtgctacctcttcctcctcggtaccggtttcgtgacctattactgggcgaccccagtttccagaatgatgacagggtgcaagtcgagttttacgttaacgagaataccttcaaggagcgccttaaactgttcttcattaaaaatcagaggtcctctctgagaattaggctgttcaacttcagcctgaaactgctgacatgtctgctatacatagtgcgagtgttgcttgacgacccagcgctggggataggctgttggggatgcccaaaacagaactactcctttaatgactccagttcagagattaactgggccccaattctatgggtggagagaaagatgaccctatgggcaattcaggtgatcgtcgcaatcatcagctttctggaaaccatgttactcatctacctctcctataagggcaatatatgggaacagattttccgcgtgtcattcgtacttgagatgatcaacacgttacccttcattatcacaattttttggccacccctgagaaacctgtttattccagtcttcttaaactgttggctcgcaaagcacgccctggagaacatgattaatgattttcatcgggctattttacgcacgcaatccgctatgttcaatcaggtactgattctgttttgcactcttctctgtcttgtctttactggaacatgcgggattcagcaccttgaaagagccggtgaaaatttatctctgttaacctccttctacttctgcatcgtgaccttttctacagtggggtacggggacgtgactcccaagatttggccctcccagctcttggtggtgatcatgatttgcgtcgctctggtggtgctccctctgcagtttgaagagctcgtgtatttatggatggagcgacagaagtctggaggcaactactcccgacaccgagcacaaacagaaaagcacgtggtcctgtgtgtgagcagcttgaaaatcgatcttttgatggattttctgaatgagttctacgcccatccacgtctgcaggattactatgtggtcattttatgccccacagagatggatgttcaggttagaagagtgctccagatccccctgtggagccagcgcgtcatatacctgcagggtagcgcccttaaagaccaggatcttatgagggcaaagatggacaacggagaggcatgcttcattctgtcttcaagaaacgaagtggatcggaccgcagcggaccatcagaccatccttagagcctgggcagtgaaggactttgcccctaactgccccctgtacgtgcagatcttaaagcccgagaacaaattccacgtgaaattcgcagatcacgtcgtgtgtgaggaagaatgcaagtatgctatgctggcccttaactgtatctgccccgctactagcacactcataaccctccttgtgcatactagcagaggtcaagaggggcaggaaagtcctgagcagtggcagcggatgtacggtaggtgctccggaaacgaagtgtatcatattcgcatgggtgacagtaagttcttccgagaatacgagggaaagagctttacttatgctgctttccatgctcacaaaaagtacggtgtgtgtctgattgggctcaagcgcgaggacaataaaagtatcctgttgaatccaggccctcggcacatcctggcggcatctgatacctgtttctacatcaacataactaaagaagaaaacagcgcattcatcttcaaacaggaggagaagcggaagaaacgagccttttctgggcagggcctgcatgagggcccagcaaggctgccagtgcattcaatcattgccagcatgggcactgtagctatggaccttcaggggaccgaacaccgtccaacacagagcggcggaggcggaggcggttctaagctcgccttgccgaccgagaacggttcaggctccaggagaccttccattgcgcctgtcctcgagcttgccgactcctctgccttgcttccttgcgaccttctgagcgaccagtcagaggacgaggtgacccccagtgatgacgagggattgtctgtcgtagaatacgtgaagggataccccccaaactctccgtacattggctcctcccccaccctttgccatcttctgccagtgaaagccccattttgttgtctgagacttgacaagggctgcaagcataactcttacgaagatgctaaggcttatgggttcaaaaataagttgattatagtgtcagcagagactgctggaaatgggctgtataactttattgtcccactccgggcttactaccggtctaggaaagaactgaacccgattgtgttactgctggacaacaaacctgaccatcatttcctggaggccatatgttgttttccaatggtttattatatggagggaagcgtcgacaatttagactccctgctgcagtgtggtataatctatgcggataacttggttgtggttgataaagagtctaccatgtcagccgaggaggactacatggccgatgctaaaaccattgtcaatgtacaaacaatgtttcgtctttttccctctctcagtatcaccaccgagcttacccacccctcaaatatgcgctttatgcaattccgagctaaggattcgtacagtctggccttgagcaaacttgagaaacgagagagggaaaatggcagtaacttagcctttatgttcagactcccatttgccgctggcagagtattcagtattagtatgcttgacacacttctataccagtcctttgtgaaggattatatgatcacgataactcggcttctcctgggattggacactactcctggatccggctatctgtgtgcgatgaagatcacagagggagacctgtggatccgcacatatgggagacttttccagaagctgtgttcttccagcgctgaaatcccgatcggaatttatcgcacggaatcccatgtctttagcacctctgagccgcacgacttgagagctcagtctcagatttcggtcaacgttgaggattgtgaagatactcgcgaggtaaagggcccttggggctcgcgggcaggcacgggtgggagttcccagggaaggcatacaggcggaggtgacccagcagagcatccccttctgagacggaagagcttgcagtgggcacggagactttctcggaaagctccaaaacaagccggacgggcagccgcagctgagtggatctctcagcagcgcctgagtctgtataggcgatccgaacgtcaggaacttagcgaactggtgaagaacaggatgaaacatttggggctgccgacaacaggctatgaggatgtggcaaacctgaccgcctccgatgttatgaaccgcgtcaatcttgggtacctgcaggacgaaatgaacgaccaccagaataccttaagttacgttctgatcaatccccctcctgacacgaggctggagccctccgatatcgtgtatctgattagatcagaccccctcgcgcatgtggcttcttcgtcccagtctaggaagagctcctgctcgcacaagcttagctcatgtaaccccgaaacccgagacgagacgcagctttag

SEQ ID NO: 235602 - DNA, 3708 bp, synthetic construct
  misc_feature 1..3708: note = Description of Artificial Sequence: Synthetic coding sequence
  source 1..3708: mol_type = other DNA
atgcctctgcccgacggcgcaaggactccgggtggggtgtgcagggaggctcgaggcggaggctacactaatagaacattcgagtttgacgatgggcagtgtgccccacgaagaccttgcgcaggagacggggctcttttggacacagcaggattcaaaatgtcagatttggattctgaggtgctgcctctccccccaagataccgcttccgcgacttgctgctgggggacccaagcttccagaatgacgacagggtgcaggttgaattttacgtcaacgaaaataccttcaaagaacgccttaaactcttcttcattaagaatcagaggtcctccttacgtatccggctgttcaacttttcgttgaaactgctaacctgtctcctgtatatcgtccgggtgctgctggacgaccctgcccttggcatagggtgctggggatgcccaaagcagaattacagctttaatgattccagcagtgaaatcaactgggcacctattctgtgggtagagagaaagatgacgctgtgggcaatacaggtgattgtagcaattattagtttcctggaaactatgctgctgatttacctttcttataaaggtaacatctgggagcaaatattcagagtgtcttttgtgttggagatgattaatacactgccctttatcatcacgatcttctggccgccactgcggaacctgttcattcccgtgttccttaattgttggctggcgaaacatgccctggagaatatgatcaatgactttcaccgtgcaatactgagaacccaatctgctatgtttaaccaggtactcatcctgttttgcacactgctctgccttgtattcacgggcacgtgcgggatccagcacttggagagagccggagaaaacctatcactgctgaccagcttttatttttgtatcgtgacattctccaccgtgggctacggtgatgtcactccgaaaatatggcccagccagctgctagtggttatcatgatctgcgttgccttggttgtcttacctctccagttcgaagaactggtgtacctgtggatggaacgacagaaatccgggggaaactattctcggcatcgggctcagacagagaagcacgtggtgctctgcgtctcttcactgaaaatcgatctgctgatggatttcctgaacgaattctatgcacatccgaggctacaggactactacgtcgtcattttgtgccctacagaaatggacgtgcaggtaagaagagtcttgcagatcccactatggagtcagagggtcatctaccttcaaggatccgccctaaaagaccaggacttaatgcgggctaaaatggataacggggaagcctgcttcatcctttctagcaggaacgaagttgatcgtaccgcagccgaccaccagactatcttacgtgcatgggctgtgaaggactttgctcctaattgtccactctatgtgcaaatcctgaaacctgaaaacaagttccacgtaaaattcgccgatcacgtcgtttgcgaagaagagtgtaagtatgccatgttagctctcaattgcatttgcccagccacttccacgttaatcacactgttggtacacaccagtcgaggccaagagggtcaagagagtcccgaacagtggcagaggatgtatggacggtgcagcggaaatgaggtctaccatatccgtatgggagacagcaagttctttagggaatatgagggcaagagcttcacttacgccgcttttcacgcccataaaaagtacggagtttgtctgattgggttgaagagggaggataataagagcatattgttaaaccctggacctaggcacatcctagctgcttctgatacttgcttctatataaatatcactaaggaggagaattctgccttcatattcaaacaggaggagaagcgaaaaaaaagagccttcagtgggcagggcctccacgaggggcctgcaaggctgcctgttcattccattatcgccagcatgggaacagttgctatggatctgcagggaactgaacacagacccacacaaagcggtgggggaggtggtggaagcaagttagcgcttcctacagaaaacggctcaggtagtcgtagaccctcaatcgctcctgtgctcgaactggccgactcttccgcgctgttgccctgcgatctactcagcgaccagtcagaggatgaagtgacaccgagcgacgatgaaggacttagtgtagtggagtacgtcaagggatacccccctaattccccgtatatagggtcttcacctaccctgtgccatctcttgccagtgaaggctcccttctgttgcctcaggcttgataagggttgtaagcataattcttacgaagacgcgaaggcttacgggtttaaaaacaagctcattatcgtgagcgctgagacggctggcaatggtctatacaatttcattgttcccctcagggcctattatagatctagaaaggagttgaacccgatagtcttactacttgataacaagcccgaccatcacttcctcgaagcaatatgctgtttccccatggtttactacatggaggggagcgtggacaatctggattcactactccagtgcggcatcatttacgctgacaacctagtggtggttgataaggagtcaaccatgagcgccgaggaagattacatggccgatgcgaaaactattgtgaatgtgcagaccatgttcagactctttccgagcttgtccatcactacagagttaacccacccctctaatatgcgattcatgcagtttagggccaaggactcctatagcctcgcactgagtaagcttgagaagagagaacgcgaaaatggctccaatctagcatttatgttcaggctccctttcgccgcagggagggtcttctctatctcaatgcttgacacactcctgtaccagtccttcgtaaaggactatatgataactattacccgcttgctgctggggctggatactacccctggatccggctacctgtgtgcgatgaagatcactgagggcgacctgtggatccgaacctatggtagactgtttcagaaactatgctcatcctctgcagaaattcccatcggcatttacagaactgagtcccacgtctttagtacatctgagccgcacgatctgagagcccagtcgcagatttccgtaaatgtcgaggattgcgaggacactcgcgaggtcaaaggcccttgggggagtagggcaggtaccggcggatctagccagggtagacacaccggcggaggggatcctgctgaacatcctctgctgagaaggaagagcctgcagtgggcgcgacgcctaagcaggaaggcccctaagcaggctggtcgcgctgccgctgctgagtggattagccagcagcgtttaagtctgtatcgaagaagcgaaaggcaggaactgtccgaactagtgaagaaccggatgaagcacttggggcttccaaccacggggtacgatgaaatgaacgatcatcagaacacactgagttacgttctcatcaacccacctccagatacgcggctagagccatcagacattgtgtatctaatccgtagtgaccctcttgctcacgtggcttctagcagtcagtcccggaaatcgtcctgctctcacaaactctcttcttgcaaccccgagacccgcgatgagacccagctgtag

SEQ ID NO: 235603 - DNA, 3408 bp, synthetic construct
  misc_feature 1..3408: note = Description of Artificial Sequence: Synthetic coding sequence
  source 1..3408: mol_type = other DNA
atggttgacttggagtccgaggtgccgcctttacctccaaggtacagattccgagatctcctccttggcgatcaggggtggcagaacgatgatagggtccaggtcgagttctatatgaatgagaatacctttaaggagaggctcaagcttttttttataaagaatcagcgttcttccttgcgcattagactcttcaatttcagtctgaaactgctgagttgcctcctgtatattatccgagttcttctcgaaaacccatctcagggaaatgaatggtcccacatcttttgggtgaaccgcagtctacctctgtggggactgcaggtgagcgtggccctgatctctctcttcgaaaccattttactgggttatctttcgtataaaggcaacatctgggagcagatattacgcataccattcattttggagatcatcaatgccgtacctttcattatttctattttctggcctagtctcagaaacctgtttgtgcccgtcttcctgaattgctggctggcgaagcacgcgctggaaaatatgattaacgacttgcatcgtgcaatccaacggacccagtctgctatgttcaaccaggtgctgatacttatcagcacccttttatgcctcattttcacctgcatctgcggaatacagcacctggaaaggatcggcaagaagctgaacctgtttgatagcctttacttttgtatcgtgacattcagcacagtcgggttcggggatgtgactcctgaaacttggtccagtaagctcttcgtggtagcgatgatttgtgtagccttagtggtgttaccaatccaattcgaacagctggcatacctgtggatggagcggcagaagtccgggggaaattactccaggcacagggctcaaaccgagaaacacgtggttctatgtgtgtcatccttgaagatcgacctgctgatggatttcctgaacgagttctatgctcaccctcggctgcaggattactacgtcgtgatcctgtgcccaacagaaatggatgtccaggtacggagagttctccagatcccaatgtggtcccaaagagtgatttatctgcaagggtctgcactgaaggatcaggatttgctaagggctaagatggacgacgcagaggcgtgtttcatcctgtcttctcggtgtgaggtggatcgcacttcgagcgaccatcaaaccatattgcgtgcctgggccgtgaaagattttgcccctaattgccctttgtacgtccagatcctgaagccagagaataagttccatattaagtttgccgaccatgtggtatgtgaggaggaattcaagtacgctatgctggctttgaattgcatttgccccgcaacctctactttgataaccctcttggtgcacacctctagaggacaagagggccagcaatcccctgagcagtggcagaagatgtatgggcgatgtagtggcaacgaggtgtaccacatcgtgctagaggagtctactttcttcgccgaatacgaaggaaagtcatttacatacgcctcttttcacgcccacaaaaaatttggcgtgtgtctcatcggggtgagaagggaagacaataaaaacatcttgttaaatccgggaccgcgatatattatgaacagcaccgatatttgtttctacattaacattacaaaggaggagaactcagccttcaaaaatcaagaccagcagagaaagagcaatgtgtcgcggtccttctaccacggcccttcccgcctgccagttcactccataatagcctctatgggcacagtggcaattgacctccaggacacctcttgtcgttccgctagcggcccaacactgtcacttccgacggagggttctaaggaaatacgaagaccaagcatagcaccagtgcttgaagtggcagacacctcaagcatccagacctgcgatcttctgtctgatcagtccgaggatgaaacgactcccgatgaagaaatgtcatcgaatctggagtacgccaaaggttaccctccctacagcccctacattggtagcagtccaacattctgccatctgctccacgaaaaggtgccattttgttgcctgcggctggacaaatcctgccagcacaactattacgaggatgccaaggcatatggattcaagaacaaattgatcatcgtggctgccgagactgcgggtaacggattatacaacttcatcgttccgttgcgcgcatattatcggccaaagaaagaactgaaccccatcgtcttgctgttagacaacccccctgatatgcatttcctggacgccatatgttggtttcctatggtctattacatggtcgggagcatcgacaacctggatgatctcttacgctgcggagtgaccttcgcagcgaacatggtggttgtagataaggagtccactatgtcagcagaagaagactatatggccgacgcaaagacaattgtgaacgtccaaacactgtttcgtttattttccagtttaagcatcataactgagcttacgcaccccgcaaatatgaggttcatgcagttccgagccaaagactgttattcactggccctctcaaaactggaaaaaaaggagagagagcgcggtagcaacctggcctttatgtttagacttccgttcgctgctggacgggtctttagcatatcaatgctggacacactcctgtaccagtcctttgtcaaggattacatgatttccattactaggctcttgcttggtttggacaccactccaggcagcggatttctctgctctatgaaaattacagcggacgatctgtggatccgtacctacgctagattgtaccagaaactttgtagctccaccggagatgtcccaataggaatctataggactgagagccagaagctgaccacttcggaatctcagatctctattagtgtcgaggagtgggaggacactaaggactccaaagaacagggtcatcaccggagcaatcatcggaactcgacatcatctgaccagtctgaccaccctctgctccgaaggaagagcatgcagtgggcgagacgtctgtcccgcaagggacccaagcattccggtaaaaccgctgaaaagattactcaacagcgtctcaatctttaccggcgtagcgagagacaagaactggcagagctagtcaagaatcgcatgaaacatctggggctgtctacagtgggctacgacgaaatgaacgatcaccagtccaccctttcctacattctgatcaatcccagtcctgatacacgtatcgagcttaatgatgtggtctatctgataagaccagatcccctcgcatacttacctaactctgagccttctaggcggaacagtatttgtaatgtgacggggcaggattcccgcgaggaaactcagctctag

SEQ ID NO: 235604 - DNA, 3210 bp, synthetic construct
  misc_feature 1..3210: note = Description of Artificial Sequence: Synthetic coding sequence
  source 1..3210: mol_type = other DNA
atggtggacctcgaatcggaagtgccaccactcccaccccgatatcggtttagagatctcctgctgggggatcagggctggcagaatgatgatagggtgcaagttgaattttatatgaacgagaataccttcaaagagaggctcaaactatttttcataaagaatcagcgctcctccctacgtatacgtctctttaacttttctctgaaactcttgtcctgcctcttgtacataatccgggtcctcctcgagaacccatcgcagggtaatgagtggtctcacattttttgggtgaacagatccctgccactctgggggcttcaggtttcagttgccttgatttccctgtttgagaccatcctgcttggatacctgagttacaagggcaacatttgggaacagattttgcgcatcccattcattctggagatcatcaacgccgtgccttttatcatcagcatcttttggccatcattacgtaatctgttcgtcccagtctttctgaactgttggctagccaaacacgctttggaaaatatgattaatgacttacatcgagccattcagaggactcaatctgccatgtttaatcaggttttgatcctcatatctactctgctctgcctgatcttcacctgcatttgcggtattcagcatctcgagaggatcggcaagaaactgaacctgtttgattcattgtacttttgcatcgtgaccttcagtacggtgggattcggcgatgtgactcccgaaacttggtcctccaaactattcgtagttgccatgatttgcgttgcactggtggtactgcctattcagtttgaacaattagcttatctgtggatggagcgccagaaatcaggtggaaactattcacgccatcgggcacagactgaaaaacacgtggtgctttgcgtgagcagcctcaaaatcgatctcctgatggacttcctgaacgagttttacgctcatccgcgactgcaggattactatgtagtcattctttgccctaccgagatggacgtgcaagtgagacgggtactgcagattccaatgtggagtcagcgcgtgatctatttgcaggggagtgcacttaaggaccaagatctgttgcgtgcaaaaatggatgatgccgaggcttgttttatcctgtcttctagatgcgaagtcgatcggacctccagcgaccatcagacgatcctaagagcctgggccgtgaaggacttcgctcccaactgtcctctttatgtccagatcctcaagccagagaacaaattccacattaaatttgcagatcacgtagtctgcgaagaggagtttaagtatgccatgctggcgctgaactgcatttgtccggctacaagcaccttaattaccttgctcgtccatacgtcaaggggccaatttggcgtgtgtctgattggtgtgagaagggaagacaacaagaacattttgctgaaccctggaccgaggtatatcatgaactcaaccgatatttgtttctacataaacattacaaaggaggaaaattctgcttttaaaaatcaagaccagcagcggaagtcaaacgtttctcgaagtttctatcacggaccaagcaggctgcctgtgcattccattattgccagcatgggaactgtagcaatcgatctccaagacacatcctgcaggtcggcctcgggcccaaccctgagtctccctaccgaaggatctaaggaaattcgccgacctagcattgctcccgtactagaggttgctgacacttcctcaattcaaacttgtgaccttctgtccgaccagagcgaggacgaaacaacccccgatgaggagatgtcatcaaacctagaatatgccaaggggtatccaccctactccccatacataggctcttctcccactttttgccacctgttgcacgaaaaagtgcccttctgctgtttgcggctggacaagtcttgccagcataattactacgaggacgccaaagcctatggctttaaaaataagctcattatcgtagcggcagaaacagcgggaaacgggttgtataacttcatcgtgccactgagggcctattaccggccaaagaaagagctgaaccctatcgtgctactccttgacaacccacttgatgatctgctacgctgcggcgtaaccttcgctgccaatatggtggtggtggataaggagtccactatgagtgccgaagaagattacatggccgacgcaaagactattgtgaacgtacaaaccctcttccgcctcttcagtagtctctcaatcattactgagctcacgcacccagccaacatgcgatttatgcaatttagggccaaggattgctattctctggcgctgtctaaactcgagaagaaagaacgcgaaagaggaagcaatctggcatttatgtttcggttaccattcgccgcagggcgagtattttccatttctatgctggacaccctcctctaccagtctttcgtgaaagactatatgatcagcataacccgcctccttctggggctggatacgaccccagggtcgggtttcctttgctccatgaaaatcaccgcggacgatttatggatacggacttacgccagactctatcaaaaactgtgtagttccactggcgatgttcccatcggaatctatcggactgagagccagaaactgacaacttctgaagagacatacattttaattttcctgtcacaaattagcatcagcgtcgaggagtgggaggacacaaaggacagtaaggaacagggtcatcatagatcaaaccacagaaattccacctcctccgaccaaagtgaccaccctctgctccgcaggaagagcatgcagtgggcacgcagacttagccgcaaaggtcccaagcatagcggaaaaaccgcagaaaaaatcacacagcagcgtctgaatttgtatcggaggtccgaaagacaggaactggccgagcttgtgaaaaaccgcatgaagcatttgggcttgagcacagtcggttacgacgaaatgaacgatcaccagtcgactctatcttatatcctgataaatccctctccagatacccgcatcgagctgaacgatgtcgtttacttaatacgaccagaccccctcgcatatttaccgaattcggagcctagccggcgaaacagcatttgtaatgtgacaggacaggactcacgcgaagagacccagctgtag

SEQ ID NO: 235605 - DNA, 3336 bp, synthetic construct
  misc_feature 1..3336: note = Description of Artificial Sequence: Synthetic coding sequence
  source 1..3336: mol_type = other DNA
atggttgacttggagtctgaagttcctcccctgccaccgaggtaccgtttccgcgatttgctgctgggggaccagggttggcagaacgatgacagagttcaggtggagttctatatgaatgaaaatacatttaaggagcgcctaaaattgtttttcatcaaaaaccagaggtccagcttgcgcattaggctattcaatttctcattgaagttactgtcctgcctgctatatatcatccgtgtgctactcgaaaaccctagtcagggcaatgaatggtcccacattttctgggtgaatcgaagtctgccgttgtgggggctgcaggtgagtgtggccctaatctccctgtttgaaacaattctgttggggtatctgtcttataaaggtaatatctgggagcaaattctgaggatcccattcattctggaaatcatcaacgcagtgccattcatcatatccattttctggcccagcctaaggaacctgttcgtgcccgtgtttctcaattgctggctagcgaaacatgcgctcgagaatatgatcaacgatttgcaccgggctattcagagaacccaaagtgctatgttcaatcaggttttgattctgatttccaccttactgtgcctgatcttcacttgcatctgcggcatccagcatttagagcgaataggcaagaagttaaatcttttcgattccctgtatttctgtatcgttaccttctctactgtaggctttggggacgtgacccccgaaacctggagcagtaagctgttcgtggtcgctatgatctgcgttgccttggttgtcttaccaatacagttcgaacagctagcatacctctggatggaacgccagaaaagcgggggaaattacagccggcaccgggcacagaccgagaaacacgtagtgctgtgcgttagtagcttgaagatcgacttgctgatggactttctgaacgaattctatgcgcacccaagactgcaggactactacgtagttatcctgtgtcccaccgagatggacgtccaggttagacgggtgctgcagatccctatgtggtctcagagggtcatatatctgcaggggtccgccctgaaagaccaggacctgttacgcgctaagatggatgatgccgaagcctgtttcatcctatcttcgaggtgtgaggtagaccggacatcgtccgaccatcagacgatcctgagagcctgggccgtgaaagactttgcaccgaattgcccactgtacgtccaaatccttaaaccggagaataagttccatattaagttcgctgatcacgtagtgtgtgaggaggagttcaaatacgcgatgctggcactgaattgcatttgccctgctacctcgacccttatcacacttctcgtgcacaccagcagagggcaggagggccagcagagtcctgaacaatggcagaagatgtacggcagatgttcgggcaatgaggtgtatcacatagtccttgaggaaagcaccttcttcgccgaatacgaggggaaaagcttcacctatgccagctttcatgcccacaagaagtttggcgtgtgtttgatcggggtgcggcgagaggacaataagaacattcttctgaaccccggaccgaggtacataatgaatagcacggacatttgcttctacattaacatcaccaaggaggagaattcggcttttaaaaatcaggatcagcaacgcaagtccaatgtgtctaggtccttttatcacggcccaagtagactcccagtccacagcataatcgcttccatgggcacagtcgccattgacctccaggatacatcgtgccgctcagcctctggcccaaccctatcgctcccaactgagggatccaaagagatcaggcgacctagtatcgcccctgtcctggaagttgcagatacctcctctattcagacctgcgatctcctttcagaccagtctgaagacgaaactacgccggatgaagagatgagctctaatctggagtacgctaaaggctacccaccatatagtccctatataggctcatcccctaccttttgtcatctgctgcatgagaaggtgccgttctgctgtctgagactcgataaatcctgtcaacataactactatgaggacgcaaaagcatatggattcaagaacaaactgataatcgtggcagcagagaccgccggtaatggcttgtataatttcattgttccactccgtgcttactataggcccaaaaaagaactgaatccgatcgtcctgttgttggacaaccccctggacgacctcttacggtgtggcgtcacatttgcagctaacatggtggtcgtggataaagagtcaaccatgagtgcggaggaggactatatggcggatgcaaagacgatagtaaatgtccagaccctgtttcggctgttttcttctctttcaatcatcacagaactcactcatccagccaacatgagatttatgcagtttcgcgctaaagattgttactccctggcgcttagcaagctggaaaaaaaagagagagaaagggggtccaatctggcttttatgttccggctgccattcgctgctggacgcgtcttctccatttcaatgttagatacgctgctgtaccagagcttcgttaaagactatatgatcagcataactaggctcctcctgggcctggacaccacgccaggcagcggctttctgtgcagcatgaaaatcacggccgacgacctgtggattcggacatacgcgaggttatatcagaagctatgttcctccaccggcgatgtgccgatcggtatttatcggaccgagtcccagaaactgacaacttccgagtctcagataagcatatctgttgaagagtgggaggataccaaggacagtaaggaacagggccatcatcgtagcaaccaccggaactctaccagttcggatcaaagtgaccacccacttctaagacggaaatccatgcaatgggctagacgactgtcccggaagggtcccaagcacagcgggaagaccgcagaaaagatcactcagcagcggctgaatctgtaccgtagatcagagcgccaggagctggcagagctggtcaaaaacaggatgaaacatctgggcctgtccaccgtaggctacgacgagatgaacgatcatcagtctactttgagctacatcctgattaatccaagcccggacaccagaatcgaattgaatgacgtggtctacctcatcaggccagaccctctcgcttatctccccaattctgaaccctccagacgaaatagcatctgcaacgttaccggtcaggattccagagaggagacgcaattgtag

SEQ ID NO: 235606 - DNA, 1113 bp, synthetic construct
  misc_feature 1..1113: note = Description of Artificial Sequence: Synthetic coding sequence
  source 1..1113: mol_type = other DNA
atgccgtacctgcacctggatcaccagacaatacttcgggcatgggctgtgaaggatttcgcacctaactgccctctgtacgtgcagatccttaagcccgaaaataaattccacattaagtttgctgatcacgtggtatgcgaggaagagtttaagtatgccatgctggcgcttaactgtatatgtccggcaacaagtacgttaattaccctcctggttcacacttccagagggcaggaaggtcaacagagtcccgagcagtggcagaaaatgtacggacgttgtagcggcaacgaggtatatcatatcgtcctggaagagagcacattttttgccgagtatgagggtaaatctttcacgtacgcttcattccatgcccacaaaaaattcggagtgtgcctgatcggcgtacgcagggaggacaataaaaatattctgctcaaccctggaccgcgatatatcatgaactctacagacatctgcttctatattaacatcacaaaagaagagaacagtgcattcaaaaaccaggaccagcagcgaaagtccaacgtcagtcggtccttttaccacggtccctcccgcctcccggtccacagcatcattgcttcaatgggcaccgtcgccattgacctccaggacactagctgtcgatcggcaagcggacccacgctcagcctgcccaccgagggaagcaaggagatccggaggccgagcattgcccctgtcctcgaggtggccgatacttcaagcatacagacatgcgacctcttaagcgaccagagcgaggatgagaccacccctgacgaagagatgtcctccaacctggaatacgcgaaagggtatccaccatatagcccttacatcgggtccagccctacattttgccacctgctccacgagaaagttcccttttgctgtctccgactcgacaaatcatgccaacacaactattacgaagacgctaaggcttatgggtttaagaataaactgatcattgtcgcagctgagaccgctggcaatggtctttacaacttcatcgtccccctgagagcctactaccgccctaaaaaggagttgaatcccattgtcctgctcctggataacccatag

SEQ ID NO: 235607 - DNA, 1572 bp, synthetic construct
  misc_feature 1..1572: note = Description of Artificial Sequence: Synthetic coding sequence
  source 1..1572: mol_type = other DNA
attataaatgacctccaccgagcaatccaacggactcagagcgctatgttcaatcaggttctgatattgatttcgaccttactttgcctgatatttacgtgcatctgcggcatccagcaccttgagcggataggaaagaaactgaacctcttcgactccctatatttttgcatcgtgacattcagcaccgtgggattcggcgatgttacccccgagacatggagctcaaagctctttgtggtggcaatgatatgtgtggcactggtcgtgcttccaatccagtttgaacagctcgcatacctgtggatggagcgccagaaaagtgggggaaactacagtagacatagggcccaaacagagaaacacgtcgtgctgtgtgtgtcttctttgaagattgatctgctcatggatttcttgaatgaattttacgcccatcctcggttgcaggactattacgtggtgattctgtgtccaacagaaatggatgtccaggttaggcgcgtgcttcagatccctatgtggtcccagagggttatctacctgcaaggctccgccctcaaggaccaggatctactgcgcgctaaaatggacgacgccgaggcctgttttatcttgtcgtcaagatgtgaggtagacaggacaagctccgaccaccagaccattctcagggcctgggcagtgaaggatttcgccccaaactgccccctatatgttcagatcctcaaacccgaaaataagtttcacatcaaatttgcagatcacgtggtgtgcgaagaagaattcaagtatgccatgctggcactgaactgtatatgccctgccacttcgaccctaattaccctgctggtccacacctcacgaggccaggaaggccaacagtcgcctgagcagtggcagaaaatgtatggaaggtgttccggaaatgaggtgtaccacatcgtgctcgaagagagtacattcttcgcagagtacgagggcaagagtttcacatacgctagtttccatgcacataaaaaattcggagtgtgcctcattggggtcagacgggaagataataagaacatattactgaaccccggaccccgatacataatgaactctaccgatatctgcttttacatcaacattacaaaagaggaaaactctgccttcaaaaaccaagaccagcagagaaagtccaatgtgtccaggtctttttaccatggcccaagcaggttgccagtgcactccatcattgctagtatgggcactgtcgcaatcgacttgcaagacaccagttgtagatcagccagcggccctaccctgtccctcccgacagagggctccaaagaaatcaggagacctagcatcgctcccgttctcgaagtcgccgacacgtcatccatccagacctgtgatctgctctccgatcagagtgaggatgaaactactcccgacgaagaaatgtcgagtaatttggagtacgcaaagggctaccccccatactctccgtatatcgggtcgtcgccaaccttctgtcacctgcttcacgagaaggtgcccttttgttgcctgcgtctggacaagttttag

SEQ ID NO: 235608 - DNA, 1503 bp, synthetic construct
  misc_feature 1..1503: note = Description of Artificial Sequence: Synthetic coding sequence
  source 1..1503: mol_type = other DNA
atgcccagttcaggcagggccctactagacagcccgctcgacagtggatccctgaccagtctggatagcagcgtattctgcagcgagggcgagggagaacccctagcactaggcgattgtttcaccgtaaacgtgggcggaagccgattcgtcttaagtcagcaggctctgagctgcttcccgcacacccgcctaggcaaacttgccgtggtggtcgcatcatacaggagacccggagcgctggctgccgtgccgagccccttagagctgtgtgacgacgcaaacccagtcgataatgagtacttctttgacagatctagccaggcctttcgctatgtgcttcactattaccgcaccggcagattgcacgttatggagcagctctgcgctttgtctttcctgcaagagattcagtactgggggattgacgagctgtcaatcgacagttgctgtcgggacaggtactttaggcggaaggaactctcagaaaccttggatttcaagaaagataccgaagatcaggagagccaacatgaatcggagcaggacttctcacaagggccttgcccaacagttcgacagaaactgtggaatattctggaaaaacctggatcatctacagcggcaagaatattcggcgtaatttctatcatcttcgtggtcgtaagcattatcaatatggcactgatgtcagctgagctctcttggctagacctgcagctgttagaaattctcgaatacgtttgtatcagttggttcacgggcgagttcgtgctaagatttctgtgtgtacgcgacaggtgtcgtttccttcgtaaagtgcctaacatcatcgatctgctcgctatcctaccattctacataactctgctggtggagagtttgtctggatcccagacaacacaggaactggagaacgtaggccgaatcgtacaggtgttacgcctccttcgggcactgagaatgctaaagctgggacggcacagtactgggctgcgcagtctgggtatgaccattacgcagtgttatgaggaggtagggctcctactcctgttcttgtccgtgggaatcagcatattctccacagtcgagtactttgctgagcagtccatacccgacacaacgtttacgtctgtgccttgtgcttggtggtgggctaccactagcatgacaacagtgggttacggcgatatccgtccagataccacaactgggaagattgtggcgtttatgtgtattttatcagggatcttggtgctggccctgccaattgcaattatcaacgatcgcttttcagcatgctacttcacactgaaactcaaggaagccgcagtcaggcagcgcgaggcgctgaagaagctcacgaagaacatagccaccgactcgtatatcagcgtgaatctgagggatgtatacgctcggagcatcatggagatgctccggctgaagggccgagaaagagcaagtactcggtcttccggcggagacgatttctggttctag

SEQ ID NO: 235609 - DNA, 1503 bp, synthetic construct
  misc_feature 1..1503: note = Description of Artificial Sequence: Synthetic coding sequence
  source 1..1503: mol_type = other DNA
atgcccagcagcggcagggcactgcttgactcacctctcgactcaggctctctcacaagcctggacagctccgtgttctgtagcgaaggggagggcgaaccgctcgcccttggcgattgctttacagtgaacgtggggggatctcgattcgtcctctcccaacaggctttatcgtgctttcctcacacacgcttgggaaaactggctgtagttgttgcctcatataggcggccaggcgcacttgctgccgtgccgtctccgctcgaactttgtgacgacgccaaccctgtggataacgagtacttttttgatcgcagcagtcaggctttccgatatgttctccattattatcggaccgggaggcttcatgtgatggagcaactgtgtgctttaagtttcctgcaggagatccagtattggggtattgacgaactgagtattgattcttgttgccgggatcggtatttcagacggaaagagctaagcgagacattagactttaagaaggacacagaggaccaggaatctcagcatgagagtgagcaggacttctcacagggcccatgccccactgtacgtcaaaagctgtggaatatactggaaaagccagggtcctctaccgctgctcggatcttcggggtcataagcattatcttcgtagtagtaagcataatcaatatggctctcatgagtgcagagctgagctggctagatctgcagctgttggagatcctcgaatacgtgtgtatctcatggttcacaggcgagttcgtgttgcgatttctttgcgttagggaccggtgccgcttcctgaggaaggtccccaacatcattgatctgctagccatcctccctttctacatcactctgttggttgaatcactctccggaagccagacaacccaggagctggagaacgtggggcgaatcgtgcaggtgctccggctcctgcgcgcactacgtatgttgaaactcggtaggcactcaaccggtctgaggagtttgggcatgactataacacaatgctacgaggaagtgggactccttctgctgttcctgagcgtcggtatttccatcttctcgacggtggaatacttcgccgagcagtccattcctgatacaacctttaccagcgtaccatgtgcctggtggtgggctactacctcaatgacaaccgtggggtacggcgatatccgtccagacactacaacaggaaaaatcgtggccttcatgtgcatcctgagtggtatcctagttttggcacttccgattgccattatcaacgaccgtttttccgcctgctacttcacattaaagctgaaggaggcggcagtgcgccagagagaagcacttaagaaactgacaaagaacattgccaccgactcctatatctctgtgaacctcagagacgtctatgcgcgtagtattatggaaatgctgagactcaagggcagggaaagggccagcaccagatccagcggcggtgatgatttctggttttag

SEQ ID NO: 235610 - DNA, 1131 bp, synthetic construct
  misc_feature 1..1131: note = Description of Artificial Sequence: Synthetic coding sequence
  source 1..1131: mol_type = other DNA
atggaacagctgtgcgcactatccttcctccaggaaatacagtactggggcattgacgaactctctattgattcctgctgccgggaccgatactttcgcagaaaggagttaagcgaaactttggatttcaagaaggacactgaggaccaggaaagccagcatgaaagcgaacaagacttcagccagggcccttgtccaacggtgcggcaaaagttgtggaacattcttgagaaacctgggtcctctacggcggctcgcatttttggagtgatatctattatattcgtcgtggtctccattattaacatggctctcatgagcgccgagctgtcatggctggatctgcagctgctggagattctggagtacgtatgtattagttggtttaccggcgagttcgtcctgaggtttttgtgtgtccgcgatcggtgcagatttttaagaaaggtcccaaacatcatcgacttactggcgatcctgccgttttatattactctcctagttgaatccctgagcggatctcagaccacacaggagttggagaacgtcggaaggattgtccaggtgctgagacttctacgggctctgcgtatgttaaagctcggcaggcatagcacgggcctcaggagtctcggaatgactatcacccaatgttatgaagaggtgggactgctactgctgttcttatccgttgggatatctatcttttccaccgtggagtacttcgctgagcaaagcattcctgacactacattcacgtccgtaccctgtgcttggtggtgggctacgacatctatgaccaccgttggctacggagatatccgacccgatactaccaccggaaaaattgtggcctttatgtgtatcctgagtgggatcttagtcctggctctccccattgcaatcatcaacgatcgcttctccgcgtgctatttcacccttaaactaaaggaagccgctgtgagacagagggaggctttgaagaagctgaccaaaaatattgctactgattcttacatttcagtgaacctgagggatgtatacgctagatcaattatggagatgcttagattaaagggccgagaaagggcttcaacgagatcttcaggcggagacgatttctggttttag

SEQ ID NO: 235611 - DNA, 1638 bp, synthetic construct
  misc_feature 1..1638: note = Description of Artificial Sequence: Synthetic coding sequence
  source 1..1638: mol_type = other DNA
atgctaaaacagagcgaacgtaggcgatcttggtcctaccgcccttggaatactactgagaacgagggatctcaacacaggaggtctatatgcagtctcggggctcgctctggatcccaagctagtatccacggctggacggaaggtaattataactattacatagaagaggacgaggacggggaagaagaggaccagtggaaagatgatttggccgaggaggaccagcaggcaggagaagtgacgaccgctaaaccagagggtcccagcgaccctcctgcattactatctactctgaatgtgaatgtgggaggacacagctaccagctggactattgcgagctggctggcttccctaagacaaggctgggcagactcgcaacatccacatcaaggtcccgccagctctctctgtgtgatgattatgaagaacagaccgatgagtacttcttcgacagagaccctgccgtattccaactcgtgtataacttctacctgtccggtgtgctgctggtgctggatgggctgtgtcctaggaggtttctcgaagaattaggctactggggagtgaggcttaagtacacacctcgctgttgtcggatctgtttcgaagaacgccgagatgagctctcggaacggctgaaaatccagcatgaactccgggcacaagcccaggtcgaggaagctgaggaactgtttcgggatatgcgattttacggccctcagcgcagacggttatggaatctgatggagaaacccttctcttcggtcgcagccaaggctattggcgtggcctcaagcacctttgttctggtcagcgtggttgccctggcactgaacactgtagaggaaatgcagcagcatagtggccaaggcgagggaggaccggatcttagacctattctggaacacgttgagatgctgtgcatgggatttttcaccttggagtacctgttgagattggcttccacacccgatttgaggcggttcgctcggtctgcattaaatctggtagacctggtagctattctcccattgtacctgcaactgctcctcgagtgcttcaccggtgaaggacaccagagaggacaaacggtgggctcagtggggaaggtaggccaagtcctgcgagtgatgaggttaatgcggatctttagaatcttgaagctggccaggcacagtactggactgagggctttcggttttacactgagacagtgctatcagcaggttggttgcttactgctatttatcgcgatggggatcttcactttttctgccgctgtatattcagttgaacacgacgtgccatctacgaattttactacgattccccactcttggtggtgggctgccgttagtatcagcacagtcgggtacggagatatgtatcctgaaacccatctcggcaggttctttgcctttctgtgcatcgccttcggcattatattaaatggtatgcccatcagcatattgtataacaagttcagcgactattattccaaactgaaagcctatgaatatacaaccataagaagagaacggggtgaggttaacttcatgcagagagcccgaaagaaaattgctgagtgcctactgggtagcaacccacaactgacgccacgacaagagaactag

SEQ ID NO: 235612 - DNA, 963 bp, synthetic construct
  misc_feature 1..963: note = Description of Artificial Sequence: Synthetic coding sequence
  source 1..963: mol_type = other DNA
atgttgaaacagagcgagcggagaaggtcttggagctatcggccatggaacaccactgagaacgaagggtcacagcataggaggtctatctgcagtctcggcgcacggtccgggtcgcaggcatcgatacacggctggaccgaaggcaattacaattactacattgaagaagacgaagacggggaggaggaggaccaatggaaagatgatctagcggaagaagaccagcaggccggagaggtgacaaccgcaaagcccgaaggcccttcagatccacccgctttgctgagcacactgaatgtgaatgtgggtggccactcttatcagctggactactgcgagttagctgggtttcccaagactcgccttgggagacttgcaacgtcaacatcccggagtaggcagttgtctctctgtgatgattatgaagagcagaccgatgagtatttctttgatagagacccagcagtgtttcagcttgtgtacaatttttatctgtcaggcgtacttctggttctggacggattgtgcccacgcagatttttagaggagctcggctactggggcgtccgactaaagtatacccctagatgctgccggatttgtttcgaggagcgacgcgacgaactgagcgaacgtctgaagattcagcacctgcgtgccagacttaggggcggagccggtgcccagcatcggggtggtgatgccgcagcgcttggcgcaggacgcggacggccacggccagcggctcacccaggggcaaggggggatgccgtccacggcctgttgcatgccagggtccccgcagctcccagcctgcacgccaggcccgaggctctgcgcgctcagagaccccagccaggaggacctggcggacaccccgcagccctgcccagcgcggcagctcgtgtgctgcacggacgcggtccccctacaaggccggacgggggacagcggggatag

SEQ ID NO: 235613 - DNA, 1740 bp, synthetic construct
  misc_feature 1..1740: note = Description of Artificial Sequence: Synthetic coding sequence
  source 1..1740: mol_type = other DNA
atgtcttcttgccggtacaatggaggggtcatgaggcctctgtctaacctttctgcctctaggaggaacctccacgagatggattccgaagcacagcccctgcagcccccagcatcagtcggcggtggcggaggggcttctagcccatcagcagctgctgccgctgcagccgctgtgtccagttccgcccctgaaatcgttgtttctaagcctgaacacaacaacagcaataacctggccctctatggaaccggaggaggtggctccacaggaggcggaggaggtggagggggttcaggtcatggaagcagtagcggcactaagagcagtaagaaaaagaatcagaacattggatataaacttggccaccgtagagcattgtttgagaagcgtaaacggctaagtgactacgccctaatatttggaatgtttggtattgtggttatggtgatcgaaactgaactgagttggggggcatatgacaaagccagcctgtactccctggctctgaagtgcctgatcagtttgagcactattatcctgcttggacttatcatcgtttaccatgccagagaaattcagctgttcatggtggacaacggcgctgatgactggcgcattgccatgacgtacgagcgcattttctttatctgtctggagatactggtgtgtgctattcaccccattccaggcaactacaccttcacttggacagccaggctggcctttagttacgccccttcaaccacaaccgctgatgttgacataattttgtccatacccatgtttcttcgactgtacctgatagccagagttatgctgctgcattccaagctttttactgatgcctcctctaggtcaattggggcattaaataaaattaactttaacacccgcttcgtgatgaaaactctcatgactatatgcccgggtaccgtactcttggtattttctatatcactctggatcatcgctgcctggaccgttagggcctgcgagaggtaccacgatcaacaggatgtgacatcaaacttccttggggcaatgtggctgatcagtatcacgttcttatctattggatacggcgacatggtgccaaatacgtattgcggcaagggtgtatgcttgctaacaggaattatgggcgcaggatgtacggcactagtggtggctgtggttgctcgtaaacttgagttgacaaaagcagagaagcacgtccacaactttatgatggacactcagcttaccaaacgtgtgaaaaacgccgcagccaatgtccttcgagaaacctggctgatctataagaacacaaagttggtgaaaaagatcgaccatgcgaaagtcagaaagcaccagcggaagttcctgcaggcaattcaccaactgagaagcgttaaaatggaacaacgtaagctcaacgatcaagccaacaccctggttgacctcgcgaaaactcagaatatcatgtacgatatgatttctgacctgaatgagcgatccgaagactttgaaaagcgtattgtaaccctagaaacaaagctcgaaacattgatcggctctattcacgctctcccaggtctgataagccaaaccatccgtcagcagcagagagacttcattgaagcacagatggaatcatatgataaacatgtgacttataatgctgagcgctccaggtccagtagcaggcggaggcgaagctctagcactgcgccacccacatcgtccgaaagtagctag

SEQ ID NO: 235614 - DNA, 696 bp, synthetic construct
  misc_feature 1..696: note = Description of Artificial Sequence: Synthetic coding sequence
  source 1..696: mol_type = other DNA
atgtggctcatatctatcacttttctatcaattggctacggtgatatggttcctaatacttattgcggcaagggagtgtgcctactaactggtataatgggggcaggctgtaccgcactggttgtcgcggtcgttgcgagaaagttggagcttaccaaagcagaaaaacatgtccacaatttcatgatggatacacagctgacaaaaagagtcaagaatgccgctgccaatgtgctgagagagacttggcttatctataaaaacactaaattggttaagaagattgaccacgcaaaggtccggaaacaccagcggaagttcctccaggccattcaccagctgaggagcgtgaagatggagcagcggaaactcaatgatcaagctaacacgctggtggatctggccaaaactcagaacatcatgtacgatatgatctccgacctcaatgagcgctcagaggactttgagaagagaatagtaaccctggagaccaagcttgagactttgataggatcaattcatgcacttcctggccttatatcccaaaccattaggcagcagcagcgggatttcatagaggctcaaatggaaagttatgacaaacatgtgacatacaacgccgaacgctcgcggagtagtagtcgaaggcgccgttcaagcagcaccgcccctcccacctccagcgagagcagctag

SEQ ID NO: 235615 - DNA, 1326 bp, synthetic construct
  misc_feature 1..1326: note = Description of Artificial Sequence: Synthetic coding sequence
  source 1..1326: mol_type = other DNA
atgagctcatgccgctacaatggcggtgtcatgagaccattgtcgaatctttcagctagcaggcggaacctacacgagatggactctgaggcacaacctctacagccccctgcaagcgtcggcggaggcggaggtgcatcgagcccctcagcagccgcagcagccgcagccgctgtgtctagctctgccccagaaatcgtggtctcgaagcctgagcacaataatagtaataatctcgctctctatggtaccgggggaggcggtagcacgggagggggaggaggaggaggagggagtggccatggcagcagttccggaaccaaaagctctaagaaaaaaaaccagaacattggctacaagctggggcacaggcgcgctctgttcgagaaaagaaaacggctgtcagactatgccctcattttcggaatgttcggcatagttgtgatggtgatcgagaccgagctgtcctggggagcgtatgataaagcctctctctattccttggctctgaagtgtttaatcagcctgagtacaataattcttcttggactgattatagtctaccacgccagagaaattcagctcttcatggtggacaatggggcagacgactggcgcatcgccatgacatacgagcgtatcttctttatctgtttggagattctggtctgcgccattcaccctattcctggaaattatacctttacctggacggcccgtttggcattcagctatgctccgtccaccacaactgccgatgtcgacatcatactgtcaatcccgatgttcctgcgactgtacctgattgctcgcgtcatgctcctgcacagtaagctgttcaccgatgcgtcctcacgatcgatcggcgcattgaataaaatcaatttcaacactcggtttgtcatgaaaaccctgatgacgatctgccccggaacagtacttctcgtgttttcaatttctctctggataatcgctgcttggaccgtaagggcttgcgaacgataccatgatcagcaggacgtcacatcaaactttcttggcgcaatgtggttaattagtataacctttctaagtattgggtatggggatatggttcctaacacatattgcggcaagggagtgtgcctgcttacaggtatcatgggagccggttgtacagctctagtagtggcagtcgtcgcacgcaagctcgagctgaccaaggccgaaaaacatgtccataatttcatgatggatacccagctgaccaaacgggtgtcttactatccttatatattcaaagaaaacattatcgtcatcttctccgtgctcggaaatatggcttag

SEQ ID NO: 235616 - DNA, 2196 bp, synthetic construct
  misc_feature 1..2196: note = Description of Artificial Sequence: Synthetic coding sequence
  source 1..2196: mol_type = other DNA
atggacacaagtggccactttcacgactctggtgtcggcgacttggatgaggatcctaaatgcccctgccccagcagcggcgatgaacagcagcagcaacaacagcagcagcaacaacagcaaccgccacccccagccccacccgctgccccacagcaacctctcgggcctagcctccagccacagcctccccagctgcaacaacagcagcagcagcagcaacagcaacagcagcagcaaccacctcacccgctgtcacagttagcgcagcttcagtcccagcctgtgcatccaggtctactgcactcgtcccctaccgcattccgcgcaccgccttctagcaatagtacagcaattctccacccctcgtcacgacaggggtctcagcttaatctgaacgaccacctgctggggcattctccatcttctacagcgacttccggtcctggaggaggcagtagacatagacaggccagtcctttagtgcaccgccgtgattctaatccgttcaccgagatcgctatgagctcttgcaagtattctggcggagtgatgaaacctctatctaggctgtctgcatctagacgaaatctgatcgaagcggaaacggagggacagcctctgcaactgttcagcccttcaaacccacccgaaattgtgatcagcagcagggaagataaccatgcccaccagactctgctgcatcaccctaatgcaacccacaaccatcaacacgcaggcacgactgcctctagcacaacttttccgaaggcaaacaaaaggaaaaatcaaaatatcggctataaactagggcaccgcagggccctgtttgagaaaagaaaaaggttgtctgactacgctctgatctttgggatgttcgggatcgtggtgatggtgatagagaccgagctgagctggggtctatattctaaggattcaatgttcagtctggcccttaaatgcctcatctctctgagcacaataattctgttaggtctcattatcgcctaccatacacgggaagtccagctctttgtgatagataatggagcagacgactggagaatcgccatgacttacgaaagaatcctctacatttccttggagatgctggtctgtgccatccacccgattcccggagagtataagttcttttggaccgcgcgactcgcattctcttataccccctcaagggcagaagccgatgtggatatcatattgtcaatccccatgtttctgaggctctaccttatagctagagtaatgctgcttcactctaaacttttcactgatgcatctagtagatccattggggctctaaataagatcaactttaacaccaggttcgttatgaaaaccttaatgaccatatgtcctggtactgtcctgctggtcttcagcatttccttatggatcatcgccgcttggactgtccgtgtatgcgagcggtatcatgaccagcaggatgtcacttccaattttttgggggctatgtggctcatctcaatcacatttctgagtatcggctatggcgacatggtgccacacacatactgtggaaagggggtttgcctgctgacgggcatcatgggcgctggctgcactgccttggtggtagcagtcgtggcaagaaagctggagcttacaaaggctgaaaaacatgtccacaattttatgatggatacccagctgactaaaaggatcaaaaatgctgcagctaacgtcttgagagaaacctggctgatctataaacacacaaagcttttgaagaaaattgatcacgccaaagtgcgcaaacaccaacgtaagttcctgcaggccattcatcagctgcgttccgtcaaaatggaacagagaaaactgtcagatcaggctaacactctggtagacctgtcaaaaatgcaaaacgtgatgtatgatctgataaccgagctgaacgaccggtctgaggaccttgagaagcagatcggatcacttgagagcaagctggagcatcttactgccagctttaatagcctcccattgctcatcgctgacacactgagacaacagcaacagcagctcctgtcagcaatcattgaagcaaggggcgtttcagtggcggtgggcactacacacacacccatctctgattctcctatcggagtgtcctctacttcatttcccactccatacaccagctcctcttcttgttag

SEQ ID NO: 235617 - DNA, 1257 bp, synthetic construct
  misc_feature 1..1257: note = Description of Artificial Sequence: Synthetic coding sequence
  source 1..1257: mol_type = other DNA
atgttctccctggccttgaaatgtctcatcagtcttagtaccattatactactggggcttatcattgcttaccacactcgggaggtgcagctgttcgtcatagataacggagccgacgactggcggatcgccatgacatatgagagaatcctatacatcagtctcgaaatgcttgtgtgtgctattcatccaatccctggggagtacaaattcttctggacagctagacttgcattttcctatactccttcaagagccgaggctgatgttgacatcatcctttcaatcccaatgtttcttagactgtacctgatcgctcgcgttatgctacttcattctaagcttttcacagatgcatcttcgcggtcaataggggcacttaataagatcaactttaatacaagatttgttatgaagacactgatgaccatctgccccggaactgtgctgctggtgttctccattagcctgtggattatcgccgcatggacagtacgggtatgtgagaggtaccatgatcagcaggacgttacaagcaatttcttaggcgctatgtggctaataagcataacctttctttctattgggtacggcgacatggtgcctcatacctactgcggtaaaggggtctgtctgctcactgggatcatgggtgcaggttgcaccgcactagtcgtggctgtggtggcgaggaagcttgaactgactaaagcggaaaaacacgtgcataattttatgatggatacccagcttaccaaaagaatcaaaaatgccgctgcaaatgtgctgcgcgaaacctggctcatctataagcacacaaagctgctgaaaaagatagatcatgctaaagtgcgcaagcaccagcgtaaatttttacaagcaattcatcagctaaggagcgttaagatggagcagaggaagctgagtgatcaagcaaacacactggtcgacctgtctaaaatgcagaacgtgatgtatgacctgatcacagagctgaatgatcgctcagaggacctcgagaagcagatagggtcgctcgagtctaagttggagcatctgaccgcctcttttaactccctgccactcctcattgctgacaccctccgtcagcaacagcagcagttgctttctgccattatcgaggccagaggcgttagcgtggccgtgggcaccacccacacccccattagtgattccccgatcggggtctctagcacctcttttcctaccccttatacatcttcttctagctgttag

SEQ ID NO: 235618 - DNA, 1281 bp, synthetic construct
  misc_feature 1..1281: note = Description of Artificial Sequence: Synthetic coding sequence
  source 1..1281: mol_type = other DNA
atggagaggccaattaaggacagtatgttttcgctggctctgaaatgtttgatcagcttatccacaatcatcttgttgggtcttatcatcgcatatcacacacgggaggtgcaattatttgttatcgataacggcgctgacgattggagaattgctatgacgtacgagagaatcctttacatctcactggagatgctagtttgcgctattcaccctatccctggcgaatataagttcttttggacggcccgactggctttctcctacacaccgagcagagccgaggctgatgttgacatcatactctccattcctatgttcttgaggctgtacttgattgccagggtcatgttgctacattcgaagcttttcacagatgcatcgtcccgatccatcggagccctcaataagatcaactttaatactcggtttgtaatgaaaacgttgatgacgatttgtcccggaaccgtgctcttggttttcagtataagcctgtggattatagctgcatggaccgttcgcgtctgcgaacggtatcatgatcagcaggatgtcacctccaacttcctcggcgctatgtggctgatttccattacctttctctctatcggctacggtgatatggtgccacacacctactgcggaaagggcgtctgcctgctcacaggtatcatgggggcaggctgcaccgctctcgtggttgccgtcgtggccaggaagctcgaactgaccaaggctgaaaagcacgtgcataactttatgatggacactcagctcacgaagcgaatcaagaacgccgcagccaatgtgcttcgggagacttggttaatctacaagcataccaagcttctgaagaaaatcgaccacgccaaggtccgcaagcaccagaggaagtttcttcaggccatccaccagctccgatctgtcaaaatggagcagcggaagctgtcagaccaagccaataccctggtagatctgagtaagatgcagaatgtgatgtacgatctcataaccgagctaaacgacagatctgaagatctggagaagcagattgggagtctcgaatcaaagttagagcacctgacagcatctttcaacagtctaccactcttgatcgctgatactctgcggcaacagcagcagcagctgctgagtgcgatcatcgaagccaggggcgtgagcgtcgctgtggggaccacccacactcccatttctgattcacccatcggggtgagtagcacatcgtttccaaccccctatacgagtagttcatcttgttag

SEQ ID NO: 235619 - DNA, 684 bp, synthetic construct
  misc_feature 1..684: note = Description of Artificial Sequence: Synthetic coding sequence
  source 1..684: mol_type = other DNA
ccacacacattgctcgaggaccatctgcttcgtgagttctttcatccactgttttttcttcaggcccctctcctgctttctctgccagctcaatacaacgcatttctgtctggatcagtatggaccccagggagtcctagagaacccaaacaagcaaaagaacggaccggggcaaaaatcctggtgggcgaaatcggctgcttagctttcttcgaggatatcttcggcgctagagtcgctctcgggtggggtcttgtgctgcaaggcatccagcctgggcctaaaatggacacctctggacatttccacgactctggagtcggcgacctcgacgaggatcctaaatgcccctgcccatcaagtggggatgagcaacagcagcagcagcaacagcagcagcagcagcaaccgcctccccctgctccgcctgccgctccccagcaaccattgggcccatccttgcagcctcagccaccacaactgcagcagcaacagcagcagcagcagcagcagcaacagcagcagccacctcatccactgtcccagctcgcgcaattgcagtctcagcctgtgcaccccggactgctgcattcatccccaacagctttccgacccccttttgtacagctccaccgccaccctcctccctttctgcaggccagacagccagcacaaagccagtag

SEQ ID NO: 235620 - DNA, 1284 bp, synthetic construct
  misc_feature 1..1284: note = Description of Artificial Sequence: Synthetic coding sequence
  source 1..1284: mol_type = other DNA
atgggcggagatctggtcctcggcttgggggctcttaggcgcagaaagagactattggaacaggagaagtccttagctggatgggccttggtgctggcaggaaccgggatcggcctcatggtgctgcatgccgagatgctctggttcggtggctgctcttgggctttgtacctcttcctggtgaagtgcaccattagcatctccacctttcttttattatgtcttatcgtggccttccacgctaaggaagtgcagctgttcatgactgataacggcctccgagattggagagtggcactgacaggtaggcaggcagctcaaatcgttctggagctggtagtttgtggactgcacccagcgcctgtgagagggcctccatgcgtccaggacttgggggctccactgacctcgccgcagccctggccaggcttcctcggacaaggtgaggcccttctttcgctcgccatgctcctcaggctttacctcgtgcctcgtgcagtactgttgcgctccggagtgctattgaacgcgagttataggtctatcggagcactgaaccaggtcaggttcagacattggttcgtcgctaaactatacatgaatacacaccctggacggctcctgttgggtctgactctgggcctgtggctgactaccgcatgggtgctcagcgtggccgagcgccaagccgtcaatgccactgggcatctgtccgatacactgtggttaattcccatcacatttcttacaataggttatggcgacgtcgtccctggaactatgtggggtaagattgtctgtctgtgcaccggcgtgatgggtgtctgctgcaccgcccttctcgtagcagtcgtcgcccgtaagctagagttcaataaggctgaaaaacatgtccacaactttatgatggatattcagtacaccaaagaaatgaaggagtcggccgcacgggtcctgcaggaagcatggatgttttataagcataccaggaggaaagagagccatgccgctagacgccatcagaggaagctcctggctgctatcaacgcatttcgccaagtgcgcctgaaacatagaaaactgagagaacaagtaaatagcatggtagacatttcaaagatgcacatgatcctgtacgatctgcagcagaacttgtctagtagccatagggcgcttgagaagcagattgacacactggctggaaagctggatgctctcactgagctgttaagtactgcactgggacctaggcagctccctgagccatcccagcaaagcaaatag

SEQ ID NO: 235621 - DNA, 888 bp, synthetic construct
  misc_feature 1..888: note = Description of Artificial Sequence: Synthetic coding sequence
  source 1..888: mol_type = other DNA
atgcacgatcagcacttccatctgcttacccccctgccacatagggggctgtcatgccagaggggaccagctgtgcacgataggcagagggccgcaggactggcgagaggcgctgaccgtgccgctgggaatgccagctataggtccataggggctctgaaccaggtgaggttccggcactggttcgtggcgaaattgtacatgaacactcaccctggacgtctgcttttagggctgaccctcggactttggctaacgaccgcttgggtgttgtctgttgccgaacggcaggccgtgaatgccactgggcacttgtcagacacgttatggctgatacctattacattcctcaccattgggtacggcgatgtggtgccaggtaccatgtggggaaaaattgtctgcctttgtacaggagttatgggcgtttgttgcacagccctactggttgccgtcgtggcaagaaagctagagtttaataaggccgaaaaacatgtacataattttatgatggacatccagtacactaaggaaatgaaggagtctgctgcccgagtgctgcaggaggcctggatgttttacaagcacacaaggcgcaaagaaagccatgccgctcgcagacaccaacgtaagctcctggcggctattaatgcctttcgccaagtgagactgaagcacaggaaactgagggagcaggtgaatagcatggtggacattagcaaaatgcacatgatactgtacgatctgcaacagaatctgtcttccagtcacagagcccttgagaaacagatagacacgttagcagggaaactcgatgccctgacggaattgctcagtacagccctcgggccacggcagcttccagaaccgtcccaacaaagcaagtag

SEQ ID NO: 235622 - DNA, 1119 bp, synthetic construct
  misc_feature 1..1119: note = Description of Artificial Sequence: Synthetic coding sequence
  source 1..1119: mol_type = other DNA
atgtttaagcatcttaggaaatgggtcgtgactcgcttttttgggcactccagacagcgcgctaggctggtttcaaaggacggcagatgtaacatagaattcggcaatgtggaggcgcaatccaggtttatcttctttgtggatatatggacaacggtcctggatctgaagtggcgatataaaatgaccattttcattactgcattcctcggtagctggtttttcttcgggctactatggtatgccgttgcatatatccacaaggacctgccagagttccacccatccgccaaccacaccccttgtgttgagaacatcaacggattgactagcgcatttctctttagccttgagactcaagtcaccattggttacggatttcgctgtgttacagagcagtgtgctacagccatcttcctactcatcttccagtccattctgggggtgataatcaacagtttcatgtgcggtgccattctggcgaaaattagccgtcctaaaaagcgtgccaagaccattaccttctcgaagaatgccgtgatttcaaaaagaggtggtaagctgtgccttctcatccgcgttgcaaatctgagaaagtctctgctgattgggagccatatttatggcaagctgctgaagactacggtcaccccagagggggaaactataattctggatcagatcaatatcaactttgtggtagacgccggaaatgagaacctgttctttatatcaccactgacaatttatcacgtaattgatcataatagcccattcttccacatggctgcggagaccctgctccagcaggattttgaattggtcgtgttcttggatggaacggtagagtccacttctgctacatgtcaggtgcgcacgtcgtacgttccagaggaagtactgtgggggtatagatttgccccaatcgtctcaaaaacaaaggaaggcaaatacagggtggattttcataatttctccaaaacagtcgaggtggagactccacactgcgccatgtgcttatataacgaaaaagacgtgagagccaggatgaagcgcggttatgataaccccaacttcatcctcagtgaagtgaacgaaaccgacgacacaaagatgtag

SEQ ID NO: 235623 - DNA, 1119 bp, synthetic construct
  misc_feature 1..1119: note = Description of Artificial Sequence: Synthetic coding sequence
  source 1..1119: mol_type = other DNA
atgttcaagcaccttaggaagtgggtggtgacacgcttttttgggcactctcgccagagggcacgactggtgtccaaggacggcaggtgcaacatagaatttggaaatgttgaggcgcagagccggttcattttttttgtcgacatttggactacagtcctagatctgaagtggcgctacaagatgaccatcttcatcaccgctttcttagggagttggtttttttttggcctgctgtggtatgccgtggcctacatccacaaagatctgccagaatttcacccatcagctaaccatactccctgcgttgagaatatcaatggcctgaccagtgcattcttattctccctcgagacccaggtaaccattggttacggcttcaggtgcgtgacagagcaatgtgcgacagctattttcttactgattttccagtcaatcctaggggtgatcatcaactcttttatgtgcggcgcaatattggcaaagattagtcgtcctaaaaagagagcaaaaactatcaccttcagcaagaacgccgttatttccaaacggggtggaaaactgtgtcttctgattagagtagccaacctgcgcaagagcctgctgattggtagtcacatttacggcaagttgctcaagaccaccgtcacacctgaaggagagaccattatcctggaccagatcaacattaatttcgtggtagacgccggaaatgaaaatctcttcttcatctctccgctgacaatatatcacgtgatagatcacaattcccctttttttcacatggccgctgagacccttctgcagcaggacttcgaactagtggtgtttctggacggaacagtagagtcaacctcggcaacctgccaagtgcgcacaagttatgttcccgaagaggtcctgtggggataccgttttgcaccaattgtgagtaagactaaagaggggaagtaccgggtagatttccacaatttctctaagacggtcgaggtcgaaacaccccactgtgctatgtgtctgtataatgagaaggacgtccgagccagaatgaagaggggatacgataaccccaactttattctgagtgaagtgaacgagaccgacgataccaaaatgtag

SEQ ID NO: 235624 - DNA, 912 bp, synthetic construct
  misc_feature 1..912: note = Description of Artificial Sequence: Synthetic coding sequence
  source 1..912: mol_type = other DNA
atggcttggtggttaattgcctttgcgcatggggatctggcgccatctgagggcaccgccgaaccttgtgtgacttctatccacagcttttctagtgctttcctttttagcattgaggtgcaggttactattggctttggcggtcggatggttacagaggaatgtcccctggccatcctgattctgatcgttcagaacattgtcgggcttatgatcaatgccattatgctggggtgcatcttcatgaagacagcacaagctcaccgtcgggcagagacacttatattctcgaagcatgctgtaattgccctgagacacgggagattgtgctttatgctgcgggtgggagacctacggaagtctatgattatctctgccactattcatatgcaggtggttcgaaagacaacctcccccgagggcgaggtggtccccctgcaccaggtcgacatccctatggaaaatggagtcggcggtaatagcattttcctggtggcccctctcatcatctatcacgtaatagacgccaatagccctctctacgatcttgctccatctgatttgcaccaccaccaagaccttgaaatcatagtgattcttgagggtgtggtggaaaccaccgggatcactacacaggctaggacctcctacctcgctgacgaaattctgtgggggcagcgctttgtgccgattgtcgccgaggaagatggtcggtattccgtcgattatagcaagtttggcaacacggtaaaggtccccacccctttgtgtaccgcgcgtcagctggatgaagatcactccttactggaggccctaaccctggcctcagcaaggggaccactccgtaagcgcagtgttcctatggcaaaagccaaaccaaaattttcgataagccccgactccctgtcctag

SEQ ID NO: 235625 - DNA, 1302 bp, synthetic construct
  misc_feature 1..1302: note = Description of Artificial Sequence: Synthetic coding sequence
  source 1..1302: mol_type = other DNA
atgactgccgcttccagagccaacccctattcgatcgtgtccagtgaggaagatgggttgcacctggtgacgatgtccggtgccaatggctttggcaatggcaaggtccacactaggcgccgatgcagaaaccggttcgtgaaaaaaaacggccaatgcaatatagaattcgccaacatggacgagaaaagccaaaggtacttagctgacatgtttactacctgtgttgacatccgctggcgctatatgttactcatcttttcccttgctttcttggccagttggctgcttttcggcattatattttgggttatcgccgtggctcacggcgatcttgagccagccgaaggcaggggcaggacaccttgcgtgatgcaagttcatggctttatggctgcctttttgttcagcattgaaacacaaaccaccattggctatggcctgaggtgtgtgaccgaagaatgtcccgtggctgttttcatggtagtagcgcagtccatagttggctgcatcatcgacagctttatgattggggcaatcatggccaaaatggccaggcccaagaagagagcccaaacactcctgttctctcataacgccgtggtggccctccgtgacggcaagctatgtttaatgtggcgggtgggtaatttacggaagagtcatatcgtggaggcacacgttcgggctcagctgatcaaaccgagggtgacggaggagggcgagtacattccactagaccaaatcgacattgatgttgggtttgataagggtctggataggatctttctggtatctcctatcaccattctacacgagatcgacgaggcaagtcccctctttgggatctcccgccaagatctggaaaccgacgactttgagatagtcgtgatccttgaaggaatggtggaggcgaccgccatgactacccaggcaaggtcaagctacttagctaacgaaatcctatggggacatcgattcgagcccgtcttgttcgaagagaaaaaccaatataagatagattattcccactttcataaaacttatgaggtgccatcaacccccagatgctccgcaaaggatttggtagaaaataagtttctgcttcctagtgctaattccttctgctacgagaatgaactcgcatttctgtcccgagatgaggaagatgaggccgatggagaccaggatggtcgaagcagggatggcttgagcccccaagctcgccacgattttgacaggcttcaggccggagggggagtgctcgagcaaagaccctatcggcgagagtccgaaatttag

SEQ ID NO: 235626 - DNA, 1257 bp, synthetic construct
  misc_feature 1..1257: note = Description of Artificial Sequence: Synthetic coding sequence
  source 1..1257: mol_type = other DNA
atgtcatattatggctcaagttatcacattataaacgctgacgccaaatacccaggttatcctccagagcacataatcgccgagaaacggcgtgcacggaggcggttgctgcataaagacggcagctgcaatgtctacttcaagcacatatttggcgagtgggggagctacgtggtcgacatcttcactaccttagtggacactaaatggcgccatatgtttgtgattttctccctctcatacatcctcagctggttaattttcggaagcgtcttttggctgatcgcattccatcacggagacctcctcaatgatcccgacatcactccttgcgtagacaacgtccacagttttaccggagcctttctgttcagcctggagacccagaccactatcggatacggttatcgatgtgtgactgaggaatgctccgttgctgtgctcatggtaattctgcaatctatactgtcatgcatcataaacaccttcatcatcggggctgctctggccaaaatggcaaccgcaaggaagagggcacagacaattcggttttcatattttgcactcattgggatgagagacggcaaactttgcctgatgtggaggatcggggactttagacccaatcacgttgtggaaggaaccgttcgagcgcaactgctgcgatacactgaagactcggagggcagaatgactatggcctttaaagacttaaagctggttaacgaccagattatattagtgacccccgtaaccatcgtacatgagatcgatcatgagagccccttgtatgctttggatcggaaagccgtggccaaggacaatttcgagatcctggtcaccttcatctacacaggagatagcacagggactagccatcagagcagatccagctacgttcctagagagattctttggggccatcgattcaacgacgttctcgaagtgaagaggaagtattacaaggtcaactgtctccagttcgagggctcggttgaggtctacgctcccttttgttctgctaagcagctcgattggaaggaccagcagctgcatatcgaaaaagctccaccagttcgggaaagttgtacctccgacacaaaagccagaaggcgatcattctccgccgtggccatcgtgagcagttgcgagaatccggaagaaaccaccacctccgcgacccacgaatatcgcgagacaccttatcagaaagccctcctgaccctgaacaggatctccgtcgaatctcagatgtag

SEQ ID NO: 235627 - DNA, 1119 bp, synthetic construct
  misc_feature 1..1119: note = Description of Artificial Sequence: Synthetic coding sequence
  source 1..1119: mol_type = other DNA
atgtttaaacacctccgaaaatgggtcgtaactcgtttttttggacatagcaggcagcgcgcacggctggtgagcaaagacggtcgatgcaacatcgagttcggaaacgtggaggctcagtcaaggtttatcttcttcgtcgatatatggaccaccgtgcttgatctcaagtggaggtacaaaatgaccatctttatcacagcgtttctgggctcctggttcttcttcggactgctgtggtacgctgtagcgtatatccacaaggatctcccagagttccaccccagcgctaaccacaccccttgcgttgagaacattaatggattaacttccgccttcctcttctccctggaaacgcaagttacgattggatatggttttcgctgtgtcaccgagcagtgtgccacagctatctttttattgattttccagtctatcctgggagtgattattaactctttcatgtgtggggctatccttgctaagatatcccgtccgaaaaaacgtgctaagaccataaccttctcgaaaaatgccgtgatttctaaacgaggaggtaaattatgccttttgatcagagtggccaacctgcgaaagagcctgctgataggaagtcatatctacgggaaactgctgaagaccacagtcacccctgagggtgaaactattattttggatcagatcaatattaattttgtggttgatgcaggtaatgagaacttgtttttcatttctcctcttactatataccacgtgattgatcataacagtccattctttcacatggctgctgagactctgctacaacaggacttcgagctggtcgtgttcttagacgggaccgtcgaatcaacctcggctacttgccaggtccgaaccagttatgtgcccgaggaagtcctatggggctaccggttcgctcctattgtaagcaagactaaggaaggcaagtaccgggtggatttccataatttcagtaaaactgtggaggtggagacaccccactgtgccatgtgtttgtacaacgaaaaggacgtgcgtgccagaatgaagcgaggatatgacaacccaaattttatcctgtccgaggtgaacgaaaccgacgacacaaagatgtag

SEQ ID NO: 235628 - DNA, 1176 bp, synthetic construct
  misc_feature 1..1176: note = Description of Artificial Sequence: Synthetic coding sequence
  source 1..1176: mol_type = other DNA
atgaatgcctcttcccgcaacgtgttcgataccctgattagggtgctcaccgagtcaatgtttaagcatctccgcaaatgggtggttaccagattcttcggacattccaggcagcgggcaagacttgtctcgaaggacggtcggtgtaatatcgagtttgggaacgtggaagcccagagccggtttattttcttcgtggatatctggaccacggtcctggaccttaaatggcgatataagatgacaatttttatcaccgcctttcttggctcctggttcttctttggcctcctgtggtacgccgtcgcatatattcacaaagatctccctgaatttcacccaagcgctaatcacactccctgcgtcgagaatatcaatggtctcacgtctgcctttcttttctctctcgagactcaggttaccattggttatggctttcggtgtgttacagaacaatgtgccaccgcgatcttcttattaatctttcaatctattctcggagtgatcattaactcctttatgtgcggcgctatactggcgaagatctccaggcctaagaagcgcgcaaaaacaattaccttcagcaaaaacgccgtgatctcgaaacgcggaggtaaactctgcctgttaatccgcgtcgccaacttgaggaagtcccttctgatcggatctcacatctatggaaagttactgaaaaccaccgtgacaccggagggggagaccattatactggaccagatcaatattaactttgtagtcgacgccggaaatgagaacttattctttatttcccccctgacgatataccacgtgatagatcacaactcacctttcttccacatggcggctgagacgctgcttcagcaggatttcgagttggtggtttttctagatggtactgtcgagtctacatccgctacctgtcaggtgcgaacttcatatgtgcctgaggaggtgctgtggggttataggtttgccccaatcgtctcaaagaccaaggagggcaaatatagggttgactttcataacttcagtaagacggtggaagtcgagactccgcactgtgctatgtgcctgtataacgaaaaggacgtgcgggctagaatgaaacggggttacgataatcccaattttatcctcagtgaggtcaacgaaactgacgatactaaaatgtag

SEQ ID NO: 235629 - DNA, 1119 bp, synthetic construct
  misc_feature 1..1119: note = Description of Artificial Sequence: Synthetic coding sequence
  source 1..1119: mol_type = other DNA
atgttcaaacaccttcgtaaatgggtagtgacacggttctttggtcactcaagacagcgcgctcgtttggtttcaaaagacgggcgatgcaatattgagtttggcaacgtcgaggcccagagccggttcatttttttcgtcgacatttggactactgtcctcgatctcaagtggagatacaagatgaccattttcataactgctttcctgggcagttggttctttttcggtctgctctggtatgctgtcgcctacatccacaaagatttgcccgaattccatccatcagctaaccacaccccatgtgtcgagaatatcaatggcctcactagcgcattcctcttctccctggaaacacaagtaactattggttacggatttaggtgtgtcaccgaacaatgcgccacagccatatttctcctgatatttcaaagcatcctgggtgtgatcattaattcctttatgtgtggagcaatcctagccaaaatttctagacccaagaaaagggctaaaacaattacatttagcaagaatgccgtcatcagcaaaaggggcggaaagctatgcctccttattagggtggcgaacctgcggaagagcctgctaataggatcccatatttacgggaagctgctcaagacaactgttactccagagggtgagaccatcattctcgatcagattaatattaattttgtagtggatgccggaaatgagaatctgttcttcatctcccccctgaccatatatcacgtcatcgaccacaacagtccttttttccatatggccgctgaaactctgctccagcaagatttcgagctggtggtgttcctggatggaacggtggagagcacgtccgccacctgccaggtgagaacaagctatgtgccagaagaggtattgtgggggtatcgtttcgccccaattgtgtccaagacaaaagagggaaaataccgggtcgacttccacaacttttccaagacagtggaggtggaaactccccattgcgcaatgtgcctctataacgagaaggatgtgcgggcaagaatgaagcgaggatatgacaatcccaattttatcctctctgaggtgaatgaaaccgatgacacgaagatgtag

SEQ ID NO: 235630 - DNA, 1140 bp, synthetic construct
  misc_feature 1..1140: note = Description of Artificial Sequence: Synthetic coding sequence
  source 1..1140: mol_type = other DNA
atgacaagcgtcgcaaaagtatattattcccaaactacacaaacagagagccgtcctcttatgggacccggaatcagacgcagacgagtgctcaccaaagatggcaggagcaacgtgcggatggaacacatcgcagataagcgctttctgtaccttaaggatctgtggaccacttttattgatatgcagtggagatacaaattgctgttattcagtgctacattcgcaggcacctggttcctgtttggtgtggtgtggtatctcgtggcagtggcccacggggatcttctggagctggaccctcccgcaaaccatacaccttgtgtggtgcaggtgcacactctgacaggagctttcttgttcagcctggagagtcagactactatcggatatggctttcggtatatatccgaggagtgccctctggccattgttctcctgatcgctcagttggtgctgaccaccattctggaaattttcatcactgggactttcttggccaagatcgcccgaccaaaaaagagggccgagaccattcggttctctcaacatgctgttgtcgcttctcacaacggaaagccctgtctgatgatcagggtggccaacatgcgaaagtcactgctgatcggatgtcaggtgactggaaagctcttgcagacacatcagaccaaggaaggagagaacattcggctcaatcaggtgaacgtcactttccaggtcgatacagccagtgatagcccttttctgatcctgccactgactttctaccacgtcgtcgacgagacatcaccacttaaggatctacctctgagatcaggagaaggcgattttgagttggtcttgatactgtctggcaccgtggaatccacatccgcaacttgccaagtgcggacctcgtatctgcccgaagagatcctatggggctacgagttcacacccgcaattagcttgagcgcttccggcaaatatatagccgactttagtctcttcgaccaggtcgttaaggttgcctccccaagcggattgcgggactcgaccgtgcggtacggagatcccgaaaagttgaaactggaggagtctttaagggagcaggcagaaaaggagggaagcgccctgagcgtgaggatcagcaacgtatag

SEQ ID NO: 235631 - DNA, 1173 bp, synthetic construct
  misc_feature 1..1173: note = Description of Artificial Sequence: Synthetic coding sequence
  source 1..1173: mol_type = other DNA
atgctctccaggaagggcattattccagaggagtacgttctgacgcgcctagcggaggatccagcaaagccacggtatcgtgccaggcagcgaagagctagatttgtctcaaagaagggaaattgtaatgtagcccacaaaaacatccgggagcagggaaggttcttgcaggacgtgtttactaccctggtggatctgaaatggcctcacacactgctcatctttacaatgagtttcctctgcagctggttgttgtttgctatggcatggtggctcatcgcttttgcccacggagatcttgccccttcggagggtaccgccgaaccctgtgtgacgtctattcacagcttttctagcgcatttctgttttctatagaggtacaagtgaccattggatttggtggacggatggtgaccgaagagtgccccctggcgattctcatcctgatcgtgcagaatattgttgggttgatgatcaacgccattatgctagggtgcatttttatgaaaacggcacaagcacacagacgagccgagaccttgattttctctaagcatgccgtgattgctcttcgccatgggaggctctgttttatgttacgggtgggcgatctccgcaagtccatgatcatcagtgcaaccattcatatgcaggtcgtgagaaagactacaagcccggagggggaggtggtgcccctgcaccaagtggacatacctatggaaaatggcgtgggcggaaacagcatctttttggtggctcctctgattatctatcatgtgattgacgccaatagccccctctatgatctggcgccatcggatttacaccatcatcaggaccttgagattatcgtaatccttgaaggcgtcgtcgagacaaccggaataaccacccaggccaggacatcctacttggccgatgaaattctctggggacagagatttgtccctatcgtggctgaagaagatggcagatacagcgttgactacagcaagttcggaaatacagtgaaggtccctactcccttgtgcacagcaaggcaattagatgaggatcactccttgttagaagccttaaccctggcgtccgcacgcggaccattgcgaaaacggtctgtgccaatggctaaggccaaaccaaaattctccatcagcccggacagcctctcttag

SEQ ID NO: 235632 - DNA, 1302 bp, synthetic construct
  misc_feature 1..1302: note = Description of Artificial Sequence: Synthetic coding sequence
  source 1..1302: mol_type = other DNA
atgacagccgcttcacgggcaaacccgtattctatcgtgtcctctgaagaagacggcctgcatctcgtgaccatgagtggggctaacggatttgggaatgggaaagttcacacacgacggaggtgtaggaaccggttcgtgaagaagaatgggcagtgtaacattgaattcgccaacatggacgaaaagagtcaacggtatttggcagatatgtttactacctgcgtcgatattcggtggcgctacatgcttctgatcttctctctcgcatttctggcgtcctggctgttgttcggcattatcttctgggtgatcgccgtcgcccacggtgatctggagccggctgagggtaggggacgtacaccgtgtgtgatgcaagtccacggctttatggccgcatttcttttctccatcgagacgcagaccactatcggctatgggctcagatgtgtgactgaggagtgccccgtcgcggttttcatggttgtggcacagtccatcgtgggatgtatcatagactctttcatgataggagcaataatggccaagatggcaagacccaagaaaagggctcagaccctgctcttcagtcacaatgccgttgtggccttgcgcgacggtaagttgtgtctgatgtggagagtgggaaacttaaggaagtcccatatcgttgaggcccacgtccgagcacagctcatcaaaccgcgagttacagaagaaggggaatatataccactcgatcaaatagacatcgacgtgggtttcgacaaagggctggatagaattttccttgtgagcccaattacgattctccatgagattgacgaagccagtcctttattcgggatatcaaggcaagatctggaaaccgacgatttcgaaatcgtagtgattttagaaggtatggtggaggctaccgctatgaccacccaggccaggtcgtcctacctggctaatgagattctctgggggcaccgtttcgaaccagtgttattcgaagaaaagaaccagtacaaaattgactatagccattttcacaaaacctatgaggtgccaagcacaccacgctgtagtgctaaggatctcgtggaaaacaagttcttgcttccttctgctaattctttttgttacgaaaatgaattagccttcttgagccgggacgaggaagacgaagccgacggcgaccaggatggcagatccagagatgggctgtccccacaagcaagacatgactttgatcgcttacaggccggaggtggagtgctagagcagcggccttacagacgtgaatcagaaatatag

SEQ ID NO: 235633 - DNA, 819 bp, synthetic construct
  misc_feature 1..819: note = Description of Artificial Sequence: Synthetic coding sequence
  source 1..819: mol_type = other DNA
atggtcctgcttactgctgttctactgctgcttgccgcttacgcagggcctgcccagtcgctcggctctttcgtacactgcgaaccctgtgatgagaaggcccttagtatgtgtccacccagccccctgggctgcgagctagtgaaagagcctggttgcgggtgctgtatgacatgtgctctcgccgaaggtcagtcctgtggcgtttacactgagagatgtgcccaggggctccgatgtctcccaagacaggatgaggagaagccactacatgccctcctgcacggcagaggagtgtgcctgaatgagaagtcgtaccgggagcaagtcaaaatcgagagggactcccgggagcacgaagaacctacaacgtctgaaatggctgaggagacatattctcccaagatttttagacccaaacataccagaatctccgaacttaaggctgaggccgtgaaaaaagataggagaaaaaagttaacgcagagcaagttcgtgggcggagccgaaaatactgcccatcccaggatcatcagcgccccagaaatgcgacaggagtctgagcagggtccttgtcgcagacatatggaggcaagtttgcaggaactcaaggctagccccaggatggtgcccagggccgtgtacctgcctaattgcgacagaaaaggcttctacaaacgtaagcagtgtaaacccagtcgcggtcgcaaacgaggtatttgctggtgtgtggacaagtatggaatgaagctgccaggtatggagtatgtagacggggacttccaatgtcatacattcgattctagtaacgtggagtag

SEQ ID NO: 235634 - DNA, 285 bp, synthetic construct
  misc_feature 1..285: note = Description of Artificial Sequence: Synthetic coding sequence
  source 1..285: mol_type = other DNA
atggatagcagtaactgcaaagttattgcgcctctactctcgcagagatatcgacgtatggtgacgaaagatggccactccacccttcagatggatggcgcacagcggggtcttgcctacttgcgcgacgcatgggggatccttatggatatgaggtggcggtggatgatgttggtattttctgccagctttgtggtccattggctcgtgttcgcggtgctgtggtgtttctgtggggaagattgccctgccaagaaaagttcttttttcaacagtctgtactag

SEQ ID NO: 235635 - DNA, 1083 bp, synthetic construct
  misc_feature 1..1083: note = Description of Artificial Sequence: Synthetic coding sequence
  source 1..1083: mol_type = other DNA
atggacagctccaattgcaaagtgatcgccccactgctgtcccagcgctatcgccgaatggttacaaaagacgggcatagtactttacaaatggacggggcacagaggggcttggcttaccttcgcgacgcttggggcattctgatggatatgcggtggagatggatgatgctagttttctcagctagttttgtcgtgcactggttagtgtttgctgttctttggtacgtcctggctgagatgaacggagatctcgaattggatcatgacgccccacccgaaaatcacaccatttgcgtcaagtacatcacctcctttaccgccgcattctcttttagtcttgagacccaactcacaatcggctacgggaccatgtttccctctggagactgtccgtcagccatagccctgctcgctatccagatgctgctgggtctgatgctcgaggcatttatcacaggagcctttgttgcaaaaattgcacgcccaaagaatcgcgcattttctattagatttaccgatactgccgtcgtagctcacatggacgggaaacccaacctgatcttccaagtggccaataccagaccttctccattgacctctgtgagggtgtcggcagtgctctatcaggagcgggaaaatggaaagctgtaccaaacaagcgtggacttccacctggacggcatctcctccgatgaatgcccctttttcatatttccactcacatactaccacagcatcactccctcctcaccactggctacccttcttcagcacgagaaccctagccacttcgagcttgtcgtgtttttatcggcaatgcaggaggggactggagagatctgccagcggcgaacgtcttatctcccctctgaaattatgctgcatcactgttttgcctctctgctcacccgcggatctaaaggcgagtaccagatcaagatggagaattttgataagaccgtacccgaattccctactcctctcgttagcaagtcaccaaatagaacagacctcgatatccatatcaacggtcagtcaatcgacaactttcagatatcagagactggactcactgaatag

SEQ ID NO: 235636 - DNA, 1128 bp, synthetic construct
  misc_feature 1..1128: note = Description of Artificial Sequence: Synthetic coding sequence
  source 1..1128: mol_type = other DNA
atggacgccatccacattgggatgagctccacgccactagtaaagcatacggccggagctggacttaaggcgaaccggccacgcgtgatgtcaaaaagcggccatagcaatgttaggattgacaaggttgacggaatttaccttttgtatctgcaggacttgtggactactgttattgacatgaaatggcggtataagctgactctgttcgctgcgaccttcgttatgacctggtttctcttcggagtgatctactacgctatcgccttcatccacggcgacctggaaccgggtgagcccatatctaaccataccccttgcataatgaaagtcgactcactaacaggagctttcctgttcagtcttgagtcacagacgacaatcggctacggcgtacgctcaatcacggaggagtgtccccacgccatcttcttgctggttgcacagctggtgatcacgacgctcatcgaaatatttatcactggtacctttctcgcaaagatcgctcgccctaagaaacgcgcagagacaataaagttttcgcactgcgccgtcattacaaagcagaatggcaagctctgtcttgtgatacaggtggcgaatatgagaaaatctctgttgattcagtgccagctgagtggaaagctgttgcaaacccatgtgaccaaggaaggagagaggatactgctgaatcaggccactgtcaagttccatgtggacagtagtagtgaaagcccattcctgatcctgcccatgacattctatcacgtcctggatgagacgagccccctgcgcgacttaaccccccagaacctgaaggaaaaggaattcgagctagtggtactcctgaacgccacagttgagagcacttctgctgtgtgccaatcaagaacaagctacatcccagaggaaatttactggggtttcgagttcgtgccagtagtaagcctgtcaaagaatggaaaatacgtggccgattttagtcagttcgagcagatacgaaaaagccctgattgcaccttctactgtgcggactctgagaagcaacaactcgaagaaaagtatcgacaggaggatcaaagggagagggaactgaggacacttctcctgcagcagtcgaatgtctag

SEQ ID NO: 235637 - DNA, 186 bp, synthetic construct
  misc_feature 1..186: note = Description of Artificial Sequence: Synthetic coding sequence
  source 1..186: mol_type = other DNA
atggacgccatccacatcggcatgagctccacaccattggtgaagcacaccgctggtgctgggctgaaagccaacaggccaagagtgatgtctaaaagcggtcattccaatgtgcgcatagacaaggtggacggcatctacttgctgtaccttcaagacttgtggacgactgtcatcgacatgtag

SEQ ID NO: 235638 - DNA, 471 bp, synthetic construct
  misc_feature 1..471: note = Description of Artificial Sequence: Synthetic coding sequence
  source 1..471: mol_type = other DNA
atggacgctatccacattggcatgtccagcactcccctggtcaagcatacggcaggcgctggccttaaggctaacagaccaagagtgatgtccaagtcaggacactctaacgtcaggatagacaaggtcgacggcatctatttgctgtaccttcaggatctctggaccacagtaatcgacatgaaatggaggtataaactaaccctcttcgcagcaacattcgtaatgacctggttcctgtttggggtgatttactatgccatagcatttattcacggtgacttagaaccaggtgagcccatctccaatcataccccatgtatcatgaaagttgacagcttaactggcgcattcttatttagtctggagtcacagacaaccatcggttatggcgttcggtccattaccgaggaatgcccccacgccatcttcctgcttgttgcccaactcgttatcacgactctgatttag

SEQ ID NO: 235639 - DNA, 471 bp, synthetic construct
  misc_feature 1..471: note = Description of Artificial Sequence: Synthetic coding sequence
  source 1..471: mol_type = other DNA
atggacgcaatccacatcgggatgagttctaccccgctagtaaagcatactgcaggtgctggactgaaggcaaatcggcctagggtcatgtcaaagtcagggcatagcaacgtgcgcattgacaaagttgatggaatttatctgctctatctccaggatctgtggaccacagtgatagatatgaaatggagatacaaactgaccctcttcgctgcaacttttgtgatgacgtggtttctttttggtgtcatctattatgctattgcattcatccacggcgacttggaacctggtgagccgatttcaaatcatacaccgtgcattatgaaggtggattccctgaccggggcttttctgttcagcctcgaaagccaaacgactataggatatggggtgcgctccatcaccgaggagtgccctcatgctatcttcctgctggtagcccagttggtgattacaacattgatttag

SEQ ID NO: 235640 - DNA, 1128 bp, synthetic construct
  misc_feature 1..1128: note = Description of Artificial Sequence: Synthetic coding sequence
  source 1..1128: mol_type = other DNA
atggacgccattcacattgggatgagctctacacccttggtgaaacacacagctggcgctggactgaaagcaaatcggcctcgggtcatgtccaaatctgggcattcaaacgtccggattgacaaggtggacggtatctatctcctgtacctccaggatctctggactacagtcattgatatgaaatggagatataagttgactctgtttgccgcaacctttgtgatgacctggtttctgtttggtgtgatttactacgctatcgccttcatacatggcgacttggagccgggagagccgatcagcaatcatacgccatgtatcatgaaagtggactccctgactggggcttttctcttttccctcgaatcacaaacaactattggatatggagtgagatctataacagaggagtgcccccacgctattttcctattggtcgctcagctggtgatcactaccctgattgagatattcattacagggaccttcctggcaaaaattgcccgacctaagaaaagagccgaaacaatcaaattctctcactgtgcagtgatcactaagcaaaacggaaaactttgtctggtgatccaggtcgctaatatgcggaaaagcctgctgatacagtgccagctgtccggaaagctgttgcagactcacgtgacgaaggaaggtgaacgcattctattgaaccaggccaccgtgaaatttcacgtggactctagcagtgaaagcccctttctgattctccccatgaccttctatcacgttctggacgaaacatctcctctgagggacctcacaccccagaacctaaaggaaaaggaatttgagttggtggtgctgctcaacgcaacagtcgagtcaactagcgccgtctgccagtctagaacgagctacattccagaggaaatttactggggcttcgagttcgttcctgttgtctctctgtcaaagaacggtaagtacgtggccgactttagtcaattcgaacaaatccgtaaatccccagactgcactttctattgcgcagatagcgagaagcaacagctggaagagaaatacagacaggaagaccaacgagaacgtgagctcaggaccctgttgttgcaacagagcaacgtctag

SEQ ID NO: 235641 - DNA, 1128 bp, synthetic construct
  misc_feature 1..1128: note = Description of Artificial Sequence: Synthetic coding sequence
  source 1..1128: mol_type = other DNA
atggacgccatccatattgggatgagctcaaccccgttggttaagcatacggccggagccggtctgaaagccaaccggcctcgtgtcatgagtaaatccggacattcaaacgtcagaatcgacaaggtcgacgggatctacctactgtatctgcaagatctatggacaacggtgattgatatgaagtggaggtacaaacttacgctgttcgccgctacatttgtgatgacctggttcctttttggggtgatttattatgccattgcttttatacacggtgatcttgagccaggagagcctatcagcaaccatactccctgcatcatgaaagtggattctctgacgggcgcattcctgttctctcttgagtcccagactaccatcggctacggcgtgcggtctataaccgaagaatgcccgcacgcaatttttctacttgttgcccagcttgtgattaccacgctgattgagatctttatcactggcacatttctggccaagattgccagacctaagaaacgagccgagaccattaagttctctcactgtgccgtgattacaaaacagaatggcaagctgtgcctggtgattcaggttgccaatatgcggaaatctttgttaatccagtgccagctatcaggcaagctgctccagacccatgtcaccaaggagggtgagaggatactactgaaccaggctactgtgaaatttcacgtggactcatcctcggaatccccattccttatccttccaatgaccttctaccacgtgctggacgagacgagccccctgagggacctcaccccgcagaacctcaaagagaaggagtttgaattagtcgtgctcctgaacgccaccgtggagtccacttccgccgtgtgtcaatctaggacttcgtatattcctgaggagatctactggggtttcgaatttgtgccagtggtctccctgtcaaagaacggcaaatatgtcgctgacttttcccaattcgagcaaatccgaaagtcacccgattgtacattttactgtgcagacagtgagaaacaacagcttgaggaaaagtatcggcaggaagatcagagggagcgggagctccgtactttactgttgcagcagtctaatgtgtag

SEQ ID NO: 235642 - DNA, 1128 bp, synthetic construct
  misc_feature 1..1128: note = Description of Artificial Sequence: Synthetic coding sequence
  source 1..1128: mol_type = other DNA
atggacgccattcacattggaatgtcctcgacacctcttgtcaaacataccgctggcgctggcctcaaggccaacagaccacgcgtaatgagcaagtccggtcattccaatgttcggatagataaggtggatgggatttacttgctgtatcttcaggacctctggactaccgtgatcgacatgaagtggcggtacaagctgactctttttgctgcaacttttgtgatgacatggttcctgtttggcgtcatttattacgccatcgccttcatccatggagatttggagcctggtgaacctatctctaaccacacaccctgtattatgaaggttgactccctaacaggtgctttcctatttagtctcgagagccagactaccatcggctacggcgtgcggtctatcaccgaggagtgcccccatgccatttttttgctagtggcacagctggtcattaccactctcattgaaatcttcataaccggaacgttccttgctaagatagccaggccaaagaagcgcgctgagaccatcaagttctctcactgcgccgtgatcacgaagcagaacggaaagctgtgtctcgtgatccaggtcgctaatatgaggaagtcattgctcatccagtgtcagctctcagggaaattactacagacccatgtgactaaggagggggagcggattctgctgaatcaggccacggtgaaatttcatgttgattcttctagcgaatcgcctttcttaattctcccaatgacattttatcatgttctcgatgaaacgtctccactaagggatttgacgcctcagaacctgaaagaaaaagagttcgagctagtcgtactccttaatgctaccgtcgaatccaccagcgctgtgtgccagtccaggacctcatacattcccgaagagatttactggggattcgagttcgttcccgtggtctcactgagcaagaatggtaagtacgtggctgactttagccagttcgaacagatacgcaagtcgccagactgcactttctattgtgccgattccgaaaaacaacagttggaggagaagtataggcaggaagatcagcgtgagagagaattacgcacccttctcctgcaacaatcaaacgtatag

SEQ ID NO: 235643 - DNA, 1128 bp, synthetic construct
  misc_feature 1..1128: note = Description of Artificial Sequence: Synthetic coding sequence
  source 1..1128: mol_type = other DNA
atggatgctattcacatcggcatgagcagcacgcccctggtaaaacacacagcgggagcaggactgaaggccaacaggcctcgggtcatgagtaagtctggacacagcaacgtgcgaatcgacaaagtcgacggaatctaccttctgtacttgcaggacctatggactaccgtgattgacatgaagtggagatacaaactaaccctgtttgcagccacatttgtgatgacatggttcctttttggagttatctattacgcaatagcctttatccacggcgacttggaacccggtgaaccaatctctaaccacacgccgtgtatcatgaaggtcgatagcttgacaggcgctttcctattctccctcgaaagccagaccaccatcgggtatggcgtgcggtcgatcactgaggagtgcccgcacgcaatattcctgttggtggcccaactagtgatcaccaccctgattgagatcttcattacgggaacttttctggctaaaatagccaggcctaagaaacgggctgaaacaattaaattctcccattgtgcggtgatcacaaagcagaatggcaagctgtgcctggtgatccaggtcgcaaacatgagaaagtctttgctgattcaatgtcaactcagcggaaagctgctgcaaactcatgtgactaaggagggcgagaggatcctcctgaaccaggcgactgttaagttccacgttgattcatcttctgagagcccctttcttatccttcctatgacattttatcatgtgctggacgagaccagcccactccgagaccttaccccccagaatttgaaggaaaaagaatttgagctggttgttctccttaatgctacagttgaatctacatccgcagtatgtcagtctcgcacctcctatatacctgaagagatctactgggggttcgagtttgtgcccgtcgtatctctgagtaaaaacgggaagtatgttgccgatttcagccaattcgagcagatacggaagtccccagactgcacgttctactgtgccgactctgaaaagcagcagctcgaagaaaagtataggcaggaggaccagagagaaagggaattaaggaccctgctactgcaacagagcaacgtttag

SEQ ID NO: 235644 - DNA, 60 bp, synthetic construct
  misc_feature 1..60: note = Description of Artificial Sequence: Synthetic coding sequence
  source 1..60: mol_type = other DNA
atggacgccattcacattggcatgtcatcaactcccctggtgaagcatactgccggttag

SEQ ID NO: 235645 - DNA, 420 bp, synthetic construct
  misc_feature 1..420: note = Description of Artificial Sequence: Synthetic coding sequence
  source 1..420: mol_type = other DNA
atggacgccatccatatcgggatgtcgagcaccccactcgtgaagcataccgccggagccggactgaaagcaaatcgtccacgagtgatgtcaaaatcgggtcattctaacgtcagaatcgataaggtggacggaatatacctgctgtatttgcaagacttgtggaccaccgtcattgatatgaagtggcgttacaagctgactcttttcgccgcaacgttcgttatgacatggttcctgtttggagtcatatattatgcaatcgcgttcatccatggagatctggaaccaggcgaaccgatatccaaccataccccctgtatcatgaaggtcgatagcttaaccggcgctttcctgttctcgctggagtcacagacaacgatcgggtatggcgtgcgttccattacagaggagtgttag

SEQ ID NO: 235646 - DNA, 738 bp, synthetic construct
  misc_feature 1..738: note = Description of Artificial Sequence: Synthetic coding sequence
  source 1..738: mol_type = other DNA
atggacgcgatccacatcgggatgagctctactcctctcgtgaaacacaccgccggtgctggattaaaggccaaccgaccaagagtgatgagcaagtccggccactctaatgttcgaatcgacaaggtggacggaatctatctcttgtatctgcaagatctctggacgactgtgatcgacatgaaatggcgctacaagctgacgttgtttgcagcaactttcgtaatgacttggttcctgtttggcgtgatctactacgccattgcctttattcatggagacctggaaccgggtgagcctatttcgaatcacaccccatgcattatgaaagtggactctctgaccggagcctttctgttttcgctggagtcgcagactactattgggtacggggttcggagtatcacagaagaatgtccacacgctatattcctcttggttgcgcagctggtgatcacaaccctgatagagatatttatcacgggtactttcttggcaaagatcgctcgcccaaaaaagagggctgagaccataaaattttcgcactgcgccgtcatcacaaaacagaatggcaagctttgcctggtgatccaggtagccaacatgcggaaatccttactgattcagtgccagctgagtggaaagcttctgcagactcacgttacgaaggaaggtgagcgtatccttctgaatcaggcgacagtgaagtttcacgtggatagctcaagtgagtcgtag

SEQ ID NO: 235647 - DNA, 120 bp, synthetic construct
  misc_feature 1..120: note = Description of Artificial Sequence: Synthetic coding sequence
  source 1..120: mol_type = other DNA
atggatgcaattcacatcggtatgtcttctactccgctagtgaaacacaccgcaggcgcaggactgaaggccaaccggccaagagtgatgagcaaaagtgggcactccaatgtgaggtag

SEQ ID NO: 235648 - DNA, 147 bp, synthetic construct
  misc_feature 1..147: note = Description of Artificial Sequence: Synthetic coding sequence
  source 1..147: mol_type = other DNA
atggatgcaattcacatcggaatgtccagcacccctttggttaagcatacagcaggcgcaggccttaaagccaatcggccacgggtgatgtcgaagtctggacactcaaatgtgagaatcgacaaggtggacggcatctacttgtag

SEQ ID NO: 235649 - DNA, 147 bp, synthetic construct
  misc_feature 1..147: note = Description of Artificial Sequence: Synthetic coding sequence
  source 1..147: mol_type = other DNA
atggatgccattcacattggtatgagtagtactcccttggtcaagcacaccgctggcgctggcctcaaggcaaacaggcctcgggtcatgtctaaaagtggccactccaacgtgaggattgacaaagttgacgggatctacctttag

SEQ ID NO: 235650 - DNA, 147 bp, synthetic construct
  misc_feature 1..147: note = Description of Artificial Sequence: Synthetic coding sequence
  source 1..147: mol_type = other DNA
atggacgcaattcacattggcatgtctagcacccctctcgtgaagcacacagcaggcgctggcctcaaggccaaccgtcctcgcgtaatgagtaaatccggccactccaatgttagaatagataaggtcgatggaatctatctgtag

SEQ ID NO: 235651 - DNA, 78 bp, synthetic construct
  misc_feature 1..78: note = Description of Artificial Sequence: Synthetic coding sequence
  source 1..78: mol_type = other DNA
atggatgccatccatatcgggatgagctctacacctctggttaagcatacagctggcgctgggctaaaggctaactag

SEQ ID NO: 235652 - DNA, 147 bp, synthetic construct
  misc_feature 1..147: note = Description of Artificial Sequence: Synthetic coding sequence
  source 1..147: mol_type = other DNA
atggacgctatccacatcggcatgtctagtactccactggttaaacataccgctggggctgggttaaaagcaaacaggcccagggtgatgagcaaaagcgggcactccaatgtaagaatcgacaaagtcgacgggatttatctgtag

SEQ ID NO: 235653 - DNA, 147 bp, synthetic construct
  misc_feature 1..147: note = Description of Artificial Sequence: Synthetic coding sequence
  source 1..147: mol_type = other DNA
atggacgcaatacatatcggaatgtccagtactcctctggtgaaacatactgccggagcgggactgaaggcgaatcgacctagagttatgtctaagagcggtcattcaaatgtccgaatagataaagttgacggcatctacctgtag

SEQ ID NO: 235654 - DNA, 147 bp, synthetic construct
  misc_feature 1..147: note = Description of Artificial Sequence: Synthetic coding sequence
  source 1..147: mol_type = other DNA
atggatgcaatacatatcggcatgagttccacacccctggtgaagcacacagcaggcgcaggcttgaaggcaaatagacccagggtgatgtctaagagtggtcactctaatgtgcgcatcgataaagttgacggaatatatttatag

SEQ ID NO: 235655 - DNA, 1257 bp, synthetic construct
  misc_feature 1..1257: note = Description of Artificial Sequence: Synthetic coding sequence
  source 1..1257: mol_type = other DNA
atgtcatattatggaagcagttaccacatcatcaacgccgatgctaagtaccccggttatcctccagaacacataatcgcagagaagcggagagcgagaaggcgtctcctgcataaagatgggagttgtaatgtctatttcaagcacatcttcggggaatgggggtcttatgttgtcgacattttcactaccctggtggacactaaatggcggcatatgtttgtaattttcagtttatcgtacatcctgtcttggctgatttttggctcagtgttctggctgatcgccttccatcacggggatttattaaacgatcccgacattactccctgcgttgataacgtccactccttcacaggagcttttctgttttcactcgagacacagaccacaatcggctatggatacagatgcgtgacagaagagtgctctgttgccgtgctgatggtcatcctccagagtatcttatcgtgcattatcaatacattcatcattggtgcggctctagctaaaatggctactgccagaaaacgcgctcagacaatccggttctcgtatttcgctttgattggtatgagagacggaaagttgtgtctaatgtggcggatcggcgatttcagacctaaccacgttgtggagggaacagtgagggcgcaactgctaaggtataccgaggatagcgagggaagaatgaccatggcgttcaaggacctaaagttagtaaatgaccagattattctcgtaactcccgtgaccatcgtccacgagattgatcacgagtccccactgtatgcgttggacagaaaagccgtggcaaaagataacttcgagattctcgttacattcatttatacaggggactctactggcacgagtcaccagtctcgctcaagctacgttcccagggagatcctgtggggacatcgcttcaacgatgtgcttgaagtgaaaagaaaatactacaaagtgaactgtctgcagtttgaaggttcggtggaggtgtatgcccctttctgcagcgccaagcagttggattggaaggaccaacagcttcacatcgaaaaggcccctccagtgagggagtcctgcacctcagataccaaagctcgtaggcgatcctttagtgccgtggccatagtgtctagctgtgagaaccccgaagagaccaccacttccgccactcacgaatatagggagacaccctatcagaaagcactcctgactcttaacagaatctccgtggagagccagatgtag

SEQ ID NO: 235656 - DNA, 1257 bp, synthetic construct
  misc_feature 1..1257: note = Description of Artificial Sequence: Synthetic coding sequence
  source 1..1257: mol_type = other DNA
atgtcctactacggttcgagttatcatatcatcaatgctgatgcgaagtatcccggatacccacctgagcacataatcgccgagaaaaggcgcgcaaggcggaggctactacacaaagacgggtcctgtaatgtgtactttaagcacatatttggggagtggggcagctacgtagttgacatctttacaacattggtggacaccaagtggcgtcacatgttcgtgatcttctctctaagttatatccttagttggctcatcttcgggagcgtcttttggctcatagcctttcatcacggcgatcttttaaatgaccccgacatcaccccctgtgtggacaacgtgcactccttcacaggcgcttttttattttctctagaaactcagaccactatcggatacggctacaggtgcgtcactgaagagtgtagtgtcgccgtgctaatggtgattcttcaaagtattctatcctgtatcatcaacactttcatcatcggggcagcattagcgaagatggcaactgcccgaaagcgcgcacaaaccatccgattttcctatttcgcactcataggaatgcgcgacggaaaactgtgtctcatgtggcggataggagactttcgaccaaaccatgtcgtcgagggtaccgtgcgggcacagctccttcggtatactgaggacagtgagggtcggatgactatggcatttaaggaccttaagttagtaaatgaccagatcatcttagtaacaccggtgacaatagttcacgaaatcgaccatgaatcccccctttatgcactggatcgaaaggccgtggccaaggataacttcgagatcctggtaacgttcatttatacaggagacagcaccgggacttctcaccagtctcgtagttcgtatgtcccacgggagatcctctggggccacagattcaatgacgtgttggaggtgaagagaaagtattacaaggttaactgtctgcagttcgaaggtagtgttgaggtatacgctcccttctgcagcgccaaacagctcgattggaaggaccagcagcttcatatcgagaaagcaccccctgttcgagagtcctgcaccagtgatactaaggctcgcagaaggtctttttccgctgttgctattgtgtcatcttgtgagaatccagaagaaaccacaacgtcggccacacatgagtaccgcgagacgccctaccaaaaggcactgttaactctcaacagaatcagcgttgagtctcagatgtag

SEQ ID NO: 235657 - DNA, 1257 bp, synthetic construct
  misc_feature 1..1257: note = Description of Artificial Sequence: Synthetic coding sequence
  source 1..1257: mol_type = other DNA
atgagttactacggcagcagctatcacatcattaatgccgatgccaagtaccccggatatccccctgaacatatcattgctgaaaagcggagagccagacgcagactgctgcacaaggatggctcttgcaatgtgtacttcaagcacattttcggggaatgggggtcatacgtggtggacatctttacaacactggttgatacaaagtggagacacatgtttgtgatattcagcctgagttatatcctgagctggctgatcttcggctctgtgttttggcttatagcatttcatcacggagatctcctcaatgacccagacattacaccgtgcgtggacaacgtgcatagctttacaggagcatttctgttcagcctcgagacccagactaccataggctacgggtaccggtgcgtaaccgaggagtgttctgtggccgtactgatggtaatattacagagcatattatcttgtatcattaacactttcattattggggctgccctcgctaaaatggctactgctcgcaaaagagcacagacaattcgattctcttatttcgccctgatcggaatgagggatggcaagctctgcttaatgtggagaattggggattttaggcccaaccatgtcgtggaaggaactgtgcgggcacagttactgagatacaccgaggactcggagggcaggatgaccatggcttttaaggacctaaaactcgtcaatgatcagatcatcctggtgacaccagtgacgatcgtgcatgagatcgaccatgagtctcctctgtacgccctggatcggaaggctgtggccaaagataatttcgagatcctggtcacatttatctacacaggcgacagcacaggcacgtctcatcagagccggagttcctacgtcccgagggaaattttgtgggggcacaggttcaacgacgtccttgaagtcaagcgcaaatattacaaagtgaattgcctccagttcgaaggaagtgtagaggtttacgccccattttgttcagccaaacagctggattggaaagatcagcagttgcacattgaaaaagcacccccagtgcgtgagtcctgtaccagtgacaccaaagcacggaggcggtctttttcggcagtcgccattgtgtcttcctgtgagaatcctgaggagacaaccacttctgcaacgcatgaatatcgggaaacaccttatcagaaggctctcctaacactgaacaggatctccgtggagtcgcagatgtag

SEQ ID NO: 235658 - DNA, 1284 bp, synthetic construct
  misc_feature 1..1284: note = Description of Artificial Sequence: Synthetic coding sequence
  source 1..1284: mol_type = other DNA
atgggctctgtgcggaccaatcgctatagcatcgtgtcgtccgaggaggacggcatgaaattagctaccatggcggttgccaacggtttcggcaacggaaaatctaaggtacacaccagacagcagtgccggagtagattcgtcaaaaaggatggccattgcaatgttcagtttattaacgtcggcgaaaaaggtcagaggtatctcgcggatatatttacaacctgtgttgatatccggtggagatggatgctcgttatattctgcctcgcgtttgtcctctcatggctctttttcgggtgcgtgttctggttaatcgccctactccatggcgatctggacgcatccaaggagggaaaggcctgtgtatctgaagtcaacagttttacagctgcattcttgtttagcatcgagacccagaccaccatagggtatggttttcgatgcgtaacagatgaatgtcccatcgccgtatttatggtggtgttccagtcaatcgtcggatgtatcatcgatgccttcataatcggcgctgtaatggccaagatggccaaacccaaaaagcgaaatgaaaccctcgtgtttagccacaatgctgtgatagcaatgcgggacgggaagctctgcctgatgtggcgcgtgggcaacctgcgtaagtcacatcttgtggaggctcacgtgcgagcccagttactgaagtcccggatcacttcagaaggggaatacatccctctcgaccagattgatataaacgtcggcttcgatagtggcattgatagaatctttctggtgtcgcctataacaatagtccacgagattgacgaagactctccactctacgacctcagcaaacaggacatagacaatgcagatttcgagatcgtggtaatacttgagggtatggtagaggctacagctatgacaacacagtgccggtcctcgtacttggctaatgagattttatgggggcatcggtacgaacccgtgctgttcgaggagaagcattattataaagtggattattcgcgattccacaagacctatgaagtgcctaacacccctttatgttctgccagagatctggcggagaaaaaatatattctctctaacgccaactctttctgttacgaaaatgaagttgctctcacttcaaaagaggaggatgattctgagaacggcgttcctgaatccactagtaccgacactccgccagacattgatctacacaatcaagccagtgtccctcttgagccacgcccattgaggagagaaagcgagatctag

SEQ ID NO: 235659 - DNA, 1284 bp, synthetic construct
  misc_feature 1..1284: note = Description of Artificial Sequence: Synthetic coding sequence
  source 1..1284: mol_type = other DNA
atgggctccgtgcggactaatcgttatagcatcgtatcttcagaagaggacgggatgaagcttgccaccatggctgtcgccaacggctttggcaacggaaaaagcaaggtgcatacccggcagcagtgtagatctcggtttgtgaagaaagacgggcactgcaatgtccagtttatcaatgtcggggagaaagggcaaaggtacctggccgacatttttaccacctgcgtcgatattcgctggagatggatgctggtcatcttctgtttagcgtttgtcctgagttggttattctttgggtgtgttttttggctcatcgccctgctgcatggagacttggacgccagcaaggagggaaaggcttgcgtgtctgaagtcaacagttttacagccgcattccttttttcaatagagacccagacaaccattgggtacggattcaggtgtgttacagatgaatgcccaattgccgtctttatggttgtgtttcagtcaattgtgggttgcattatcgatgcttttatcatcggcgctgtcatggcaaagatggcaaagccaaagaagagaaatgaaaccctggtgttttcacacaacgccgttattgccatgcgcgatgggaaactgtgcctcatgtggcgcgtgggcaatcttcgcaaatcccatctagtagaggcccacgtcagagcccaacttcttaaatcacgcataactagcgaaggagagtatattccactggatcagatcgacatcaatgttggattcgacagcggcatcgacaggatttttttggtttcccccatcaccatcgtgcacgaaatcgatgaagactctccgttgtatgacctgtccaagcaagacatcgataacgcagactttgagattgttgtaatcctggaaggaatggtcgaagcaacagctatgacaacccagtgtcgcagttcctacctcgcaaatgagatactgtgggggcatagatacgagccagtcctgtttgaggagaagcattattacaaagttgattatagccggtttcataagacttacgaagttcctaatactcccttgtgttctgccagagatctggctgagaaaaagtatatactgagtaatgctaattccttctgctatgaaaacgaggttgccttaacttccaaagaagaggatgatagcgaaaatggcgttcctgaatccacgtccaccgatactccgccagatattgacttacacaatcaggcatcagtccctctggaaccaagacccctgagaagggaaagcgagatctag

SEQ ID NO: 235660 - DNA, 1506 bp, synthetic construct
  misc_feature 1..1506: note = Description of Artificial Sequence: Synthetic coding sequence
  source 1..1506: mol_type = other DNA
atgagcgccctcagaaggaagtttggtgatgactaccaggtcgtcacgacgagtagcagtggtagcggactgcagccccaggggcctggtcaggaccctcagcagcaattggttccaaaaaagaagcggcagagatttgtcgataaaaatggccgttgcaacgtgcaacatggcaacctgggttccgagacatcaaggtacttgtcggatttgtttaccaccctcgtggacctgaagtggcgctggaacttatttatattcatcctcacctatacagtcgcctggctgtttatggcttcgatgtggtgggtgattgcctacacccgcggagatttgaataaggcacacgtggggaattataccccctgcgtagcaaatgtgtataacttcccatccgcctttctctttttcatcgagaccgaagctactatcggctatggctatagatatatcactgacaagtgccccgaaggaatcattcttttcttgtttcagtcaatcctgggctctattgtggacgccttcctcataggatgtatgttcattaagatgagtcagcccaaaaagcgtgcggagacccttatgttctccgaacatgccgtgatttccatgcgtgatggcaaactcactctgatgttccgggtgggcaacctacggaactcccacatggtgtctgcgcagatcaggtgcaaactgcttaaatcaagacaaacacctgaaggagagttcttgcctttggaccaacttgaactggacgtgggcttttctaccggcgcagaccagctctttctggtgagcccacttaccatttgccacgtcatcgatgccaaaagcccattctacgacttgtcgcagagaagcatgcagacagagcagttcgaaatagtggtcatccttgagggaattgtggaaacgactggtatgacctgccaggccagaacctcatatacagaggacgaggtgctctggggccaccgattttttcccgtcattagccttgaagaagggttcttcaaagtagactacagtcagttccacgccacattcgaagtacccactcccccatatagcgtcaaggagcaggaggagatgctgctgatgagcagccctctaattgccccagcaatcacaaatagcaaggagcggcacaattcagttgagtgcctcgacggactggacgacattactacaaaactccccagcaagttacaaaaaatcacaggcagagaggattttcctaagaagctgctgcggatgagtagtaccacatctgaaaaggcctattcgctgggtgacctgccgatgaagttgcagcgcatctcttctgtgcccggaaacagcgaagagaagctcgtgagtaaaactactaagatgctcagcgatcccatgtcgcagtcggtggccgatcttcctccaaagttacaaaagatggcagggggagctgcgaggatggaaggtaatctgccggctaaattaaggaagatgaattccgaccggtttacctag

SEQ ID NO: 235661 - DNA, 708 bp, synthetic construct
  misc_feature 1..708: note = Description of Artificial Sequence: Synthetic coding sequence
  source 1..708: mol_type = other DNA
atgtccgcacttaggagaaaattcggagacgattatcaggttgtaaccacttcttcctccggatcaggactccagcctcaggggccaggacaggacccacagcagcagctagttcccaagaaaaagcggcagcgctttgtggacaagaatggccgttgtaacgtgcagcacgggaacctcgggtctgaaacctctagatatctgtccgacctctttactacactggttgatttgaagtggcggtggaacctatttatcttcatactgacttacaccgtggcttggcttttcatggcatctatgtggtgggtgatcgcttacacaagaggcgacctgaataaagctcatgtgggcaactacaccccctgtgttgcgaatgtctataattttccatccgcttttttgttttttattgagaccgaggcaaccatcggttatgggtaccggtatatcacggacaagtgtcctgagggcatcatactctttctgttccagtcgatactcggaagcatcgtggatgctttcctgattgggtgtatgttcataaagatgtctcaacccaagaagcgggctgagacactgatgttctccgagcacgctgtaatttcgatgagggatggtaagttgaccctgatgtttcgagtcggcaatctcagaaacagccatatggtttctgctcaaattagatgcaaacttctgaagggatag

SEQ ID NO: 235662 - DNA, 1338 bp, synthetic construct
  misc_feature 1..1338: note = Description of Artificial Sequence: Synthetic coding sequence
  source 1..1338: mol_type = other DNA
atgcacgggcactctagaaacggacaagcgcacgtcccaagaaggaaaagaagaaatcgattcgtgaagaagaacggtcagtgcaacgtctacttcgccaacctttctaataagtctcagcgttacatggccgacatttttacaacatgcgttgatactagatggcgttatatgttaatgatttttagcgcagccttcttagtgagttggctgtttttcggattgttattctggtgcatagcgttctttcacggagatttggaggctagccctggcgttccagccgctggtgggcctgccgctgggggtggaggcgctgcccctgttgccccaaagccttgtataatgcatgtgaatggatttttaggggcattcctttttagtgtcgaaacccagacaaccatcgggtatggttttaggtgcgtgactgaagaatgtcctctggcagtgatcgccgttgtagtccagtctatcgtgggatgtgtgatagatagttttatgatcgggacaatcatggccaaaatggccagacctaagaaaagagcccaaacactgcttttcagtcatcacgctgtcatttcagtgcgcgatggcaagttatgcctgatgtggcgtgtcggaaacctcaggaagagccacatcgtggaggctcacgtgcgcgcacagctgattaaaccctacatgactcaggagggggagtacctgccactggatcagcgcgacttaaatgtgggatatgatatcggtcttgaccggattttcctggtttccccaatcattatcgttcatgaaatcgacgaagactccccactgtacggcatgggcaaggaggagctggaatctgaggacttcgaaatcgtggtcatccttgagggtatggtcgaagccacagcaatgaccactcaggcgagatccagctaccttgcttccgagatcctgtgggggcacaggtttgaacccgttgtattcgaggaaaagtcccactataaagtcgattattccaggttccataagacttacgaggtggcgggtactccttgttgctctgccagggaactgcaggaaagcaaaattaccgtactccccgctccccctccaccgccttctgctttttgttatgagaatgaactcgcgcttatgtcccaggaggaggaggagatggaggaggaggcggctgcagccgctgccgtggctgccggtctcgggctggaggctgggagcaaggaagaagctggaatcataagaatgcttgagtttgggtcgcaccttgatttggaacgcatgcaggcctcacttcccctcgataacatctcttaccgcagggaaagcgctatttag

SEQ ID NO: 235663 - DNA, 1260 bp, synthetic construct
  misc_feature 1..1260: note = Description of Artificial Sequence: Synthetic coding sequence
  source 1..1260: mol_type = other DNA
atggcaggagatagccgaaacgccatgaatcaggatatggagataggggtgacaccttgggatccgaaaaagattcccaaacaagccagggattatgtgcccatcgctacagaccggacacgcttgctggccgaggggaaaaagcccaggcagaggtacatggaaaagagcgggaagtgtaacgtccatcacggcaatgtgcaggaaacttaccggtacctcagcgatctttttacgaccctggtggatctcaaatggcgctttaacctgctcgtctttacaatggtgtatactgtgacctggctatttttcggattcatttggtggttgattgcatatataagaggggatcttgaccacgtcggggatcaggaatggattccgtgcgtggagaatctgagcgggttcgtcagtgcctttcttttctcaatagaaaccgagacaacaataggatatggctttagagtcattacagaaaagtgcccagagggcattatcctgcttctcgtgcaggcgatcctaggtagcatagttaacgccttcatggtcgggtgcatgtttgtgaagatctcgcaacctaagaaacgtgctgagacccttatgttcagtaataacgcagtaataagtatgcgggatgagaagctttgtttaatgtttcgcgtaggagacctcaggaactcccacattgtggaagcctctatcagggctaagctgataaagtctcggcagacaaaagaaggcgagttcatccctctcaaccaaactgacataaacgtgggctttgacaccggagatgataggctcttcctcgttagtcccctgatcatctcacatgagattaatcagaagagcccattctgggagatgtcccaggcacagctccaccaggaggagtttgaggtcgtcgttattctcgaggggatggtggaagccaccggcatgacttgtcaggccagatcaagttatatggatactgaggttctgtggggccaccgattcaccccggtcttaaccctggagaaggggttctatgaggtggactataacacctttcacgatacatacgagactaacacaccttcatgctgcgcaaaggaattagccgaaatgaaacgcgagggtagattgctccagtatttaccatctcccccattgttagggggatgcgcagaagccggacttgatgcagaagcagagcaaaatgaggaggacgagcccaaagggctgggcggaagtcgcgaggcgagaggtagcgtatag

SEQ ID NO: 235664 - DNA, 1260 bp, synthetic construct
  misc_feature 1..1260: note = Description of Artificial Sequence: Synthetic coding sequence
  source 1..1260: mol_type = other DNA
atggcaggagatagccgtaatgcaatgaaccaggatatggagatcggagtcacgccgtgggatccaaagaagatacctaagcaggcccgtgattacgtacctatagcaaccgatcgcactagattacttgcagaaggcaaaaagcctagacagaggtatatggagaaaagtgggaaatgtaatgtccaccacgggaatgttcaggagacctatagatatctgagtgatctcttcaccactctggtggacctgaagtggcggtttaacttgttggtctttacaatggtgtacaccgtcacatggctgttctttggcttcatttggtggctcattgcctatatccggggtgatctggaccacgtgggagatcaggaatggatcccctgcgtagagaaccttagtgggtttgtaagcgcatttctatttagcatcgagacagagacaaccatcggctatggatttagagtgattacagagaagtgtcccgaaggcatcattctgttgctggttcaggctattttgggatctattgtcaatgcatttatggtggggtgtatgtttgtcaaaatttcccagcccaagaagagggccgaaacgctgatgttcagcaacaatgccgtgatctcaatgcgagatgagaagctctgcctgatgttcagggtgggggacctcagaaactcccacattgtggaagcttctattcgagccaaactgattaagtcccggcaaaccaaggagggagaatttatacccctgaatcagaccgatatcaatgtggggttcgatacaggggacgaccggctgttcttagtaagccccctaataatctctcatgagatcaatcagaagagcccattctgggagatgtctcaggcccagctgcatcaggaggagtttgaggtagttgtgatactcgagggcatggtggaagctacgggcatgacatgccaggccaggagctcttacatggacaccgaggtactctggggacaccgctttacccctgtgttgacattggagaaaggcttctacgaggtggattataataccttccatgatacctatgagactaataccccaagttgctgtgctaaagaactggccgagatgaagagagagggaagactccttcagtaccttccttctcctcccttactcggaggatgtgccgaggccggtctggacgccgaggctgagcaaaatgaggaggatgaaccaaagggactgggtgggtcccgcgaagcacgcggttccgtctag

SEQ ID NO: 235665 - DNA, 1260 bp, synthetic construct
  misc_feature 1..1260: note = Description of Artificial Sequence: Synthetic coding sequence
  source 1..1260: mol_type = other DNA
atggctggcgatagtcggaacgccatgaatcaagacatggaaattggggtgaccccttgggatcccaaaaaaatcccaaaacaggccagagactacgtgccaattgctaccgacaggactcgtttactcgccgaaggtaagaagcctcggcagaggtacatggagaagagcggaaaatgcaatgtccaccacggcaacgttcaggagacctaccgatacctgtctgacctgtttactaccttggtggatctcaaatggaggttcaatcttctggtgtttaccatggtatacacggtgacttggctattctttgggtttatatggtggctcatcgcttacattcgtggcgatttagaccatgtgggtgatcaggagtggataccttgcgtggagaacctgagcggattcgtgtccgcattcctgttttccattgagaccgaaactactattgggtatgggtttagggtgataaccgaaaagtgcccagaaggaattatcctgcttcttgtgcaagcaattctgggatccattgtgaacgctttcatggtgggctgtatgttcgtcaagattagtcagcctaaaaagcgcgctgagaccctgatgtttagtaacaatgctgtgatctctatgcgggatgagaagctgtgcttgatgttccgcgttggcgatttacgcaactcccacattgtcgaagcaagcatccgcgctaagttaattaagtcccgccaaactaaggagggagagttcatcccactgaaccaaactgacattaacgtggggttcgatacaggtgacgacaggctgtttctcgtctcacccctcatcatctcccacgagatcaaccagaagagcccattttgggagatgagccaggcacagctgcaccaagaggaattcgaggtggttgtgatactcgaaggaatggtggaggccacgggtatgacatgtcaggcccgttcctcttatatggacacagaggtcctatgggggcaccgattcacgccagtcctgacactcgaaaagggattttatgaggtcgattataacacattccacgacacctatgaaactaacaccccctcatgttgcgctaaagaattggctgaaatgaaacgggaaggcaggcttctgcagtatctccccagcccccctctgctgggaggttgcgctgaagccggattggatgccgaagccgagcagaatgaggaggatgaacccaaaggccttggcggatcacgcgaagcccgtgggtcagtttag

SEQ ID NO: 235666 - DNA, 1272 bp, synthetic construct
  misc_feature 1..1272: note = Description of Artificial Sequence: Synthetic coding sequence
  source 1..1272: mol_type = other DNA
atggccaagctgaccgagagcatgacaaacgtattagagggtgacagcatggatcaggatgtcgaatctcctgtggccattcatcagccgaaacttccaaagcaggccagggacgacttgcctcggcatatcagcagagacaggactaagcgaaaaattcaaaggtacgttagaaaagacggtaagtgtaacgtccatcacggaaacgtgagagagacatatagatatttgaccgacattttcaccaccctcgtagaccttaagtggaggttcaatcttcttatcttcgtaatggtgtataccgtgacatggctgttttttggaatgatctggtggctcattgcctatatcaggggggacatggatcatattgaggatccctcttggacaccatgcgttacgaatctgaacggctttgttagcgcatttctgtttagtattgagacagaaacaaccatcgggtatggataccgagttattaccgacaagtgccctgaagggattattctactgctgatacaatctgtcctgggcagtatcgtgaatgcgtttatggtgggatgtatgttcgtgaagatcagccaacccaaaaagcgagctgaaacacttgttttcagcacccacgctgtgatttctatgagagacgggaagctctgcctcatgtttcgggttggcgaccttagaaattctcacattgttgaagcctctatccgggcaaagctaattaaaagcaagcagaccagtgaaggagagtttattcctctcaatcagactgatatcaatgtgggatattatactggtgatgaccggctttttctggtttctcctttgattattagccacgagataaaccagcagtcaccattttgggagatctctaaagcccagctacccaaggaggaactggagatcgtcgtgatattggaaggtatggtggaggctacagggatgacatgccaggcacggagttcttacattacttccgaaatcttatgggggtataggttcacaccagtccttactcttgaggatggattctacgaggttgattacaactcgtttcatgagacctacgagacctcgactccctcgctgtcggcaaaagagctcgccgagttggctagccgtgctgaactgcccctgagttggtcagtgtcttctaagctcaaccaacacgccgaactcgaaactgaggaggaagagaaaaatttggaggagcaaactgagagaaacggcgacgtagcaaatcttgagaacgaatctaaggtatag

SEQ ID NO: 235667 - DNA, 1272 bp, synthetic construct
  misc_feature 1..1272: note = Description of Artificial Sequence: Synthetic coding sequence
  source 1..1272: mol_type = other DNA
atggctaagctcacagaatcaatgaccaacgtgctggagggagattcaatggaccaagacgtggagagtccagtcgcgatccatcagcctaagttaccaaaacaggccagagacgatcttccaaggcatatctcccgagaccggaccaagcgcaagattcagaggtatgtgcgaaaagatggtaaatgtaacgtgcaccacgggaatgtaagggagacgtatcgatatctaacggacatctttacaactcttgttgacctgaaatggagatttaatctgttaattttcgtgatggtatacaccgtgacatggctgttttttggcatgatttggtggctgatcgcttatattaggggagatatggatcacatcgaggacccatcgtggacaccttgcgtgactaacctaaatgggttcgtctcagcctttctgttctcgattgaaaccgagacaaccataggctatggttacagagtgattaccgataagtgccctgaagggatcattttactactgatccagagcgttttgggctctatcgtcaatgctttcatggtggggtgcatgtttgtgaaaattagtcagccaaaaaagcgggctgagactttggtgttttctacgcatgccgtcatttcaatgagagacggtaagctatgcttgatgtttcgtgtcggggacctgcgcaattctcatattgtggaagcctccattagagcaaagctcatcaaatctaagcagacttcagaaggggagttcattccgctgaaccaaaccgacatcaacgtaggttactatactggagacgatagactctttttggtatcgcctttgattatatcccacgaaatcaatcagcagagtcctttctgggaaattagcaaagcgcagctgcccaaggaggagctggagatcgtggtgatactggagggaatggtagaagctacgggcatgacatgccaagctaggagctcatatattacttccgaaatcctgtggggctatagattcacccccgtgttgacgttggaggatggcttctatgaggtggactataatagcttccacgagacctacgaaaccagcactccatctctctctgctaaagagctggccgagttggcctcccgggctgagctgccccttagttggtcagtgtccagcaaactgaaccagcacgctgagctggagaccgaggaagaagagaaaaacctggaagagcagaccgagaggaatggggacgtggcaaacctcgagaacgagtcaaaggtctag

SEQ ID NO: 235668 - DNA, 1275 bp, synthetic construct
  misc_feature 1..1275: note = Description of Artificial Sequence: Synthetic coding sequence
  source 1..1275: mol_type = other DNA
atgctggcccgaaagtcaatcatcccagaggaatatgtgctagctcgcattgctgccgagaacctgcggaaacctcgcatcagggatagactcccgaaagccagatttatcgctaaatccggggcttgcaatctggctcacaaaaacattcgtgaacagggacgcttcttgcaggacatttttaccaccctcgtggatctcaagtggcgccataccctagtcatctttacaatgtcgttcttatgctcatggctgctatttgccatcatgtggtggctcgtggctttcgcacacggcgatatctatgcatacatggaaaagagcgggatggaaaagtcaggattagagagtaccgtttgtgttacaaatgtgcgcagtttcacttccgcgtttttatttagtatcgaggtacaagtcacgattgggttcggtggcaggatgatgaccgaagaatgtccattggccatcaccgtcctaattctgcagaatattgtcggactgataatcaacgcagtgatgctgggatgcatcttcatgaagactgcccaggctcatcgcagagccgagactctgatcttcagcaggcacgccgtgatcgctgtccggaacggtaagttgtgcttcatgttccgcgtgggcgacctgcgcaaaagtatgataatatccgcatcggtgaggatccaggttgtaaagaagaccactacccctgagggggaagtcgtgcctattcaccagctggatattcctgtcgacaatccgatcgaaagcaacaacatattcctcgtcgcgcctctgatcatctgtcatgtgatcgacaagcggtctccactgtacgacatctccgctaccgacctcgctaatcaggatttagaggtgattgtaattctggagggagtggtggagacaactggcataactacgcaggcccgaacctcttatattgccgaggaaattcagtgggggcacagattcgttagcatagtgaccgaggaagagggcgtctattcagtagattatagtaagtttggaaacaccgtgaaagtagcggctccaaggtgttcagccagggaactggacgagaaaccgtcaatcctgatacagaccctacagaaatcggaactgtcccaccaaaattctcttcgcaagaggaacagtatgcgcaggaataactcaatgcggcgaaataacagcattcggcgtaataactcaagcctgatggtgcctaaagttcagttcatgacaccagaagggaatcaaaacacatccgagagctag

SEQ ID NO: 235669 - DNA, 345 bp, synthetic construct
  misc_feature 1..345: note = Description of Artificial Sequence: Synthetic coding sequence
  source 1..345: mol_type = other DNA
atgctggcccgtaaatccatcatacccgaggaatacgtgctggcacgcattgcagcagaaaacctccgaaagccaagaattcgagacaggttgcctaaggccagattcatcgcaaaatcaggggcttgtaatctagcccacaagaatattcgcgagcagggccgattccttcaggatatattcaccaccctggtggatctgaagtggcgccacaccctggtgattttcacaatgtcctttttatgttcttggttgctcttcgcgatcatgtggtggctggtggcattcgcccatggcgacatttacgcgtatatggaaaagtcggggatggagaaaagtggctag

SEQ ID NO: 235670 - DNA, 1275 bp, synthetic construct
  misc_feature 1..1275: note = Description of Artificial Sequence: Synthetic coding sequence
  source 1..1275: mol_type = other DNA
atgctggctagaaaatctatcattcctgaggagtatgtgctcgcccgtatcgcggcagaaaacctgcgtaagccgagaattagggacaggttgccaaaagcgagatttattgccaagtcaggggcatgcaatctcgcgcacaagaatatccgcgaacagggacggtttttgcaagacatattcaccaccctggtagatttaaaatggcggcatacccttgttatattcacaatgagttttctgtgctcttggctgctcttcgccatcatgtggtggctagtcgcctttgcccacggagatatctatgcttacatggaaaagtcaggtatggagaagtcaggcctggagtccacggtttgcgtgacaaacgtaaggagctttacatccgctttcctcttctcaatcgaggtgcaggtgactatcgggttcggcggtagaatgatgaccgaagagtgccctctggctataactgttcttattctgcagaacatcgttggcctaattatcaatgctgttatgctcggttgcatctttatgaagacagcccaagctcatcgaagggcagaaactctgattttctcacggcatgccgtgatcgcagtcaggaatggaaaactttgctttatgtttagagtgggcgacttaaggaagagcatgatcatttcggcttcagtccggattcaggtggtgaagaagaccacaacaccggagggggaagttgttcccattcaccagctagatatccctgttgataatcccatcgagtctaacaatatctttctagttgctcccctgattatatgccacgtgattgacaagaggtctccactttacgatatctctgcgacagacctcgccaatcaagatctggaagttattgttatcctcgagggtgtggttgaaaccacggggattacaactcaggctcgcacctcctacatcgctgaagaaatccaatgggggcatcgcttcgtgtccattgtgaccgaagaggaaggcgtgtacagcgtggactattccaagtttggaaacactgtgaaagtggctgctcccaggtgtagcgcacgtgagctggatgaaaagcccagtattctcatccagaccctgcagaaaagtgagctgtcacaccagaactctctgcgcaaaagaaatagcatgcgaagaaacaactccatgaggagaaacaattccatccgaagaaataacagctcactcatggtgccaaaggtgcagttcatgacacccgagggcaatcaaaatacttccgagagctag

SEQ ID NO: 235671 - DNA, 774 bp, synthetic construct
  misc_feature 1..774: note = Description of Artificial Sequence: Synthetic coding sequence
  source 1..774: mol_type = other DNA
atgacagcatttccagcctctggaaagaaaagagagactgactactcagacggggaccctctggatgtacacaagcggttacccagcagtgctggggaagaccgggctgtcatgttgggctttgcaatgatgggcttttcagtcctgatgtttttcttactcgggaccactattctgaaaccatttatgctttccattcagagagaggagagcacatgcaccgccatccacacggacattatggacgactggctggattgtgcattcacatgtggcgtgcattgtcacggacagggtaagtacccatgcctccaggtcttcgttaatttgagccatcccggtcaaaaggcacttctccattataacgaggaggcggtgcaaattaacccaaagtgtttttacaccccaaagtgtcatcaggaccggaacgacttgctcaattccgccctggatattaaagaattttttgatcacaaaaacgggactccatttagctgtttctactcaccagcatctcagtccgaagatgtgatcctgattaaaaagtacgaccaaatggccatattccattgcttgttctggccctcgttgactctcttaggcggagccctgatagtgggtatggtacgcctgacccagcacctgtcactgctttgtgaaaagtatagcactgtagtgcgcgacgaagtggggggaaaagtcccgtacatagagcagcaccagttcaagctctgtattatgcgccgtagtaagggaagagccgagaagtcttag

SEQ ID NO: 235672 - DNA, 522 bp, synthetic construct
  misc_feature 1..522: note = Description of Artificial Sequence: Synthetic coding sequence
  source 1..522: mol_type = other DNA
atgcaaccgttctccatccccgtgcagattacgcttcagggatcccgccgacgccaggggagaacagcgtttccggcttctggtaagaaacgggagactgattactctgacggtgatcccctcgacgtccacaagagattgcctagtagcgcaggggaagacagagcggtgatgctcggtttcgccatgatggggttctccgtccttatgttcttcttgctggggactacaatcctcaagccctttatgctctctatccagcgggaggagagcacctgcacagccattcataccgatatcatggacgattggctggactgcgccttcacatgtggtgtccactgccatggtcagggcaagtatccatgtttacaggtgttcgtgaacttaagtcaccccggacagaaggccctccttcactataacgaggaagctgtgcaaatcaacccgaagcgggatgttaccgactgtagagtcaaagagaagcagaccctgactgtctctgacgaacacaaacagtag

SEQ ID NO: 235673 - DNA, 840 bp, synthetic construct
  misc_feature 1..840: note = Description of Artificial Sequence: Synthetic coding sequence
  source 1..840: mol_type = other DNA
atggatttctcacccagctcagaattagggtttcatttcgttgcttttattctgttgacgaggcatcgcactgcctttccagctagcgggaagaaaagagagaccgactattcagacggagatcctctggacgtccataagagattgccttcatccgctggggaagatagggctgttatgctgggcttcgctatgatgggcttttctgtgctgatgttctttttgctgggtacgacaattctgaaacccttcatgttgtctatccaacgcgaggaatcaacatgtactgctattcacactgatatcatggacgactggctcgattgcgcgtttacatgcggagtccactgccacggccagggaaagtatccatgcctacaggttttcgtgaatctcagtcatcctgggcagaaggcgctgctgcactacaacgaagaagccgttcagatcaaccccaaatgcttttacacccctaaatgccatcaggaccgcaacgatctgttgaacagcgcgttggacattaaggagttcttcgatcataagaacggaacccccttctcttgcttctactcaccagcatcccagagcgaggacgtgattctgataaaaaaatacgaccagatggctatttttcactgtctgttttggccctccctgactttgctgggcggtgccctcattgttggcatggtacgccttacccagcacctgtcactcctgtgcgaaaagtattccaccgtggtgcgggatgaagtgggcggtaaggtgccttacattgaacagcatcaatttaagctgtgcattatgaggaggtctaaaggcagagcagaaaagtcatag

SEQ ID NO: 235674 - DNA, 834 bp, synthetic construct
  misc_feature 1..834: note = Description of Artificial Sequence: Synthetic coding sequence
  source 1..834: mol_type = other DNA
atgcagcccttctctatccctgttcagatcaccctccaggggagccgtcgtagacaggggcgtaccgcgttcccagcgagtggcaaaaaacgcgagaccgattattctgacggcgacccactggacgtccataaacgactgccatcgtcagccggagaggatagagctgtgatgttagggttcgccatgatgggcttcagcgtgctgatgttctttctgctgggaaccaccattctgaaaccgttcatgctttctatccagcgcgaggaaagcacctgcacagccattcataccgacatcatggacgactggctggactgcgcgttcacctgtggggttcactgtcacggccaggggaaatacccttgcttgcaagttttcgtcaacctctcccaccccggacaaaaagccctgctccattataacgaggaagctgtgcagataaatcctaagtgcttttatacccccaagtgccaccaggatcgcaatgacctactcaactcggcccttgatattaaagagttcttcgatcataagaacgggactccattttcgtgcttctacagccccgcaagccagtccgaggatgtaatactcatcaaaaaatatgatcaaatggctatattccattgtctcttctggccttccctgacccttctgggcggagcactgatcgtcggaatggtgcgcctgactcagcatttatccctgttatgcgagaagtactccacggtggtgagggatgaggttgggggaaaggtgccttatatagagcagcaccagttcaaactgtgcatcatgcgcagaagcaagggacgagcagagaaatcatag

SEQ ID NO: 235675 - DNA, 828 bp, synthetic construct
  misc_feature 1..828: note = Description of Artificial Sequence: Synthetic coding sequence
  source 1..828: mol_type = other DNA
atgttcccactcctatatgagcttactgccgtcagtccctcgccattccctcagcgcaccgcatttcccgcttccggcaaaaagagagagactgactactctgatggtgaccccctggacgtccacaagcgcttaccctcttccgctggcgaggatcgggcagtaatgctcgggttcgctatgatgggattctccgtcctaatgtttttcctccttggaaccactatactgaagccattcatgctctccatccagcgcgaagagtccacctgtacagccatccatactgatatcatggacgattggttggactgcgcttttacttgcggcgtacactgccatgggcaagggaagtacccttgcctgcaggtgttcgtgaacctttcacaccccggtcagaaagccttgctgcactacaacgaggaggctgtgcaaatcaatcccaagtgtttctatactcccaaatgtcatcaggacagaaacgaccttctgaacagcgcgcttgatatcaaagagttctttgatcacaagaacgggactccattctcctgcttctacagcccagcctcccaatccgaggatgtgatcttgatcaaaaagtatgatcaaatggccattttccactgcctgttctggccctcgcttacactcctcggtggggcactgattgttggaatggtccggctgactcagcacttgtctcttctttgtgaaaaatatagcactgtggttagagatgaggtgggaggcaaggtcccctacatcgagcaacatcagttcaaattatgcattatgaggagatcaaaggggagggcggagaagagctag

SEQ ID NO: 235676 - DNA, 774 bp, synthetic construct
  misc_feature 1..774: note = Description of Artificial Sequence: Synthetic coding sequence
  source 1..774: mol_type = other DNA
atgactgcttttcctgcctctggcaagaagcgagagactgactacagcgacggcgatcctctggatgttcacaagagacttccttcctccgcaggagaggatcgggcagtcatgctggggttcgccatgatgggattctcggtgcttatgttcttcctgctggggaccacaatcctgaaaccctttatgttgagtattcagcgcgaggaatcaacctgcaccgccatccacactgatataatggacgactggctggactgcgcctttacgtgtggcgttcattgtcacggtcaggggaagtacccctgtttgcaggtttttgtgaatctatcacacccaggccagaaggcccttctccattataatgaggaggccgtgcagattaatcctaagtgtttctatacccctaagtgtcatcaagatcgcaacgatctactgaattcagcattggacattaaagagttcttcgatcataagaacgggacgcctttctcctgcttctacagtcctgcaagtcagagcgaggacgtgatactcattaagaaatatgatcagatggcaatcttccactgcctgttttggcccagtcttacattgctgggcggagccctcatcgtagggatggttcgattgacacagcatctttctctcttgtgcgaaaagtacagtaccgttgtgagagatgaagtcggcggaaaagttccctacattgaacaacaccaattcaaactgtgtatcatgcgcaggtcaaagggacgcgctgaaaagtcttag

SEQ ID NO: 235677 - DNA, 3537 bp, synthetic construct
  misc_feature 1..3537: note = Description of Artificial Sequence: Synthetic coding sequence
  source 1..3537: mol_type = other DNA
atggcgaatggaggcggtggaggaggcggaagcagcggcggagggggaggtggcggaggtagctcccttaggatgagcagcaacattcatgccaatcacctgtctttggatgcttcctcctcttcttcttcttccagctcctcatcttcgtccagctcaagctccagctcctcttcaagcgtgcacgaacccaagatggatgccctgattattccagtgactatggaggtgccctgtgactcccggggacagcgcatgtggtgggctttcctggccagtagcatggtcaccttcttcggtgggctcttcatcatccttttgtggcgtaccctgaagtatctgtggacggtctgctgccactgcgggggaaagactaaagaggcgcagaagatcaacaacggtagtagtcaggcagacggaaccctcaaaccagtggacgaaaaagaggaggcagtggccgcagaagtaggatggatgacgagcgtgaaagactgggctggggtgatgatttcggcccagaccttgaccggacgcgtgctggttgtactggtatttgcactctccattggagcattagtaatctattttatagattcaagtaaccctattgagtcatgtcagaatttctacaaggacttcaccctccagattgatatggccttcaatgtcttctttctgctatacttcggcctgcgtttcatcgccgctaatgataagctttggttttggctcgaggtaaacagcgtcgttgactttttcacagtgcctcctgttttcgtttcagtatatcttaatagatcatggctcgggttgaggttcctgagggccctgaggctgattcagtttagtgaaattctccaattcctgaacatactcaaaacatctaactctatcaagctcgtcaatctactcagcatatttatctctacctggctgaccgcggcaggctttatacatctcgtcgagaattccggagatccctgggaaaacttccaaaacaaccaggccctgacatattgggaatgtgtatacttgctcatggttacaatgtcgactgtgggctacggagatgtgtacgcaaagacaacactgggcaggctattcatggtctttttcattttgggcggactggctatgtttgcgagctatgtgcccgaaataattgaactcatcggaaaccggaagaaatacggtggctcgtattcagcagtgtccggcaggaaacacatcgtggtgtgcggacacattaccctcgaaagcgtctccaattttctcaaagacttccttcacaaagacagagacgatgttaatgtggagatcgtgtttctgcataatataagtccaaatcttgaactggaggccctgttcaaaaggcactttactcaggtcgaattctatcagggatccgtgctaaatcctcatgatcttgccagagtcaagatcgaatcagccgacgcctgcctaattctggcgaacaagtactgtgcagaccccgacgctgaagacgcgtccaatatcatgcgggtcattagtataaagaactatcaccccaagatacggatcatcacccagatgctccaataccacaataaggcgcatctgctcaatatcccgtcttggaattggaaagagggcgatgatgctatatgcctggcagagctgaagcttggctttatcgcccagagctgcctggcccaagggttaagcaccatgttggccaaccttttttcaatgcggtcgttcataaagattgaagaggatacatggcagaagtattacttagagggagtctccaatgagatgtatacagagtacctcagctcagcctttgtgggcttgagctttcccaccgtgtgcgagctatgtttcgttaagttaaagctgttaatgatagcgatagagtacaagtccgctaacagagaaagtagaattttgatcaaccccggaaatcatctgaagatccaagagggaaccctgggattttttatagcatctgatgctaaggaggtaaaacgtgctttcttctattgcaaagcatgtcacgacgacattacagatccgaaacgcatcaaaaagtgcgggtgcaagcgtctggaagatgagcagcctagtacgctgagccctaagaaaaaacagcgcaatggtgggatgcgcaactctcccaatactagcccgaagctgatgcgccacgatcccctccttatccctgggaatgaccaaattgacaacatggactccaatgtcaaaaaatacgattccaccggtatgttccactggtgcgcccctaaggaaatcgaaaaggtaatcctaactagaagcgaagctgctatgacagtgctgtcgggtcatgttgttgtgtgcattttcggcgacgtaagttctgctctaatcggtctgaggaatctcgttatgccactacgggcttctaattttcattatcacgaactgaagcacatcgtgttcgtcgggtcaatcgagtatcttaagcgcgagtgggagacgttacacaacttccctaaggtgtccattctcccagggacacccctctcccgcgctgatctaagggcggtgaatattaacctgtgcgacatgtgcgtcatcctgtctgctaatcagaataacatcgacgacacctctctccaagataaagaatgcatactcgcctcattaaacatcaagtccatgcagttcgatgacagcataggggttctacaggccaattcccagggcttcactcccccaggcatggataggtcttctcccgacaattctcccgtacatgggatgctcaggcagccgagtattaccacgggggtgaatataccaatcatcacagagttggttaacgacactaatgtgcagtttttggaccaagacgatgatgatgacccggatactgagctgtacctaactcagccattcgcgtgcggaactgcatttgctgtgtccgtgctcgatagcctgatgagcgccacatacttcaacgataacatcctgactttgatcaggaccctagttaccggtggcgcaactcctgagctagaagcactgatcgcagaagagaatgcccttagaggaggatatagtactccccagactctggcgaatcgcgataggtgccgcgtagcacagctggctctcttggatggaccttttgcagacctgggggatggcggatgttacggtgacctgttttgtaaggctcttaagacctacaacatgctgtgcttcggaatctacaggcttagggacgcccacctctcgactccttcccagtgcactaaaagatatgtcataacaaaccctccatatgagtttgagctggttcctaccgaccttatcttttgcctaatgcaatttgaccacaacgctgggcagagccgcgcaagtctgtctcattcttcacactcttcgcagagcagttctaaaaagagctcctctgttcattcaattccttcaaccgccaaccgtcagaaccggcctaagtctcgagaatcacgggataagcaaaaatatgtgcaggaagagcgtctgtag

SEQ ID NO: 235678 - DNA, 3633 bp, synthetic construct
  misc_feature 1..3633: note = Description of Artificial Sequence: Synthetic coding sequence
  source 1..3633: mol_type = other DNA
tccaatatccatgccaaccatctgtcattagatgcaagctctagttcaagctctagttccagctccagctcttcctcttcctcatcctcctcctcgtcaagtgtgcacgaacctaaaatggatgcccttatcatcccggtgacaatggaggtcccttgcgattctaggggtcaacgaatgtggtgggctttcctcgcatctagtatggtgactttcttcggcggtctattcataatcctactgtggcgaactttgaagtacctgtggactgtgtgctgccattgtggcggaaaaacaaaggaggcacagaaaattaacaatgggagtagccaagccgacgggacgctcaaaccggtggatgagaaggaggaggccgtggccgcagaagttggatggatgacctccgtcaaggattgggctggcgtgatgattagcgcccagactctgactggacgggtactggtggtgctcgtgttcgctctctccatcggagcgctggtaatctactttatagacagttctaatccaattgagagttgccagaatttttataaggacttcaccctccaaatagacatggcgtttaacgttttttttctgttgtactttgggttacggttcatcgccgcaaacgacaagctgtggttttggctggaagtgaattctgtagtcgatttctttaccgtgcctcccgtgttcgtgagtgtctatctgaaccgctcctggctgggtctgagatttcttagggcccttcgccttattcaatttagtgagatcctgcagttcctgaatattctgaaaacgtctaacagcattaagttggtgaacctgctgagtatcttcataagcacctggctgacagccgctggctttatccacttagttgaaaactcaggtgacccctgggagaatttccagaacaatcaagctctgacctattgggaatgtgtgtacctgttaatggtcacgatgtcaactgtgggatacggcgatgtgtatgccaaaacaacgcttggacggctcttcatggttttctttattttaggaggcctggccatgtttgcttcatacgtgccagaaatcatcgaactcattgggaatagaaagaaatacggcggatcatattccgcagtaagtggccgtaagcacatcgtagtgtgcggccacattaccctggagagcgtgtcgaacttcttgaaggacttcttgcacaaggacagagatgatgtgaatgtggaaatagtcttcctccacaacatctctcctaacctggagttagaagccctctttaagagacatttcacgcaggtggagttctaccagggttcggtgctgaaccctcacgacctcgccagggtcaagatcgaatctgccgacgcctgcttaatcctcgctaataagtactgcgctgaccccgacgctgaggacgcatctaacatcatgcgggttatcagtattaaaaactaccatccgaagattaggataatcactcagatgctgcaatatcacaataaagcacatctgctcaatatcccatcgtggaattggaaggaaggcgatgacgccatatgtttggcagagctcaaactcggcttcatcgctcagagttgcttagctcagggacttagcacgatgctcgccaatcttttttccatgagaagcttcatcaagatcgaagaggacacctggcaaaagtactacttggaaggagtcagcaatgagatgtacacagaatatctctcttcagctttcgtaggcctcagctttcccactgtgtgcgaactatgctttgttaagctgaaattactcatgatcgcaatcgaatacaagtcagccaacagggagtcccggatcttgatcaaccccggaaaccatttgaaaatccaggaaggcaccctcggattctttattgcaagtgatgctaaagaagtgaagcgagcctttttctactgtaaggcttgccacgacgatattaccgatccaaagcgcataaagaagtgtggctgcaagagaccaaagatgtccatctacaaaaggatgcgtcgcgcatgttgcttcgactgtggcaggtcggaacgggattgtagttgcatgagcggtagggtcagaggcaatgtcgacacactggaaagagcattccctctctcgtctgtaagcgtaaacgactgctccacaagtttccgtgcctttgaggatgagcaaccttctacactcagtccaaaaaaaaagcagagaaacggtggtatgcgcaacagtcccaatacctctcctaaacttatgcgacacgatccactgttaatcccgggtaatgatcagatcgacaacatggactctaatgtgaagaagtacgactcaactggcatgtttcattggtgtgccccaaaggagatcgagaaggtgatcttaacaagatctgaagctgccatgacggtgctttctggacacgtggtggtctgtattttcggcgacgtgtcctccgcccttatcggactgcggaatctagtcatgcccctgcgggcttcaaatttccattaccacgagctaaagcacatcgtgtttgttggaagcatcgagtacctgaaacgcgaatgggaaacgctgcacaacttccctaaggtctcaatcttgcccggaacaccgctctctcgagctgatctgagggctgtcaatatcaacctgtgtgacatgtgcgtaatcttaagtgccaaccagaacaatatagacgacacctcgcttcaggacaaagaatgtatcttagcctcgctgaatattaagtctatgcagttcgacgactctatcggcgtgctacaagccaacagtcagggattcaccccccctggcatggaccgtagctctccggataactctcccgttcatggcatgcttaggcaaccgtccattacaacgggtgtgaacatccccatcatcacagaactagtgaacgacacaaatgtgcagttcctcgaccaggacgatgacgacgatcctgataccgaactgtacctcactcagccgttcgcatgtggcacagctttcgccgtctccgtcctagattccctgatgtccgccacttactttaacgataatattctcactctgattcggaccctggtgaccggcggtgccacccccgagctggaagcactgatcgccgaggaaaacgctctgcgcggaggatattccacaccccagacccttgctaaccgggatcggtgccgggtggctcagttagccttactcgatggaccattcgccgatctgggagacggcggatgctacggggacctgttttgcaaagccctgaaaacgtataacatgttgtgtttcggcatttatagactgagggacgcccatttgtccacccctagccagtgtaccaaacgctatgtgatcaccaatcccccttacgagttcgagcttgtgcctacagacctcatcttctgtctgatgcagtttgaccataacgctggacagtcccgcgctagtctgtcccatagtagccactctagccaatcatcctccaaaaaatccagctctgtacattccataccgtccactgccaaccggcagaataggccaaagtcccgcgagtcccgcgataagcagaagtacgttcaggaggaaagactgtag

SEQ ID NO: 235679 - DNA, 3720 bp, synthetic construct
  misc_feature 1..3720: note = Description of Artificial Sequence: Synthetic coding sequence
  source 1..3720: mol_type = other DNA
atggccaacggaggcggagggggtgggggttcctctgggggtggaggcggaggagggggttcatctctgcggatgtcctcgaacatccacgccaatcacctctctctggacgcttcatcctccagctcgtcttccagtagttcctccagcagcagttcaagtagcagctcctcctcaagcgtccacgaaccaaaaatggacgcgcttatcataccagttacaatggaggtgccgtgtgacagtcgtggacagcgaatgtggtgggcgtttctagctagctcgatggttacttttttcgggggtctcttcattattctactctggaggacactgaagtatttatggaccgtgtgctgccactgcggcggaaaaactaaggaggcacagaagattaataacggcagcagccaggccgatggtacgcttaagcccgtggacgaaaaggaggaagcggttgccgcagaggtgggatggatgacttctgtgaaggactgggcaggcgtgatgatcagcgcccaaacactcaccggcagagtactagtggtactggtattcgctctgtccataggcgcactcgtgatttatttcatcgacagttcaaaccccatcgaaagttgccagaatttttataaagacttcactctgcagatcgacatggcctttaatgtcttttttctcctttactttggcttaagattcatcgccgctaacgacaaactctggttctggcttgaggtgaactcagtcgtggacttcttcacggtgcctcctgtcttcgtgagtgtgtatctcaataggagctggcttggcctcagattcctgagggctctgaggctaatccagttctcagagatccttcaattcctgaatatcttgaaaacctctaatagcataaagctcgtcaacttgctgagcatttttatctccacctggcttacggcagcaggcttcattcacttggtcgagaattctggtgacccctgggagaacttccaaaacaatcaggccctaacttattgggagtgcgtataccttctgatggtcactatgagcaccgtcggctatggcgacgtatatgccaaaacgactctgggccgactattcatggtcttcttcattttgggcggacttgcaatgttcgcatcctacgttcctgagattatagagctgatcggcaaccgcaaaaagtatggaggatcatacagcgccgtgagtggaaggaaacatattgtggtgtgtggacatattacactcgaaagtgtgtccaacttcctgaaggacttcttgcacaaggatcgcgatgatgtgaatgtggaaatcgtctttctgcacaacatctcgccgaatttagaactcgaggctctcttcaaacgccatttcactcaagtggaattttatcagggatctgtgctcaacccgcatgatttggctcgcgtaaagatcgagagcgctgacgcatgtctgatcctagcgaacaaatattgcgccgacccggatgccgaagatgcctcaaacataatgcgtgttatatcaatcaaaaactaccatccaaagatccgcattataacacagatgttgcagtaccacaacaaggctcaccttctaaacatcccttcatggaactggaaagagggcgatgatgcaatttgtttggcagagctcaagttaggatttattgcacaatcgtgtctggcgcaaggactgtcaaccatgcttgccaatctcttttcaatgcggtcctttatcaagatagaggaggacacatggcaaaaatactacttagaaggagtgagcaatgagatgtataccgaatacctctcttccgctttcgtcggattaagcttccctacggtttgcgagctgtgcttcgtaaagctgaaactactgatgatcgccattgaatacaaaagcgccaatcgggagagtaggatcctgatcaatcctggaaaccacctgaagatacaggaaggcacccttgggttctttattgccagtgatgccaaggaagtcaagagggcttttttctattgtaaagcctgccatgatgatattacagacccgaaacgtatcaagaagtgcggatgcaagagacggtgggaagagcactgctctctctggcgtctggaaagcaagggcaatgtgcgcaggctgaactattgccgtggccagcaaaccttcagcgtcaaagttaaggttgcagctagaagcaggtatagcaaggatccctttgagttcaagaaagaaacacccaatagccgccttgtgaccgagcccgtcgaggacgaacagccctctactctcagtccaaagaagaagcagcggaatgggggtatgagaaattccccgaatacctcacccaagctgatgaggcacgacccacttctgattcccggtaacgatcagatcgacaacatggattccaatgtgaaaaagtacgacagcactggcatgtttcattggtgtgcaccaaaggaaattgagaaggtgatcttgacccggtccgaggccgcaatgacagtgctctccggtcacgtggtggtttgcatatttggggacgtaagctctgccctgatcggccttaggaacttggtcatgcctctcagggccagtaatttccactaccacgaattaaagcacatagtattcgttggcagcattgaatacctcaaaagagaatgggagaccttgcacaattttcctaaggtcagtattctccccggaactcctctcagccgcgcagatctgagagcggttaacattaacctttgcgacatgtgcgtgattctctcggctaatcagaacaatatcgacgacacatcgttgcaggacaaagaatgcattctcgccagcttaaatatcaagtcgatgcagttcgacgactccataggagtgctccaggccaattcccaaggattcacaccaccaggtatggacaggagttccccagacaactccccagtgcacggaatgttgcgccagccctcgattaccacaggggtgaacataccaatcatcacggagctggtcaacgacaccaatgtgcaatttctagatcaggatgatgatgacgacccagacaccgagctctatctgacccagccgttcgcctgtggaactgcttttgcggtgagcgtgcttgactctctcatgtctgccacgtattttaatgacaatattctcactctcattcgtactcttgtgactggcggagcgacacccgaactggaagcccttattgccgaagaaaacgctctgcgcggtggatattctaccccacagactctggcaaatcgcgatcgttgtagggtcgctcaacttgccctgctggatgggcctttcgccgacctgggagacggaggatgttatggggacctgttctgtaaggcccttaagacttataatatgctgtgctttggcatctatcgcctgcgggatgctcacttgagtactccaagccagtgtacgaaaagatatgtgatcacgaacccaccatacgagtttgaattggtccccaccgatcttattttttgtctgatgcagttcgaccacaatgcaggacagtccagggcttccctgagccattcctcccattcctctcagtcttcttcaaaaaaaagcagctccgtgcactcgatcccctcaaccgccaacaggcagaacaggccaaagagcagggagagccgcgataaacagaagtacgtccaggaggaacgactgtag

SEQ ID NO: 235680 - DNA, 3549 bp, synthetic construct
  misc_feature 1..3549: note = Description of Artificial Sequence: Synthetic coding sequence
  source 1..3549: mol_type = other DNA
tgaagcagtagttcaagctcctcatcttcctccgtacacgaacctaaaatggatgccttaattatccccgtcactatggaagtcccctgcgattccagaggccagcgtatgtggtgggccttcctggcgagctcaatggtgacgttcttcggaggactgtttatcatcctcctctggcggacacttaaatacctctggactgtgtgttgtcactgcggagggaaaactaaggaagcccaaaagattaataacggcagcagccaggccgatggcacattaaagccggtggacgagaaggaggaagctgtggcagcagaggtcggctggatgacttccgtgaaagattgggccggagtaatgataagtgcccagacactgactggtagagttctcgtggtcctggtgttcgccctttccattggcgctctagtcatctactttattgactcctccaacccaatcgaatcttgtcagaacttttataaggacttcaccctgcagattgacatggcgttcaacgttttttttctgctgtatttcgggctgcggtttatcgctgccaacgacaagctctggttctggcttgaggtcaactcagtcgtagacttctttacagtgcctcctgtcttcgtgtcagtctacctgaatcgaagctggctgggcttgagatttttgagggccttgaggttaatccaattcagcgaaattctccagttcctaaacatcctgaagacaagtaattcaatcaagctagttaatctgctgagcatttttatctcgacctggctgaccgctgctggatttattcacctcgtggagaacagcggagatccatgggaaaatttccagaataatcaggccttgacttattgggagtgcgtctaccttctcatggtgacaatgtctacagtggggtacggggatgtgtacgctaagactacactgggtagactgtttatggtgtttttcattctgggaggtcttgctatgttcgcctcatatgtcccggaaattatcgaactgatcggaaaccgaaaaaaatacgggggtagctattcagcagtgtcaggcaggaaacatatcgttgtctgcgggcacataactctcgaaagcgtgtccaacttcctgaaggacttccttcacaaagatagggacgacgtcaacgtggaaattgtgtttctgcacaacatctcaccaaacctggaacttgaagctttatttaagcgtcattttactcaagttgagttttatcaggggtccgtacttaaccctcatgatctcgcacgagtaaagattgagtccgccgatgcctgcctaatcctagccaacaaatattgtgctgatccggatgcggaagatgcatccaacatcatgcgggtcatttctatcaagaattaccacccaaagattaggatcatcacgcagatgcttcagtaccacaacaaggcacatcttctgaatataccctcatggaactggaaggagggagatgacgccatttgtctggccgagctgaagttggggttcattgcccaatcctgcctggcccagggactgtctacgatgttggccaatttgtttagcatgaggtctttcataaagatcgaagaagatacctggcagaaatactacttggaaggcgtgtccaacgaaatgtacacggagtacctctctagcgctttcgtcggactcagctttccgaccgtatgtgaactctgttttgtcaaactgaagctattgatgattgcgattgagtacaaaagtgccaatagagaatcccgcatcttaattaatccaggcaaccacctgaagattcaggaagggacccttggattctttatcgcctcagatgctaaagaagtgaaaagggccttcttttactgtaaagcctgtcacgacgatataacagaccccaagcgcattaaaaagtgtggctgcaaaaggttggaagatgagcagccatccacactctctccgaaaaagaaacaacgcaacggaggtatgcggaattctcccaatacctcgccaaaattgatgcgtcacgacccactgctgatcccaggaaatgaccagattgacaatatggactctaatgtaaagaaatacgactctactgggatgtttcattggtgcgcacccaaggaaatcgaaaaggtcatcctcacacggtctgaggctgcaatgactgtgctatctggccacgttgtggtttgtatcttcggggatgtctccagcgctttgatcggccttcgcaacctggtcatgcctttaagggcctctaatttccattaccatgaacttaagcacattgtttttgttggcagcattgagtaccttaaaagggagtgggagacactacacaactttcccaaagtcagcatactgcccggaacacctctctccagggcagacctgcgcgctgtgaatattaacctctgcgacatgtgcgttattttgagcgccaaccaaaacaatatcgacgatacgagcctccaggacaaagagtgcatactggcaagcctcaatattaagtctatgcagttcgacgactccattggcgtcttgcaggctaacagccaggggtttacaccaccaggcatggacagatccagccccgacaatagtccagtgcatggcatgctgagacagcctagcattactacaggggtaaatattccaattatcaccgaactggtgaacgataccaatgtgcaatttctggaccaagatgatgacgatgatccagacactgagctgtaccttacccaaccattcgcatgcggcacggccttcgctgtgtccgtacttgattccctgatgtccgctacctactttaacgacaacattctaaccttaatcagaaccctggtaactggtggtgccaccccagagcttgaggctctgattgccgaagaaaacgccttacggggagggtactctacacctcagaccctggccaacagggatcgctgtagagtcgcccagctcgcgctccttgatggcccttttgccgatctgggggacggcggttgttatggtgacctgttttgcaaagcattgaagacatataatatgttgtgctttggcatatatcggctacgagatgcacatttaagcacgcccagtcaatgcacgaagcggtacgtaattacaaatccaccctacgagtttgaattggttccaaccgatttaattttttgtctcatgcagtttgaccataatgccggacagtcgagggcatccctgtcccacagtagtcactctagccaaagttcatcaaagaaaagctcttcggtgcattccattccatcaaccgccaacaggcagaaccgccctaagagtcgggaatctcgcgataaacagaatgccacgagaatgaacagaatggggcaggcggagaagaaatggtttacagacgagcctgataatgcctaccccaggaatattcagatcaagccaatgagcactcacatggccaatcaaatcaatcaatataagtccacatcttccctgatcccgcctattagggaggtggaggatgaatgctag

SEQ ID NO: 235681 - DNA, 3504 bp, synthetic construct
  misc_feature 1..3504: note = Description of Artificial Sequence: Synthetic coding sequence
  source 1..3504: mol_type = other DNA
cccaagatggacgctctgatcattcctgtgaccatggaggtcccctgtgactccagaggccaacgtatgtggtgggccttcttggccagcagtatggttacattctttgggggactgtttattatccttctatggagaaccctgaagtacctctggaccgtgtgttgtcactgcggcggtaagaccaaggaggctcaaaaaatcaacaatggctcctctcaggccgacgggactctgaagcctgtggacgagaaagaagaggccgtggccgcagaggttggctggatgacctccgtgaaagattgggccggagttatgatttcagcacagaccctcacaggacgcgttctggtggtcctggtgttcgcactgtctataggggctcttgtgatctactttatcgattcgtccaacccaattgagtcctgccaaaatttctacaaggacttcaccttacagattgatatggcattcaatgtgttcttcttgctctactttggtctccgcttcatagctgccaacgataaattatggttttggttagaggtcaattctgtggtggacttcttcacagtaccacccgtgttcgtcagcgtatacctcaacaggagttggctggggttgcggttcctgcgggctctcagacttattcaattttctgagatcctccagtttttaaatatactaaagacaagcaacagcatcaaactggtgaatctcctgagcatctttattagtacctggctcaccgccgcaggatttatccacctcgtcgagaattctggcgatccgtgggaaaacttccagaataaccaggcgctgacctattgggagtgtgtgtacctgctgatggtgaccatgagcacagtgggatatggtgacgtgtacgcaaagactacactggggagactcttcatggtgttcttcatcctgggtgggctggccatgttcgccagctacgtgcctgaaataatcgagctgatcggaaacaggaaaaaatacgggggaagctatagcgccgtcagcggcagaaaacatattgttgtgtgtggacacatcaccctggaatccgtcagtaatttcctgaaggatttcctgcacaaagaccgcgatgacgtgaacgtcgagattgtctttttgcataatataagccccaatttggaacttgaggctctctttaaacgccatttcacacaggtggagttttaccaaggctccgtactgaacccccacgaccttgctcgtgtcaagatagaatctgctgatgcatgcctcattctggccaataagtactgcgccgatccagacgcggaggacgcatctaatatcatgcgagtgatctctattaaaaactaccaccctaaaattcggatcataacacagatgctgcagtaccacaacaaagctcatctgcttaacatccccagctggaattggaaagaaggcgacgacgctatttgtttggcagagttgaagttgggcttcattgcccagtcttgtctggctcaaggtctctcgactatgctggcaaacttgttttctatgcgttccttcattaagatcgaagaagacacctggcagaagtattacctggagggggtcagcaatgagatgtataccgaatacctctccagtgcctttgtcggtctgagcttccccaccgtgtgcgaactctgctttgtgaaacttaaattattaatgatagcaatcgagtataagagtgccaaccgtgaatcccgaattctcattaatcccggaaaccatctgaagatccaagagggaacactgggtttcttcatagcatctgatgccaaggaagtgaaacgtgcatttttctattgcaaggcctgccatgatgatattaccgatccaaagcgcattaaaaaatgtggctgcaagcggctagaagacgaacaacctagtacactcagtccgaagaagaagcagcggaatgggggaatgcgcaactcccccaacacatccccgaagctaatgcgacatgaccctcttcttatacccggaaatgaccagattgacaacatggattcaaatgttaagaaatacgacagtacaggaatgtttcactggtgtgcaccaaaagaaattgagaaagtgatactgaccaggtccgaagcagccatgaccgtgctaagcgggcacgtagtggtctgcatctttggggacgtgtcatccgccttaatcggactgcggaatctcgtaatgcctctgcgcgcttcaaattttcattatcatgagctcaagcatatcgtgttcgtgggctcaatcgagtatcttaaaagggagtgggagacactccacaacttccccaaagtgtctatccttcccggtacaccactttcccgcgctgatcttcgggcagtgaacattaatctttgcgatatgtgcgttattctgtccgcaaaccaaaataatattgacgatacaagcctgcaagataaagagtgcattctggctagtctcaacatcaaaagcatgcagtttgacgacagtattggggtgctgcaagcaaactcgcaggggttcacgccgccaggcatggaccggagtagtcccgataatagcccagtgcacggaatgcttcgccagccaagcataaccaccggggtgaatatacctattatcaccgaactggtcaatgacaccaacgtgcagtttcttgaccaggatgatgatgatgatccagacacagagctatatcttacacagcctttcgcctgcggcacagcgtttgccgtttcggtattagatagcctaatgtctgccacatacttcaacgacaacatcctgaccctgatccgcaccttggtcactggcggtgctactcctgagctggaggctctgattgccgaggaaaatgctttgcgtggtgggtacagtacaccccaaacactggccaaccgagataggtgccgcgttgcacagctggctttgctggacggaccattcgctgatcttggtgatggaggttgctacggggatctcttttgcaaagcactgaaaacatataatatgctgtgctttggtatatatagattacgtgacgcgcacttatcaactccttcacagtgtactaaacggtatgtgatcacaaaccctccttatgagtttgaactggtgcctactgacctcatattttgcctgatgcaatttgaccacaacgccggacagtccagagctagccttagtcactccagtcacagtagccaaagctcgagcaaaaaatcatctagcgtccattccattccaagcacagccaatcgccagaaccgacctaaatcgcgtgagtccagagacaaacagaatgccacccgcatgaataggatgggtcaggagaaaaagtggttcactgatgaacctgacaatgcctaccctcgtaacattcagatcaagcctatgtcaacccatatggctaatcagatcaaccagtacaagtccacctcctctctcattccacccattcgggaagtagaagacgaatgttag

SEQ ID NO: 235682 - DNA, 3504 bp, synthetic construct
  misc_feature 1..3504: note = Description of Artificial Sequence: Synthetic coding sequence
  source 1..3504: mol_type = other DNA
taagggggtgggggaggagggggaggctcctcgctacgcatgagttctaatatacatgctaaccacttaagcctggacgcctctagtagctcatcctcatcctcttcctcttcatcctcatcgagttcttcatcttcctccagctcggtccacgagccaaagatggatgcattgattatcccagttactatggaagttccttgtgactcacgcggacagcgaatgtggtgggcatttctcgcgtcaagcatggtgacattcttcggcggactgttcatcatcttgctctggcggactctaaagtatctctggacagtctgctgccactgcggtggcaaaaccaaagaagctcagaaaatcaataatgggagctctcaggccgacggaactttgaagccggtggacgaaaaggaagaggccgtggccgctgaggtcggctggatgacgagtgtgaaagattgggccggagtaatgattagtgctcaaaccttgactggacgcgtactggtcgtcttggttttcgcgctctcgatcggcgcacttgtgatatattttatcgattcctccaatcctatcgagtcttgtcagaacttctacaaggatttcaccctgcagattgacatggccttcaatgtgttttttctgctgtatttcggcctacgatttatcgccgctaatgacaagctgtggttctggctggaagtgaatagtgtggtggactttttcacagtgccccctgtgtttgtgtcagtatacctgaaccggtcctggctgggactgagattcctgcgagccctaaggctcatacagttctccgagatcctgcaatttcttaatatcctcaagaccagtaactccataaagctggtgaacctgctatccatttttatcagcacatggttaacagccgcaggtttcatccatctagtggagaattccggagacccttgggaaaattttcagaataaccaggcacttacatactgggagtgcgtctatctactcatggtgacgatgtcaaccgtgggatacggtgatgtttacgccaaaaccaccctcggtagattgttcatggtgttctttatcctggggggattagctatgtttgcatcgtatgtcccagaaatcattgagttgatcggcaatagaaagaagtatggagggtcttacagtgccgtcagtggcaggaagcacattgtcgtctgcggacacattacactcgagagtgtgagcaacttcttaaaggactttcttcacaaggaccgggacgatgtaaacgtggagatcgtctttctccacaacatctcaccaaacttagaactagaggcattatttaaacgccactttacccaagtcgagttctaccagggctcggtgctgaatcctcacgacctggctcgcgtgaagattgaatccgccgatgcttgcctgattctggccaataagtactgcgccgatccagacgctgaagacgcaagcaatatcatgcgtgtaatctcaattaaaaattatcatcctaagatccgcattattactcagatgctgcagtatcataacaaagcacatctgctcaacattccatcatggaactggaaagagggcgatgacgccatatgtctcgccgagttgaagctaggcttcatcgctcagagttgtctggcacaaggactgagcacaatgctggccaacctcttcagtatgaggtcctttattaagatagaggaagatacttggcagaagtactacctggaaggcgtgagcaatgagatgtatactgagtacctgtcttcagccttcgttgggttgtcctttccaaccgtttgcgagctgtgttttgtgaagctgaagctgctgatgatcgccatcgaatacaagtccgccaaccgcgaaagcagaattctgatcaaccctggcaaccatctaaagattcaggaagggactctgggcttttttatcgccagcgacgctaaagaggtcaaacgggcattcttctattgtaaggcgtgtcacgatgacataaccgaccccaagagaataaaaaagtgcggctgcaagagactcgaagatgagcaaccaagcaccctgtcgccgaaaaagaaacagaggaacgggggaatgcgcaactcacctaacacatcccccaaacttatgagacatgatccgctgctcattccgggtaacgaccaaatcgacaacatggactcaaacgtaaaaaagtacgactccaccgggatgttccactggtgtgcgcctaaggagatcgagaaagtgattctcacccgatcagaagcagcaatgaccgttttatccgggcacgtggttgtctgtatctttggtgatgtctcgtccgcactcatcgggctccggaacctggtcatgccactacgggctagtaattttcattaccacgagcttaaacacatcgtcttcgtgggctcgattgagtacttgaagagggagtgggagactttacacaacttccccaaagtgagtattctccccggaacacccctcagtcgcgctgacttacgggcagtcaacattaatctctgcgacatgtgtgtgattctctctgccaaccagaacaatattgacgatacaagcctccaggataaagagtgtatactggcgtctttgaatattaaatccatgcagttcgacgacagcatcggagtgttacaggcgaacagccaaggattcacccccccaggcatggaccgctcatccccggataacagccctgtccatgggatgctgagacagccctccattacaactggagtaaatattccaatcattacggagttggtgaatgataccaacgtccaattccttgatcaggatgatgatgatgacccggataccgagctgtatcttactcagcccttcgcttgcggaactgccttcgccgtttctgtgctggatagtctgatgtcggccacctactttaacgataatattctgactcttattcgtactcttgtcacaggaggtgcgacccccgagttagaagctctgattgctgaggagaatgcactgcggggaggctactcaacccctcagacactggcgaacagggaccgctgtcgggtagctcaactcgccctgctggatggcccatttgccgatctgggagacggcggatgctatggcgatcttttttgtaaagcactcaaaacctataacatgctgtgtttcggcatttatcgcctgcgcgacgcacacctgtcgacccccagtcagtgcacaaaacggtacgtcatcacaaatccgccatacgagttcgagctggtgcctacagatctcatcttctgcctcatgcagttcgatcacaatgctggccaaagtagggcttccctaagtcacagctcccattcctcccagtccagctccaagaagtcatcatctgttcactcaatcccgtccactgcaaaccgccaaaaccgaccaaaatcccgcgaaagcagggataaacagaaccggaaggagatggtttaccgatag

SEQ ID NO: 235683 - DNA, 3516 bp, synthetic construct
  misc_feature 1..3516: note = Description of Artificial Sequence: Synthetic coding sequence
  source 1..3516: mol_type = other DNA
atggatgccttgattatccctgtgaccatggaagtcccttgcgacagcagaggccagcgcatgtggtgggcgttcttggcttctagcatggtgactttttttggagggttatttataattctgttgtggcgaactcttaagtacctgtggacagtgtgctgtcattgtggcggtaaaacgaaagaggcgcaaaagatcaacaatgggagcagccaagctgatggcaccctgaagcctgtggatgaaaaagaggaagcggtagctgccgaagtgggttggatgacctccgtcaaagactgggccggagtgatgattagtgcccagacactaaccgggagagtgcttgtggtcctggtctttgccctgagtatcggcgcactggtcatatattttatcgatagctccaatccaattgagagttgccagaatttctataaggatttcacactgcagatcgacatggccttcaacgtttttttcctgctatattttggcctgcgcttcatcgctgctaatgataagttgtggttctggctcgaggtgaactctgtggtggactttttcactgtaccaccagttttcgtttccgtgtacttgaatcgcagttggcttggcctgcgtttcctgcgggcactaaggcttatccagttttccgaaattctgcagttcctgaatatcttgaagacaagcaactcaatcaagcttgttaatcttctgagcatctttatctccacctggttaaccgctgcaggcttcatccatctggtggagaactcgggagatccgtgggaaaacttccagaataatcaagctttgacttattgggagtgtgtttatctgctcatggtgactatgagtacagtggggtatggagacgtttacgcaaaaaccaccctgggccgtcttttcatggtctttttcatccttggcggtctggcaatgttcgcaagctacgtgcctgagattatcgagttgattggcaatagaaaaaagtatgggggaagctatagcgccgtgagcggcaggaagcacatcgtggtgtgtggacacataactctcgagtcagtgagtaatttcctgaaagattttcttcataaagatagggatgatgtcaatgtggaaattgtgttcctgcataacattagtcccaacttggagctcgaagcactctttaaacgccattttacccaggtcgaattttaccaggggtcagttttaaatccacatgatttggcccgagtcaaaattgagagtgctgacgcatgccttattctggcgaataagtactgcgctgatccagatgcagaggatgcatcaaatatcatgagggtgatctctattaaaaattaccatcctaaaatacggattatcacccagatgctgcagtaccacaacaaggcccacctgcttaatatcccctcatggaattggaaggagggagacgacgctatatgtttggccgagctcaagctggggttcatcgcccagagttgtctggcacagggcctgtcaacgatgctcgccaatttattctctatgaggagctttatcaagatcgaagaagacacctggcagaagtattatctggaaggggtgtcgaacgaaatgtacacagagtacctgtccagcgcattcgtgggactgtcttttcccactgtgtgcgaactgtgttttgtgaaactcaagctcttgatgattgctatcgagtataaaagcgctaatcgggaatcgcgaatcctcatcaatccaggcaatcaccttaagatccaggagggtacccttggcttcttcattgcctccgacgctaaagaagttaaacgagctttcttttattgtaaagcctgccacgacgatattaccgatccaaagaggattaagaaatgcgggtgtaagcggccaaagatgtctatttataagaggatgagacgagcgtgttgtttcgactgtgggaggtcagaacgtgattgttcttgcatgagcgggagggtgcggggtaacgtcgataccctcgaaagagctttccctctgtcaagcgtctcagtaaacgactgctcgacctcattccgggcattcgaggatgagcaacctagcaccctgtcgcctaaaaagaaacagaggaatgggggaatgcgtaactcaccgaacacttccccgaagctgatgcgtcacgatcccctactaatccctgggaatgaccagatcgacaatatggacagcaacgtgaagaagtacgattctacgggaatgtttcattggtgcgcccctaaagaaatcgagaaggttatactgacgcgctcagaggccgctatgacagtgctgagtggccatgttgtggtctgcatttttggcgacgtatcatctgctcttatagggcttcggaacctggtgatgcctctgagagccagcaacttccattatcacgagcttaaacatatcgtgtttgtaggctccatcgagtacttgaaacgggagtgggagactcttcacaattttcccaaggtctcaatactgccaggaactcctctgagtcgcgcagatctgagagccgttaacatcaacctctgcgacatgtgtgtgatcctatcagctaaccaaaataacatcgatgatacatcgctgcaggacaaagagtgtatcctggcttctttaaatataaaatctatgcagtttgatgattctattggtgtgcttcaggccaactcgcaaggattcaccccccctggcatggaccggtcctcgcccgataattctcctgtccatggcatgctgagacaaccatccatcacaaccggagttaacattccaatcatcaccgagctcgttaacgacaccaacgtgcagttcctagatcaggacgatgacgacgatcccgacaccgagctatacttgacacagccattcgcttgcggcactgccttcgcagtgtctgtcttagactctctgatgagcgcaacatactttaatgataatatactcaccctgattcgaactctggtaacagggggagccacccctgaattggaggctctcatcgctgaagaaaacgccctgcggggaggttactccactcctcaaaccctggcaaaccgggaccggtgtcgggtggcccagctggctctgctcgatggcccatttgccgacctcggagacggaggctgttacggggacctgttctgcaaagccctgaaaacttataatatgctttgttttggtatatataggttgcgcgatgcgcatctctctacaccctctcagtgtaccaagcggtatgtgattactaaccctccatatgagtttgagcttgtccctaccgacctcatattttgtttgatgcagttcgatcataatgcaggacagtctagagcgagcctgtctcactcgagccacagctctcagtcttcaagtaaaaaatcgagctccgttcactcgatacccagtaccgcaaaccgacagaatcgcccaaagtcaagagagagcagggataagcagaatcgcaaggagatggtgtaccgatag

SEQ ID NO: 235684 - DNA, 3534 bp, synthetic construct
  misc_feature 1..3534: note = Description of Artificial Sequence: Synthetic coding sequence
  source 1..3534: mol_type = other DNA
atggcaaacggaggaggaggaggaggagggtcctctgggggtggcggtggtgggggaggctctagcttaagaatgtcctcaaacatccacgccaaccacttgtcactggatgcttcctcaagcagttccagctcttcatcatcatcatccagctcaagctcatcatcctcctcaagcagcgtacatgaacctaagatggatgccctgattattcctgtgaccatggaggtcccctgcgacagtcgtggacagcgtatgtggtgggcctttcttgctagctctatggtcacgtttttcgggggactctttatcatcctgttgtggaggacactgaaatatctgtggaccgtgtgctgccactgcggcggtaagaccaaggaagcccagaaaatcaataatggctcatcccaggcagacggcacactgaaacccgtggatgagaaggaggaggccgtggccgctgaagtcgggtggatgacctcagtgaaggactgggccggagtcatgatttccgcgcagacactgacagggcgagtcctggtcgtgcttgtttttgcgctgtccatcggtgctctggtgatctacttcatcgactcctctaatcccattgagagctgtcagaacttctacaaagacttcacacttcagatcgacatggcttttaatgtgttctttctgttatacttcggattgagatttatagccgctaatgataaactctggttctggctcgaggtgaattccgtcgtggacttctttacagtgccaccagtgttcgtgtctgtgtacctcaaccgtagctggctcggtctgaggttcctgcgtgctttgcgactgattcagttctctgaaatacttcaatttctcaacatccttaaaacgtcaaacagcatcaagctcgttaacctgctttcaatcttcatctctacttggcttactgccgctggcttcatacacctcgtggaaaattccggtgacccttgggagaactttcagaataatcaagccctgacatactgggaatgcgtgtatctgctgatggttaccatgagcacagtgggttacggagacgtatatgccaagaccacactggggagactgtttatggtatttttcatcctgggtgggcttgccatgttcgcatcgtacgttccagagattatcgagctgattggtaatagaaagaagtatggtggcagctactcagctgtctccggtagaaaacacatcgtagtttgcggccacatcacactagagtctgtgtccaactttctgaaggactttctacacaaggatcgcgatgatgtgaatgtcgaaatcgtattcctccacaacatttcaccaaatctcgagcttgaagcgttgttcaaacggcactttacacaagtggagttttatcaaggtagcgtcttgaacccacacgacctcgcgagggtaaagattgaaagcgccgatgcatgtttgattttggccaacaaatattgtgctgacccagacgccgaagatgccagtaatataatgagggtcatctccatcaagaattatcatcccaagatccgcattatcacacagatgctgcaataccacaacaaagctcatctccttaacatccctagctggaattggaaggagggggatgacgcaatatgcctcgccgaactcaagctcggattcatcgcccaaagctgtctcgcccagggactttcaacaatgcttgccaacctcttttcaatgcgtagcttcattaaaatcgaagaggacacttggcagaagtactatttggagggggtgagcaacgagatgtatactgaatatctgtcgtctgcctttgtgggcctatcctttcccactgtctgcgaactctgtttcgtgaagctcaagcttttaatgatagcaatcgagtacaaaagcgccaatagggagagccgaattctgattaaccccggaaatcatctgaagatccaggaagggacacttggttttttcatcgcaagcgatgccaaagaagttaagagggcttttttctactgcaaggcttgtcacgacgatatcaccgatccaaagagaattaagaaatgcgggtgcaagcgcctggaagacgagcagcccagcacgctgagccccaaaaagaaacaacggaacggtgggatgcgtaattctcctaacacatctccaaagttaatgcgccatgatcctctgctgattccgggaaatgatcaaatagataatatggatagtaatgtgaaaaaatacgactctacaggcatgttccattggtgcgcccctaaagagatagaaaaggtgattctcacccggagcgaggccgcaatgaccgtgttgtctggacacgttgtggtttgtatcttcggggacgtctcttcagccttgatcggacttagaaaccttgttatgcctctgagagctagcaacttccattaccacgagttgaaacatatcgtcttcgtgggcagtattgagtatctcaagcgtgaatgggaaaccctgcataattttccgaaagtgagtatcctcccgggtacacccctgagcagggccgaccttcgggctgtcaatatcaatttgtgcgatatgtgtgtgatcctgagcgccaaccagaataatatcgacgatacctctctccaggataaggaatgtatcctggctagtctgaatattaaaagcatgcagtttgatgatagtataggtgtcctccaagctaatagccaagggttcaccccccctggaatggatcgcagttctcccgacaactcccctgtgcacggcatgttgcggcagccatctataacaactggggtgaatattcctattattactgagcttgtgaacgacaccaatgtacagtttcttgaccaggatgacgatgacgatcccgacactgaattgtacttgactcagcctttcgcctgtggcaccgccttcgccgtgtctgtgctggatagcctcatgagcgcaacttatttcaatgataacattctgaccttgatcagaacgctggtgaccggcggtgcaacaccggagctggaagcgttgattgcagaagagaatgcactgaggggtgggtacagcacccctcaaacacttgctaacagggatagatgcagagtcgctcaactggcactcctcgatggtcccttcgcagacctgggcgacggtgggtgctacggtgaccttttctgtaaggctctcaagacctataacatgctatgcttcggcatctatcggctcagggacgcacatttaagcactccttcgcaatgcactaaaagatatgttattactaacccaccatacgagttcgagctggtgcccacagacctcatcttctgtctgatgcaattcgatcacaacgccggacagtccagagcatctctgtcacattcctcccactcaagccagagctcaagtaagaaatccagcagtgtccactcaatccctagcactgcaaatagacagaaccgcccaaagtcccgtgagagccgggataagcagaagaaggagatggtgtaccggtag

SEQ ID NO: 235685 - DNA, 3618 bp, synthetic construct
  misc_feature 1..3618: note = Description of Artificial Sequence: Synthetic coding sequence
  source 1..3618: mol_type = other DNA
atggctaacggcggtggtggcggtggaggatccagtgggggaggaggaggtggaggcggaagttcactgagaatgtcatccaatattcacgcaaaccatctgtctttagatgcctcatcatcaagctcctcctcctcaagctctagcagtagttcaagctccagctcatcatcttcttccgtccacgaacctaaaatggatgccctgattattcccgtgactatggaagtaccatgcgatagccgaggacagcgaatgtggtgggctttcctcgccagctcaatggttactttttttggtggactgtttatcatcttgctgtggcgcactctcaagtatctatggaccgtctgctgccactgcggcggaaagacaaaggaggcccaaaaaatcaacaatggctcaagccaggctgatggcaccctgaaacccgtggacgaaaaggaggaagctgtggcagccgaagtgggctggatgacttctgtgaaagactgggccggagtgatgatctcggcacagacgttaacaggtcgcgtcctcgtggtgctggtgtttgcactctccattggagcgctcgttatttatttcatcgactcaagcaatcccatcgaatcgtgccagaacttttacaaagattttactttgcagatcgatatggccttcaatgtcttctttttgctctatttcggccttcgattcattgccgctaacgataaactctggttttggctggaagtgaactcagttgttgacttcttcactgttcctcccgtcttcgtgtcggtctatttgaataggtcatggctgggcctgagattcctgagggctctgagactgattcagttttcagaaatactccagttcctgaacatcctgaaaactagtaacagtattaagctcgtcaatctgttgtccatcttcatctcaacctggctgaccgctgcgggttttatccatctggtggagaatagtggcgacccgtgggaaaattttcagaacaaccaagctcttacctactgggagtgtgtgtatttgttgatggtgactatgtcgactgtcggctacggtgatgtatacgcaaaaaccaccctggggcgtctgtttatggtctttttcatcctgggcggactcgccatgttcgcctcctacgtgcctgaaatcatagagttgatcggcaaccgtaagaaatacggtggctcatactccgccgtcagcgggcgtaaacacatagtggtgtgcggccatatcactctggaaagcgtaagtaatttcctcaaggattttctgcacaaggacagagacgacgtgaatgttgagatagtctttcttcacaacatctctccaaacctggaactcgaggcccttttcaagcggcactttacgcaagtggaattctaccagggttccgtgttaaacccacacgatcttgcccgagttaagatcgagagcgccgacgcttgcctgatcttagccaacaaatattgtgcggacccagacgcagaggacgcctccaacatcatgcgtgtgatctccattaaaaattaccatccaaagatccgaattataacacagatgctgcaatatcataacaaggctcatctgttgaacatcccttcttggaactggaaggaaggtgacgatgccatctgcctggctgagctaaaactcggcttcatcgcgcagtcttgcttagcccagggtttgagtactatgcttgccaatctcttttctatgaggtcattcataaagatcgaggaggacacatggcagaagtactaccttgaaggcgtgagcaatgagatgtatacagagtatctatcatctgcgttcgtgggactctcgtttcccacagtgtgcgagctctgtttcgtcaaattaaagctccttatgattgccatcgaatacaaaagcgccaaccgcgaatcccggatcttaattaatccaggcaatcatcttaagattcaggagggaacattgggtttctttatcgctagcgatgctaaagaggtcaagcgagctttcttctattgcaaggcctgtcacgatgatataacagaccccaaacggatcaagaagtgcggatgtaaaaggctggaggatgagcagccatccacactgtctccaaagaaaaagcagcgtaacggaggaatgcggaatagccccaatacttcccccaagctgatgcggcatgatcctctgctaatacctggcaatgatcagatcgataacatggactccaacgtgaaaaaatatgatagtactggcatgtttcattggtgcgcaccaaaagagatcgagaaggtcatccttactcggtccgaggccgcaatgaccgtactgtccgggcacgtagtggtgtgtatcttcggagacgtgagctcagcacttatcggactgagaaacctggtgatgcctctccgtgcgtctaacttccattaccacgaactcaaacatattgtcttcgtcggctcaattgaatatctgaagagggagtgggaaacacttcataactttccaaaagtgagtattttgccaggcaccccactctctcgggctgacttaagagctgtaaatataaatctgtgtgatatgtgtgtaatattatcggctaatcagaacaacatagacgatacatctctgcaagataaggagtgtatcctggcttccttgaacatcaaatctatgcagttcgatgattcaatcggcgtgctacaagctaattcccaaggcttcaccccaccgggtatggataggagtagtcctgacaattcgccagttcacggtatgctgcgccagcctagcatcacaactggagtgaacattccaattataaccgaactggctaaacctggaaaactgcccttagttagcgtgaatcaggagaagaatagcggaactcacattttgatgatcaccgagctcgtaaacgatacaaacgttcagtttttagaccaggacgatgacgatgaccctgacactgagttgtacctgacccagccgttcgcttgcggcactgcttttgccgttagcgtgctggactccttgatgagcgcaacctatttcaatgacaacattctgacactcattaggacgctggtgacagggggagcaaccccagagctggaagccctgatcgccgaggaaaacgccttaagaggaggctactctacaccgcaaaccttagctaaccgcgatcgttgtcgcgtggcccagctggccctcctggacgggccttttgccgacctgggggacggcggttgctacggagacctgttttgcaaggccttaaagacttataacatgctgtgcttcgggatctaccgtctcagagacgcacatctctccacgccgtcccagtgtactaagaggtacgtgatcaccaaccccccttacgagttcgagctcgtgccaacggacctgattttttgcctgatgcagttcgaccacaatgccggacagagtcgggctagtctgagtcactcttctcattcttcacagtcctcttccaagaagagctctagtgtccacagcatcccaagtactgctaatcgacaaaataggccgaaaagtcgagagagtcgggacaagcagaaccgaaaagagatggtgtataggtag

SEQ ID NO: 235686 - DNA, 3678 bp, synthetic construct
  misc_feature 1..3678: note = Description of Artificial Sequence: Synthetic coding sequence
  source 1..3678: mol_type = other DNA
ccaaaaatggacgctctgatcattcctgtgacaatggaggtaccgtgcgattctagagggcaacgcatgtggtgggcctttctcgcaagcagtatggtaacgttctttggtggtctgttcataatcctcttgtggcggacactgaagtatctttggactgtatgctgtcattgcggcggtaagacaaaggaagctcaaaagataaacaatggctccagtcaagccgacggaaccctgaaaccggtcgacgaaaaagaagaggccgtggctgccgaggtgggatggatgacatctgtgaaagactgggccggagtaatgatctctgcccagactctcacgggaagggtactggtggtcctggtgtttgcactgtcaataggggctttggttatatatttcatcgattcctccaatccaatagagtcctgccagaatttctataaagatttcactctccagatcgatatggccttcaacgttttctttttgctgtatttcggcctgcggttcattgctgcaaatgataagctgtggttttggctggaagttaattctgtagtagacttcttcactgtgccccctgtctttgtgtctgtttatctgaacagatcctggttgggactgcggtttctgagggccttgaggctgattcaattctctgagatcttacaatttctgaatatcttaaaaactagcaactccattaaactcgtaaatctactgtccatctttatctccacatggctgaccgccgcaggatttatccatcttgtggagaatagtggagacccctgggagaattttcagaataatcaagccctcacctattgggaatgcgtctatctcttaatggtgacgatgtccactgtcggatacggcgacgtgtacgccaaaaccactttgggcagactttttatggtgttttttattctggggggattggccatgttcgctagctacgttccggagataattgagctcattggaaaccgcaagaagtatggaggttcttacagcgcagtctccggacgtaagcacatcgtggtgtgcggacatattacgctagagtccgtgagcaactttctgaaagattttctacataaggatcgcgatgatgtaaacgttgaaatcgtgttccttcacaatatcagccctaatctagagctggaggctttattcaaacgccattttacacaagttgagttttatcaaggcagtgtgctcaatccccatgacctggccagagtcaaaatcgaaagcgcggatgcttgcctgatcctcgctaataagtactgcgccgatcccgacgctgaggatgcctccaatataatgagagtgatttcaatcaagaactaccaccctaaaatacgcatcattactcagatgctgcagtatcataataaagcccacctactgaatatcccaagctggaactggaaagagggagatgatgctatctgcctcgctgaacttaagctaggctttatcgctcagagttgtctggcgcagggtttgtccacaatgctggccaaccttttttctatgagaagctttattaagattgaagaagatacctggcaaaaatactatctcgagggtgtgtccaatgagatgtacactgagtacctctcgagtgccttcgtcggtcttagcttccccacggtttgcgagctgtgcttcgtaaagctgaaactgctcatgatcgctattgaatacaagtctgctaaccgcgagtcaagaatcctcatcaatccgggaaatcacctgaaaatccaggaagggaccctcggtttttttattgcgagtgatgccaaagaagttaagcgggctttcttctactgcaaagcctgtcacgacgacatcactgaccccaagaggatcaagaaatgtggttgcaaacgcccaaagatgagcatatacaaaaggatgagacgcgcttgttgtttcgattgtggacgatcagagagggactgtagctgtatgtccgggcgagtgagagggaacgtcgataccctagagcgcgcattccccctcagctccgtgagtgtgaacgactgttcaacctcttttcgtgcatttgaggatgagcagcctagcacactatctcccaaaaaaaagcagcggaacggaggcatgagaaactctcctaatacctctcctaagcttatgagacatgatcccttactcattcctggtaacgatcaaattgataacatggattcaaacgtgaaaaaatatgactccacaggcatgttccactggtgcgccccaaaggaaatagagaaagtgatcctgacaaggagcgaggctgccatgactgtcctttctggccacgtcgtcgtctgtatttttggagacgtgtcctcggccctcattggcctgcgcaatttggttatgccactgcgcgcatctaatttccactaccatgagctcaagcacatcgtattcgtgggctccattgagtacctaaagagggagtgggagacgctacacaactttcctaaggtttccatcctgcccggtacccctctcagtagagccgacctgcgggcagtcaacatcaatctgtgtgatatgtgtgtcatcctgtctgcgaatcagaataacatcgatgacacctccctacaggataaagaatgcatcctagcctctctgaatatcaagtccatgcaattcgacgactccataggcgtcctccaagccaattcacaaggatttaccccacctgggatggatcggtcatctcccgacaattcgccagtccacggcatgctgagacagccttcaatcactaccggagtcaatattcctattatcacagaactcgtgaacgacactaatgtccaatttctggaccaagatgatgatgatgatcctgacaccgagttgtatctcacccaaccattcgcctgtggcactgcatttgcggtgtccgtactggactcactaatgtctgccacatatttcaacgataacatcctgactctcatccgaacgctggtgacaggaggcgctaccccagagttggaggcactgatcgcagaagaaaatgcgctgcgaggaggctatagcaccccacagaccctggctaacagggacaggtgtcgggtggctcaactggccctgttggatgggccttttgctgacctgggagatggaggttgttatggcgatttgttctgcaaagcactgaaaacttataacatgctgtgcttcggaatctaccggcttcgtgatgcacatctatccacaccgtctcagtgcaccaaaaggtacgtgatcacaaatcccccttatgagtttgaactggtgcctactgacctcatcttctgcctgatgcagtttgaccacaatgccggacagtctagggcatcgctttcacattctagccactctagccagagttcgtctaaaaaaagttcaagtgtgcacagcatcccgagtacagcgaaccgacagaatcggcctaaatcccgtgagtctcgggataaacagaatgccactcggatgaatagaatgggacaggaaaagaaatggttcaccgatgagccggacaacgcgtacccccgtaatatccagatcaagcccatgtccactcacatggctaaccagatcaaccaatataagtccacgtcttctctcatccctcccatccgtgaagttgaagacgagtgttag

SEQ ID NO: 235687 - DNA, 3660 bp, synthetic construct
  misc_feature 1..3660: note = Description of Artificial Sequence: Synthetic coding sequence
  source 1..3660: mol_type = other DNA
atggccaacgggggtggagggggaggcggatcgtcgggcggtggagggggtggcggtgggagcagtctgaggatgtcctcgaacatccacgcaaatcatctcagtctagacgctagttcatcctcaagttcatcttcttcctcctcgtcgtcttcatcatcttcaagttctagctccagcgtgcacgagcctaaaatggatgcgctcattattcctgttacgatggaagttccgtgtgactctcgtggccagcgcatgtggtgggcctttctagctagcagtatggtgaccttttttggtggattgttcatcatcctgctgtggcgcaccttaaaatatctttggaccgtctgctgtcattgcggaggcaaaacaaaggaagcccaaaagattaataacggttcatcccaggctgatggtacactcaagccagttgacgagaaagaagaagcagtggccgcagaggttgggtggatgacttctgtgaaagactgggccggagtgatgataagcgcccagaccttgactggaagagttctggtggtattggttttcgccctcagtatcggagctcttgtgatctacttcattgactcatccaacccaatagaatcatgtcagaatttttacaaagactttacactacaaattgacatggcctttaacgtgttctttctgctctactttgggctacggttcatcgccgctaatgataagctatggttctggcttgaagtgaacagcgtcgttgacttcttcacagtccctcccgtattcgtcagtgtgtacctgaacaggtcatggcttggcctgcggtttctgagagctctaagattaatccagttctccgaaattctccagtttctgaatatccttaaaacaagtaatagcattaagctcgtaaacctactgtctattttcatctccacctggctcaccgctgccggattcattcacctggttgagaacagtggcgacccatgggaaaatttccagaacaatcaggctttaacttattgggaatgcgtgtatctactcatggtaactatgtccactgttggctatggcgatgtctacgcaaaaacaacattaggtcgattattcatggtcttctttatcttgggtgggctggctatgtttgcctcttacgtccctgaaattatagagctgatcggtaaccggaagaagtacggaggtagctattccgccgtgagcgggcgtaaacacatcgtcgtgtgcggacacataactctggagagcgtatccaatttcctgaaagatttcctgcataaagacagggacgacgtaaacgtcgagattgtttttctccacaatatatctccaaacttagaacttgaagccctatttaagcgtcatttcacgcaagtagaattctaccagggttctgttttgaatcctcatgacctcgctagagtaaagatcgagtctgccgacgcatgcctgatcctcgccaacaagtattgcgccgacccggatgccgaggacgcctccaacattatgcgagtaatcagtatcaaaaattaccatcccaagattagaatcatcacacagatgctgcagtatcacaataaagcccacctgttgaacatcccatcctggaactggaaggagggggacgacgccatctgccttgccgagctcaagctgggttttatagcacagtcctgtctggcacagggtttgtccaccatgctggctaacctcttctccatgcggtcattcatcaagattgaagaggatacgtggcagaagtattacttggagggagtctcaaatgaaatgtacactgagtacctttcgtcggctttcgtgggcctctcattccccacagtgtgtgaactttgctttgtcaagctcaagctgctgatgatcgcgattgagtacaaaagtgctaatcgagagtctaggattctgatcaacccaggaaaccacctgaaaatccaggaaggaacactgggtttttttatcgcttcagatgcgaaggaggtgaagagggcctttttttactgtaaagcatgccacgatgatataaccgatccaaagaggatcaagaaatgtggctgcaagcggttggaagacgagcagccgagcacactaagtcccaagaaaaaacagcggaacggcggaatgcgtaactctcctaacacctcccccaagctcatgcgacatgatccgctcctgatccctggcaacgatcaaatcgacaacatggatagtaatgtcaagaagtacgacagtacagggatgttccactggtgtgctccaaaagaaattgagaaagtgattctggttaccggatggatgccttatcttggaccccgagtcctgatgacttgcttggatataggcgtagtctgtatgcccaccgatatacagtccactagtccggctagcattaagaagtttaaagaaaccaggtctgaagccgctatgactgtgttatcaggtcacgtcgtggtttgcatatttggtgatgtctcctctgctctgatcgggctgcgcaatctggtgatgcctctccgggctagcaattttcactaccacgaactaaaacacattgtcttcgttggctcaatcgaatacctgaaacgtgaatgggaaactctgcacaacttcccaaaagtctcaatactcccgggaactccactgtctcgtgctgatctacgagccgtgaacatcaacttgtgcgatatgtgcgtcattctcagcgccaatcaaaataacatagatgacacatcgcttcaagacaaggagtgtattctggcctccctgaatattaagtccatgcagtttgacgattctatcggggtgttacaagccaattcgcagggttttacccccccaggcatggacaggtcaagccctgataattctcccgtgcatgggatgcttcgccagccctctatcaccacaggggtgaacatccctatcattactgaactcgttaatgataccaatgttcagttcttggatcaagatgacgacgacgaccccgatacagagttgtatctgactcagccattcgcctgtggcacagccttcgccgtctctgtgctcgactcattgatgtctgccacctatttcaatgacaatattctgaccctcatccggacccttgtgacaggtggtgcgacgcccgagctcgaagcccttattgcggaggaaaatgcgctgcgcggagggtatagcaccccccaaaccctcgcaaatcgcgaccgttgccgagttgcacaactcgccttattagacggccctttcgcggacctcggagatgggggttgctatggggatttattctgtaaggcgctgaagacatacaacatgctctgcttcggaatttaccggctccgtgatgcccatttatctacaccatctcagtgcacaaagagatatgtgattactaaccccccatatgagttcgagctcgtgcctacagacctgatattctgcttgatgcagttcgaccataacgctggacagtcccgtgcatccctgtcacacagtagtcatagtagtcagagctctagcaaaaaatccagttccgtccactccattccgtcgactgcgaatagacagaatcggccaaagtctagggagagtagagacaaacagaaatacgtgcaggaggaacggctctag

SEQ ID NO: 235688 - DNA, 3723 bp, synthetic construct
  misc_feature 1..3723: note = Description of Artificial Sequence: Synthetic coding sequence
  source 1..3723: mol_type = other DNA
atggccaacgggggtggaggaggcggtggatctagtggcggaggagggggtggaggcggttcgtctctgcgaatgtcaagtaatattcatgccaaccacctctctctggacgcgagttcaagctcatcttcatctagctctagcagctcgtctagcagctcaagttccagcagctcgagcgtgcatgagccaaagatggatgcgcttattatccctgtgaccatggaagtgccttgtgactcgagaggacagagaatgtggtgggcgtttcttgccagcagtatggtgaccttcttcggaggactgtttatcatcctcttatggcgcacattgaaatatctttggactgtctgttgtcattgcggcggaaaaaccaaggaagcacagaaaattaacaatggatcgtctcaggcagacggcaccctcaagcccgtggatgagaaggaagaggccgtcgccgcagaggtgggatggatgacttcagtcaaggattgggccggtgtcatgatcagcgcacagacactgacaggcagggtcctggttgtcttagtatttgccctgtcaattggagcccttgttatctattttatagattctagcaatccgatagagtcgtgtcaaaatttttataaggattttacactgcagattgacatggcttttaacgttttttttctgttatatttcgggctccgattcattgctgccaatgacaagctctggttttggctggaagtcaactctgttgtcgacttttttactgtcccgccagttttcgtatccgtatatttgaatcgatcttggcttggcttgagatttctgagagcgcttcgactgattcagttttctgagattctgcaattcctgaacattctcaagacctctaactctatcaagttggtaaatctcctaagcatttttataagcacatggttgacagccgcaggcttcattcatttggtggaaaactccggcgatccttgggagaactttcagaacaaccaggcacttacctattgggagtgtgtctacctgctcatggtgaccatgtctaccgtagggtacggcgatgtctatgcgaagaccacacttggcagactgtttatggtcttctttattttgggtggactagccatgtttgcctcgtatgttccagaaataatcgagttaatcggcaaccgcaagaaatatggcggaagttactctgctgtctcaggaaggaagcacatcgtggtctgtggtcacatcacactggagtctgtgagcaatttcttaaaagattttcttcataaggaccgagacgacgttaacgttgagatagtctttctgcataacatatccccgaatctcgaactggaagccctgttcaagagacactttacccaggtggagttctatcagggctccgtgctaaaccctcacgacttagcacgcgtcaaaattgaatctgccgatgcctgtctgattttagccaacaagtattgcgctgatccagacgcggaggacgctagcaacattatgagggttatcagcattaaaaattatcatcctaagatccggatcattacgcagatgttacagtaccacaataaggctcacctgctgaatattccaagttggaactggaaagaaggggacgacgctatttgtctggcggaactgaaactgggctttatcgcgcagtcgtgcctggctcagggtctgtcgacaatgctggctaatttgtttagcatgaggagttttattaaaatagaggaagacacctggcaaaagtactatctcgaaggagtgtcaaacgagatgtacacagaatacctgagtagcgcttttgtgggactcagtttcccaactgtgtgtgagctttgctttgtgaagctcaaattgctgatgatcgcaatcgaatataaatctgcgaacagggaatcacgcggaaggctgtccattcttatcaaccccggaaaccaccttaaaatccaggaggggacactgggtttctttatcgctagcgacgcaaaggaagtgaaaagggcctttttttattgcaaagcttgccatgacgatataactgatccgaaaaggatcaagaaatgtggatgcaagagaccgaagatgtccatctataaacggatgagaagggcttgctgtttcgactgcgggagatcagagcgtgattgtagctgcatgtccggcagggtaagaggcaatgtggacacattagagagggcctttcccttaagttccgtgtccgttaatgattgcagcacctcctttagggcgttcgaggatgaacagccatcgacattgtcccctaagaagaaacagagaaacggagggatgcgaaatagtcctaacaccagtcccaagctcatgaggcacgaccctctgctgattccagggaacgaccagattgacaatatggactcaaatgttaagaaatacgactcaaccgggatgttccattggtgcgccccaaaggagatcgagaaagtgattttgacaaggtctgaagctgcgatgactgttttaagcggccatgtggtagtgtgtatcttcggtgacgttagtagcgccctcattggattgcggaacttggtaatgcctctgagagcctctaatttccattatcatgaactcaaacatattgtgttcgttgggtctattgagtatttgaagagggagtgggagacattgcacaattttcccaaggtgtcgatactgccgggaaccccactgagccgggctgatttgcgggcagtgaatataaacttatgcgacatgtgcgtgatcctctctgcgaaccaaaataatatagatgacacttccctgcaggataaggaatgcattctcgcctctctcaacatcaaatcaatgcaattcgatgactcaattggggtcctccaagccaacagtcaaggcttcacccctccaggtatggaccgctcaagcccagataattctccagtgcatggtatgctgcggcaacctagcatcactacgggcgtcaacattcctattattactgaattagtgaacgatacaaatgttcagttcttggatcaagacgatgatgatgatccagatacagagctgtacctaacccagcccttcgcctgcgggaccgcctttgctgtttcagtgctggattcgctgatgtctgctacatattttaacgacaatatcctgaccctgatacgcactctggttaccggcggtgccaccccggagctcgaggccctcatcgctgaagagaacgcgctgcggggtggatattctacccctcagaccttagccaacagggatagatgtcgcgtggcccagcttgctttacttgatggaccgttcgccgacttgggtgacggaggctgctatggagatttattctgcaaggctctgaaaacatataatatgttgtgttttggcatttatcggctgcgcgacgcccacttgtcaaccccttcccagtgcacaaaaaggtacgttattaccaacccaccatatgaatttgagcttgtgcccaccgatttaattttttgtctcatgcaattcgaccacaacgccggacagtccagagctagcctgtcccattctagtcatagcagccagtcctctagcaagaagagcagctcagtccattctatcccgtcaactgctaatcgtcagaacaggcccaagagtcgcgagtcccgggacaaacaaaaatacgttcaggaggaaaggctgtag

SEQ ID NO: 235689 - DNA, 2970 bp, synthetic construct
  misc_feature 1..2970: note = Description of Artificial Sequence: Synthetic coding sequence
  source 1..2970: mol_type = other DNA
atggccttcaatgtgttcttcctcctttatttcgggcttcgtttcattgcggcaaacgacaagctttggttttggttggaagtgaattcagtcgtagacttttttactgtccccccagtgttcgtttcagtctacctgaaccggagctggctgggtctgcgctttctgagagcactacgccttatacaattttccgagatccttcaattcctcaacattttgaaaactagcaacagcatcaaactcgtgaaccttctgtctattttcatctctacatggctgactgctgccggtttcatccacctcgttgaaaattcgggagacccatgggagaactttcaaaacaatcaggcattgacatactgggagtgcgtgtatcttctgatggtgacgatgagcaccgtcgggtatggagacgtttatgcgaagactaccctcgggaggctgttcatggtgttctttattctgggcggtctggcaatgttcgctagttacgtgccggagatcattgagctgatcggcaaccgaaaaaaatatggcggtagctattctgccgtctcgggccgaaaacacattgttgtgtgcggccacattactctagagtctgtcagcaatttcctcaaggactttctgcacaaagacagagatgacgtgaacgtggaaatagtgttccttcacaatataagccccaatctagaactcgaagccttgttcaaaaggcacttcacccaggtcgaattttaccaaggtagcgttttaaatccccacgatttggctagggtgaaaattgagtcagcggacgcctgcctgattctagctaacaaatattgcgccgatccggacgcagaagatgcaagcaacattatgcgggtgataagtattaagaactatcatccgaaaatccgcatcatcactcagatgctccaataccacaataaagcccatcttctgaatatcccttcgtggaactggaaggagggcgatgatgctatttgcctggcagagttgaagttggggtttatcgcccagagttgtcttgcacagggcctctcaaccatgctagctaacctcttttctatgcggtcctttattaaaatagaggaagatacttggcaaaagtactaccttgaaggagtcagtaacgaaatgtataccgagtatttgagcagcgccttcgtcgggttatcttttcctacggtgtgtgaactatgtttcgttaagttgaagctgttgatgatcgccatcgaatacaagagtgctaaccgcgagtcacgcattctgattaatccaggcaatcacctaaaaatccaggagggcaccctggggttcttcatagcttcagacgcaaaagaagtgaagagggcattcttctactgtaaagcgtgtcatgatgatatcaccgaccctaagagaatcaagaagtgtggatgcaagagactgaaagtggctgctcgatccagatattccaaagacccattcgaattcaaaaaagagacacctaatagtagactggttacggagccggtcgaggatgagcagccatccaccctgtcccccaagaagaaacagagaaacggcggtatgcgaaactctcctaacacatctcccaaattgatgcggcacgatcccttactgattcccggaaacgatcagatcgataacatggattcaaacgtgaaaaagtacgacagtaccggcatgtttcactggtgcgccccaaaagagatcgaaaaggttatactgaccagaagcgaggctgctatgaccgtgctgagtggtcacgttgtggtctgtatcttcggtgacgtgtcgagcgcactaatcggcctgaggaatttggtcatgccgctgagagcctctaatttccattatcacgagctcaaacacatagtcttcgtcggcagcatcgagtatctgaaacgggaatgggagactttacataatttcccaaaagtttcaattctccctggtactccattaagcagggccgacctgcgtgctgtgaatatcaacctgtgcgatatgtgtgtgatcctgagtgccaatcagaacaacattgatgacaccagcctccaggataaggagtgtatcttggcgagcctcaatattaaatcaatgcagttcgacgactctattggagtgctgcaggctaacagtcaaggcttcacaccccctgggatggaccggtcgagtcctgacaatagccctgtgcacggaatgcttagacagccctcaatcacaaccggcgtgaatattcctatcatcacagagctggtcaacgacacgaatgtgcagttcctggaccaggacgatgacgacgaccccgacacagagctctatctgactcagccattcgcctgcggcaccgccttcgctgtctccgtgctagatagcttgatgtccgccacttacttcaatgataatatcctgaccctcatcaggacccttgtgaccggtggggctacgccggaactggaggccttgatcgctgaggaaaatgccctgcgcggaggatattccaccccccagaccctggcaaaccgcgatcgctgtagagtggcacagttggcgctgctggacggcccatttgcggatctgggggatggcggatgctacggcgatcttttttgtaaggcgttgaaaacttataatatgttgtgttttggtatttaccgcctgcgtgacgcgcatctgagcacaccctcccagtgcactaaaaggtatgtgattaccaatcctccttacgaattcgaactggtcccaaccgatctcattttctgtctcatgcagttcgaccataatgctggccaatcccgagccagtctgagtcactcttcacactcgagtcagtcttcaagcaagaaatcctcttccgtacattcaatcccttccaccgctaataggcaaaatcggcctaagtcaagggaaagtagagataaacagaaatacgttcaagaggaaagactgtag

SEQ ID NO: 235690 - DNA, 543 bp, synthetic construct
  misc_feature 1..543: note = Description of Artificial Sequence: Synthetic coding sequence
  source 1..543: mol_type = other DNA
tgaaaaatcagaatcatcactcagatgcttcagtatcacaataaggcgcacctcttgaacattcccagctggaattggaaagaaggagacgacgccatatgcctggctgagctgaagcttggcttcattgcgcagtcttgcctggctcaaggtctcagtaccatgttagccaatctcttcagcatgcgaagcttcataaagatcgaggaagatacatggcagaagtattatcttgagggagtgagtaatgaaatgtacaccgagtatttgagctccgctttcgttggcctgtctttccccacggtgtgcgagctgtgtttcgtcaagctcaaactgctcatgatcgcgatcgagtacaaatcagcaaatcgggagtctcgcatcttaataaatcccggtaatcatctgaaaatccaggagggcacccttggttttttcatcgcttcagacgcaaaagaggtaaaacgccctcctcagctgtgccttccactggcggcacagaagagatgctttcagtccgacaagctcgatatctttatctag

SEQ ID NO: 235691 - DNA, 2661 bp, synthetic construct
  misc_feature 1..2661: note = Description of Artificial Sequence: Synthetic coding sequence
  source 1..2661: mol_type = other DNA
tgaaactctggagacccatgggagaactttcagaacaaccaggccctcacttactgggaatgcgtttatctgctgatggtgactatgtctaccgtaggatacggtgacgtttacgccaaaacaactttaggtaggctttttatggtgttctttatcctgggagggttagcaatgtttgcttcgtatgtacccgaaatcatcgagctgatcggcaacaggaagaagtacggtgggtcctatagcgcagtctctgggaggaagcacattgtagtttgcgggcacattaccctcgagagtgtttccaattttttgaaggattttctgcacaaggaccgcgatgacgtgaatgtggaaattgtattcctgcataacatcagccccaacctagagttggaagccctgtttaaaagacatttcacccaggtggagttctaccaaggctccgtcttgaacccacatgacctggctagagtcaaaatcgagtccgccgacgcttgtttgatcctggccaataaatattgcgccgaccccgatgccgaagacgcctctaatattatgagggtaatttctatcaaaaattatcacccaaagatccgtatcatcactcagatgctgcaataccataataaagcgcacctgctcaacattccgagctggaattggaaggagggagacgatgcaatctgtttggctgaattgaaactcgggtttattgctcaaagttgtctggcccagggcctgagtaccatgcttgctaacctgtttagcatgcgatccttcataaagatcgaagaagacacatggcaaaagtattatcttgaaggcgtctcaaatgagatgtacactgagtacctttcaagtgccttcgtcggcctctccttccccactgtctgtgaactgtgtttcgttaaactgaagctcctgatgatcgcgattgagtacaaatctgcgaacagggaaagcagaatcctcattaacccgggtaatcacttaaagatccaggaggggacgttagggttctttattgcttctgacgctaaagaagtcaagagggcctttttttattgtaaagcatgccacgatgatatcacagaccctaaacgcataaagaaatgcggctgtaagagactcaaggtcgccgcaaggagtagatattcaaaggatccatttgagtttaaaaaagagacaccaaacagccgcctggtgactgagcccgtagaggacgagcagccatctaccctgagtcctaaaaagaagcagcggaatgggggtatgaggaactcaccaaacacgtctcctaagcttatgcgccacgaccccctactgattccagggaatgatcagatcgataacatggattcaaatgtcaagaagtatgacagtacaggcatgtttcattggtgcgcgcctaaggaaatcgaaaaggtcatactgacaaggtctgaggctgcgatgacggtcctgtccggtcatgtggtggtgtgcatcttcggggatgtgtcctcagcattgatcggactgcgaaacctggttatgcccctgagagcctccaatttccactatcatgagctgaagcacatagtgtttgtaggtagcatagaatacctcaagagagagtgggagactctgcataacttcccaaaggtcagcatcctgcccggaacccctctcagtagggctgatctgagggcagtgaacatcaacctctgcgacatgtgcgtcatcctttcggcgaatcagaacaatatcgacgatacatccctgcaggacaaagaatgtatcctggctagcctaaatataaagagtatgcaatttgatgattcaattggagtccttcaggctaatagtcaaggatttacacctcccggtatggataggagctctccagacaactcaccagtgcacggaatgttaaggcagccatccataacgaccggagtcaacattcccattatcactgagctcgtgaatgacacaaacgtccagttccttgaccaggatgatgatgacgatccggacactgagctgtacctcacgcagccatttgcctgcgggacagccttcgcagttagtgtgctggacagcttgatgtccgcgacctatttcaatgataacatcctcactctgatccgaaccttggtcacagggggagcaacacctgagcttgaggcccttattgctgaagaaaacgctctgagaggtggctactccacaccccagaccttagccaaccgtgatagatgccgggtggcccagttggcgttactcgatgggcctttcgcagatctgggcgatggaggttgctatggggacctgttttgtaaggctctgaagacctataacatgctctgcttcggtatataccggctgagagatgcgcatttgtcgacccccagccagtgtaccaagaggtacgtcataacgaaccctccgtatgaatttgagctcgttccgacagatcttatcttctgcctgatgcaatttgaccacaacgccggtcaatcacgagcctctttgagccattcgtctcattcaagccagtcaagttctaaaaagtcgagctcagtgcatagtattcccagcacggctaaccggcaaaacagaccaaaatcacgtgaatctagggataagcagaagtatgtgcaggaagagcgcctttag

SEQ ID NO: 235692 - DNA, 795 bp, synthetic construct
  misc_feature 1..795: note = Description of Artificial Sequence: Synthetic coding sequence
  source 1..795: mol_type = other DNA
tgagtcatatccattaagaattatcatccaaaaattagaatcattacccagatgctccagtaccataataaagctcacctgctgaacatcccatcttggaactggaaggagggtgatgatgcaatctgcttggcagaattgaaactggggttcattgcccagagttgtctcgctcaagggctgtcaacaatgctggccaaccttttctcaatgcgcagcttcattaagatcgaagaagacacatggcagaaatattatcttgagggcgtaagtaacgaaatgtacaccgagtatctctcgagcgcatttgtgggacttagtttccccactgtgtgtgaactgtgcttcgtcaaactgaagctcctcatgatagcaattgaatacaaaagcgcgaacagggaatcccggatcctaataaatcccggaaaccacttaaagatacaggaaggcactttaggcttcttcattgctagtgatgcaaaggaggttaaacgtgcatttttttactgcaaagcatgccatgacgatatcactgacccaaaacgcatcaagaagtgtggctgcaagagacttgctggatctcaggacactcatcctgatagcttttaccatcaggcggtgaatgctagctcctacctgcacggtgggggacaaatgtggccagtttcgtcttccagcagcatcctgctccactatctgcgccgtcagatgcctggccctgcacgcctgcccctggagttgtcatgccagggatctgctctgagtcctaaccctgacctctactgtatgaagtag

SEQ ID NO: 235693 - DNA, 3630 bp, synthetic construct
  misc_feature 1..3630: note = Description of Artificial Sequence: Synthetic coding sequence
  source 1..3630: mol_type = other DNA
tctaatatccatgcaaaccacttgagcttggatgccagctcttcaagttcttcttcctccagctcatcttccagctcctctagcagctccagtagctcaagcgttcatgaacctaagatggatgctctgattatccctgttactatggaagtcccatgcgactcgcgtggtcagcggatgtggtgggcctttctggcctcatctatggtgacgtttttcggcggactgtttatcatactcctgtggaggacactcaagtatttatggaccgtgtgttgccactgcggcggaaaaaccaaggaggcccagaaaatcaacaacggaagtagccaggccgatggcaccctgaaaccagttgatgaaaaagaggaggccgttgcagccgaagttgggtggatgacctcggtcaaggactgggccggagtcatgatttctgctcagactctgactggcagagttctcgtcgttttggtgttcgctttaagcattggagcattggttatttacttcattgacagctcaaaccctatagagtcctgtcagaatttttacaaagactttaccttgcagatcgacatggcatttaacgtgttcttcctgttgtacttcgggttaagatttattgctgccaacgacaagctttggttttggctggaagtcaatagtgtggtggattttttcaccgtccccccagtgtttgtgagcgtgtacctcaacaggagctggttaggactccggtttctgcgggcattacgcctcatacagttcagtgaaatactgcaattcctgaacatcttaaagacatcgaattccatcaagctggtgaatctcctgtccatcttcatctctacatggctaacggccgctggcttcattcacctcgtggagaattcgggagacccctgggagaatttccagaacaaccaagcgctgacttattgggaatgtgtatatttactcatggtgacgatgtcaactgtcggctatggagacgtgtacgctaaaactacactgggcagattatttatggtgttctttatcttgggcggattagcgatgttcgcatcttatgtccctgagattattgagctgatcgggaacaggaaaaaatatggaggtagctattccgcagtgtcaggcagaaaacacatcgtggtgtgtgggcacatcacactcgagtcagtgagcaacttcctgaaggacttccttcacaaggatagggacgacgtcaacgtagaaatcgtgttccttcacaacatctctcctaatttagaattagaagcactgttcaagcggcactttacacaagtggagttctaccaggggagtgtgctgaatcctcatgatctcgccagggtcaaaatcgagtccgcagacgcttgcctcattcttgccaataaatactgcgctgacccagatgccgaagacgccagcaatataatgcgtgtgatctcaataaagaattatcaccctaaaatacgtattattacacagatgcttcagtatcataacaaagcacatctcctcaatatcccttcatggaattggaaggagggcgatgacgcaatctgtctggctgagctcaagctgggattcatagcacagagctgtctggcccagggccttagcacaatgctcgccaatctcttttccatgagaagtttcatcaaaattgaggaggacacctggcaaaagtactacctggagggcgttagcaatgagatgtataccgagtaccttagctctgcattcgtcggtctgtcttttcctaccgtttgtgaactgtgttttgtcaaattaaagcttcttatgatcgccatcgaatacaaatctgcaaatcgagagagccgaatattaattaatcctggtaaccatcttaagatccaggaagggaccttgggattttttatcgcctccgacgccaaggaggtgaaaagggccttcttctactgtaaagcttgccacgacgatattactgatccgaagcgtatcaagaaatgcggctgcaaaagacccaagatgtcaatctacaaaagaatgagacgggcatgttgctttgactgcggcagatcagagagggattgctcatgtatgtccggcagagtcagagggaatgtggatacactggaacgcgcttttccactgtctagtgtgtccgtgaatgactgctctacaagtttccgagccttcgaagacgaacagccttctacattgtcccccaaaaaaaagcagcgtaacgggggtatgcgcaattcccccaacacaagccccaagctgatgcggcacgatcccctgttgataccaggcaatgatcagatcgataacatggatagcaacgtgaagaaatatgattccacaggcatgttccactggtgcgccccaaaggaaattgagaaagtgatactaacccgaagcgaagcggcaatgaccgtgctttcaggacacgtggttgtatgtatctttggggacgtctcgagcgctctaatcgggcttcggaatctggtgatgccgcttcgtgcctctaatttccactaccatgaactaaaacacatcgtgttcgtggggtctattgagtacctgaaacgggagtgggaaactttgcacaactttcccaaggtctccattttgcccggaacaccattgtcgcgcgcagatctgcgagcagtcaatatcaacctgtgtgacatgtgcgtgatactgagtgcaaatcaaaacaatatcgatgatacatcactccaagacaaggaatgtatcttggcctcactgaatatcaagagcatgcaatttgatgattctatcggcgttctccaggcaaattctcagggcttcacacccccaggcatggataggagttcaccagacaatagtcccgtgcacggcatgctccggcagccaagcattacaacaggagttaacattccgatcattaccgagttagttaacgacaccaacgtacagttcttagatcaggacgacgacgatgaccccgatacggaactttacttgactcagcctttcgcttgtggaaccgcctttgcagtgagcgtactggatagtctgatgtctgccacttatttcaacgacaacatccttaccctgatcaggacattggtaaccggcggtgccaccccagagctggaagcgcttattgcagaagaaaacgcactccggggaggatactccaccccccaaactctcgccaatcgtgaccgatgtcgggtggcccagctggctctgttggatggtccctttgccgatcttggagatggcggatgctacggcgacctattctgtaaggcactgaagacctataatatgctgtgcttcggaatctatagactgcgcgacgctcatctgtcaaccccctctcagtgcacaaagcggtacgtgataactaacccaccgtacgaattcgagttagtgccgacagatttaatcttctgtctgatgcagtttgaccacaatgctggacaatcccgggcttcactctcccatagtagtcacagctcccaaagctcctctaaaaagagcagtagtgttcactctatccctagcactgcaaatagacagaataggccaaagtctagagagtcccgtgacaagcagaaaaaagaaatggtttatcggtag

SEQ ID NO: 235694 - DNA, 576 bp, synthetic construct
  misc_feature 1..576: note = Description of Artificial Sequence: Synthetic coding sequence
  source 1..576: mol_type = other DNA
atggtgaagaagctggtcatggcgcagaaacgcggagaaacacgagcattgtgtcttggagtgacaatggtagtgtgcgctgttataacctattatatattagtcactacagtgcttcccctgtatcagaagtctgtgtggacgcaggagtcaaagtgccacttaatcgaaactaatattcgcgaccaggaggaactgaagggcaaaaaggtgcctcagtacccgtgcctttgggtgaacgtgagcgctgctggcagatgggctgtgctgtaccatacagaggatactcgcgatcagaaccagcagtgttcttatatacctggtagcgtggataattaccagacagcgagggccgacgttgaaaaagtaagagcaaagttccaggaacaacaagtcttctactgtttctccgccccaagaggaaatgagacctccgttttgttccagagattatacgggccacaggccctcctatttagccttttctggcccactttcttgctgaccggcggtctgctaataatcgccatggtgaagtctaaccaatatctaagcattttagcagcacagaaatag

SEQ ID NO: 235695 - DNA, 393 bp, synthetic construct
  misc_feature 1..393: note = Description of Artificial Sequence: Synthetic coding sequence
  source 1..393: mol_type = other DNA
atggtgaaaaagctcgtgatggcccaaaagcgtggcgagactcgggctctgtgtttgggcgtcactatggtcgtgtgcgccgtcataacctactatatcttggtaaccaccgtgctgccattgtatcagaagtccgtctggacccaagagagtaaatgtcatctcatagagactaacatacgcgaccaggaagagctgaaagggaaaaaggtcccacagtacccatgcctgtgggtgaatgtttcagccgcaggccgatgggcagtgctttatcataccgaggatactagagatcagaaccagcaagtcttaaactggagagacggcgacaccagcttatatccctgtcaagtgtgcgagcctgtgccaaactgcccttgcccccgtggatag

SEQ ID NO: 235696 - DNA, 633 bp, synthetic construct
  misc_feature 1..633: note = Description of Artificial Sequence: Synthetic coding sequence
  source 1..633: mol_type = other DNA
atggctaagttgcgggtggcttatgagtacactgaggccgaagacaagtcaattcggctgggtttgttcctgatcatttcaggggtagtgtctctgttcattttcggcttttgttggctctcccctgccctacaagacctgcaggctaccgaggcaaactgtacagtgctctcagttcagcagattggcgaagtgttcgaatgcacttttacctgcggtgccgattgccggggaacttcccagtacccttgcgttcaggtgtacgtcaataatagcgaatctaatagcagagcgctgctccactccgatgaacaccaacttctcaccaatcctaaatgtagctatatccctccctgcaagcgcgaaaatcagaagaacctagagtctgtgatgaattggcagcagtattggaaggacgagatcggatctcagcccttcacctgttactttaaccaacaccaaagacccgatgacgtcctgttacatcggacccacgacgaaattgtgcttctgcattgcttcttatggcccctggtaacctttgtcgtgggtgttttgatagtcgtcttaactatctgtgcaaagagtctggccgttaaggctgaagccatgaagaagagaaagttttcttag

SEQ ID NO: 235697 - DNA, 2259 bp, synthetic construct
  misc_feature 1..2259: note = Description of Artificial Sequence: Synthetic coding sequence
  source 1..2259: mol_type = other DNA
atgaaacctgccgaacacgccaccatgtttttaatcgtcctaggctgcctgatactggcagtccttactacatttaaagagtacgagaccgtatctggcgattggctgctgcttctcgagaccttcgccatattcattttcggcgcagaatttgcccttaggatatgggccgctgggtgctgctgcaggtataaggggtggagaggcaggctcaagtttgcccgaaagccgctctgtatgctggatatctttgtcctcatcgcctccgtccctgtggtcgccgttggaaatcagggaaacgtcttggccacgagcctgcgatccctgagattcctgcagatactccggatgttgaggatggaccggagagggggaacctggaagcttctcggcagcgctatctgcgcccacagcaaggaacttatcactgcctggtatataggatttctgacattaatccttagcagttttttagtgtatcttgtggagaaggatgtgcccgaagtggacgcgcaaggcgaagaaatgaaagaagaattcgagacctacgccgatgctttgtggtggggactgataacactcgccaccataggatacggagacaaaacccccaagacatgggaggggaggcttatcgctgctacattcagtctgattggcgtcagcttttttgcactgccagcaggcattctggggagtggtcttgcgctgaaggtccaggaacaacatcggcagaaacacttcgagaagaggcgcaagccggcagccgagctgatccaggcagcctggaggtactacgccacaaaccctaaccgaatagacctggtggccacgtggaggttctacgagtctgtcgtgagtttcccattttttaggaaggagcagttggaggcagccagttctcagaagctgggcctgttggaccgggtccggctgagcaacccacgcggttcaaataccaaaggcaagctgtttaccccgttaaacgtggacgctatagaagaatcccctagtaaggagcctaagccggtaggacttaataataaagagagattcagaaccgcgtttcgtatgaaagcttacgcattttggcaaagttcagaggatgccggaacaggcgatcccatggcggaagatcgcggatatggcaacgatttccctatcgaggatatgatcccaactctcaaagccgcaattcgggctgtgagaatattacaattccgactttacaaaaagaagttcaaggagacactccggccttacgatgtgaaggacgtgattgagcagtacagtgccggacatctcgatatgttgagcaggatcaagtatctgcaaaccaggattgatatgattttcacacctggccctccaagtacccccaaacataaaaaaagccagaaaggctccgcattcacattccccagccaacaatcaccacggaatgagccctacgtcgccagaccatctacatcagaaatagaggaccagagtatgatgggcaagttcgtcaaagtggagcgccaggtacaggacatggggaaaaagctcgacttcctggtggacatgcacatgcagcacatggaaagactccaggtgcaggtcactgaatactacccaaccaaggggacctctagtcctgctgaagctgagaagaaggaagacaacagatattctgatctgaaaactattatctgcaactactctgaaactgggccaccggaaccaccctattcatttcatcaggtcaccattgacaaggtatccccttacggcttctttgctcatgatcccgtcaatctacctcggggagggccaagttccggcaaggtacaggctacgccaccatctagcgccaccacttatgtcgaacggcctactgtcttgcctattctgaccctgctggactcccgggtgtcttgtcactcacaggctgatcttcagggcccatattcagatcggatttcacccaggcagaggaggtctatcactcgcgactctgatactcctctgagtttgatgtctgtgaaccacgaagaactggagagatctccctcaggcttttcaatcagccaagatagggatgactatgtcttcgggccaaacgggggttcctcttggatgcgagaaaagaggtacctggcagagggtgagactgacaccgacacagacccatttacaccctctggaagtatgcccctgagctcaacaggagacggaattagcgactccgtgtggacacctagcaacaaaccaatatag

SEQ ID NO: 235698 - DNA, 1434 bp, synthetic construct
  misc_feature 1..1434: note = Description of Artificial Sequence: Synthetic coding sequence
  source 1..1434: mol_type = other DNA
atgaccggccaaagtttatgggacgtgagcgaagccaacgtggaggacggcgaaatcaggattaatgtgggagggtttaagcgaagactgcgctctcatacacttctgagatttcccgaaaccagactaggccgtctgctgctgtgtcactctcgcgaagccatacttgaactatgtgatgactacgatgatgtgcagcgggagttttatttcgatcgtaaccctgagttattcccctacgtgttacacttttaccacacgggcaaactgcacgtcatggcagagttatgcgtcttttccttttcccaagaaatcgagtactggggaataaacgaattctttatcgattcttgctgttcctattcgtaccatggacgaaaagtggagcccgagcaggagaagtgggacgaacagagtgatcaggagagcaccacctccagctttgatgagatcctggccttctacaacgacgcatctaagtttgatggtcagccactgggaaattttaggaggcagttgtggctggccctggataaccctggctactcagtgttgtcccgggtattctctatcttatctatcttagttgtgatgggctctatcataaccatgtgcctcaattccctgccagacttccagatccctgatagtcaaggaaacccgggagaggaccccaggtttgagatagtggagcatttcggaatcgcgtggttcacttttgagttagttgcacggttcgccgttgccccagattttttgaagtttttcaagaacgcgctcaatctgatcgacctgatgagcattgttccattttatattaccctcgtcgttaacctggtggttgaatctactcccaccctagccaacttagggcgtgttgcccaggtgctgagacttatgcggatctttaggatcctgaagctcgcaagacacagtactgggctgagaagcctgggagcaacactcaaatacagctacaaagaggtgggtctcttactcctctacctcagtgtcggtatttcgatcttctcagtcgtagcctacaccatcgaaaaggaggagaatgagggactggccactattcctgcgtgctggtggtgggctaccgtgagcatgacaactgtgggatatggtgatgtagtgccaggtaccaccgccggtaagctcactgcatcggcatgcatcctggccggaatccttgtcgtcgtgctgcctattactctgattttcaacaagtttagccatttttacaggcgccaaaagcaactggagtcggccatgcgttcttgcgacttcggcgacgggatgaaagaggtccctagcgttaacttgcgagattactatgcacacaaagttaagtcgctcatggcctcattaactaacatgagtagatcttcgccaagcgaactatctctcaacgactccctcaggtag

SEQ ID NO: 235699 - DNA, 1434 bp, synthetic construct
  misc_feature 1..1434: note = Description of Artificial Sequence: Synthetic coding sequence
  source 1..1434: mol_type = other DNA
atgactggccagtccctctgggacgtgagtgaggcaaatgttgaggacggcgaaatccggatcaacgtggggggtttcaagcggcgactccgctctcatacactgctgaggtttcccgagactagactaggacgattgctcttgtgtcactctagagaggctattctcgagctgtgtgatgattacgatgatgttcagcgtgagttctatttcgaccgcaaccccgagctgtttccatacgtgcttcacttttaccatactggcaagttgcatgtaatggccgagctctgcgttttcagcttttcgcaggaaattgaatactggggaataaacgagttctttatcgattcttgctgctcctatagctatcatgggcgaaaggtggaacctgagcaagagaagtgggatgaacagagtgatcaggaatcaacaacttcctcattcgacgagattctcgcattttataacgatgcctccaaattcgacggtcagcccctgggcaattttcggagacaactctggttagctcttgacaatcccggatatagcgtgctcagccgcgtgttcagcatcctgagcattctcgtcgtcatggggtccatcatcacaatgtgtttaaattcccttccagattttcagataccggactctcaggggaacccaggcgaagaccctcgctttgagatcgtggagcacttcgggatagcctggtttaccttcgaattggtggcaaggtttgctgttgcgccagattttcttaaatttttcaaaaatgcactcaacctcatagacttaatgtccattgtcccgttctatattacactagtcgtgaatctggtggtggagagcacgcccactctggcgaacctcggtcgcgttgcacaggtgcttcgcttaatgaggatattcagaatcctgaagctggccaggcatagcactggcctgcgatctctcggggctactctgaagtacagctacaaggaagtgggtcttctacttttgtaccttagtgtgggaatcagtatcttcagcgtagtcgcctacaccatcgagaaagaggagaatgagggactcgccactatacccgcatgttggtggtgggctactgtgagtatgacgaccgtagggtacggagatgtggtgcccggtacaactgctggcaaacttactgcctctgcatgcattctggcagggattctggtcgtggtcctgcctataaccctgatctttaacaagtttagccacttctatcgaaggcaaaagcaactggaatctgcaatgcggtcttgcgactttggggacggcatgaaggaagtgcctagtgtgaacctgcgggattactacgcccacaaggtgaaaagcctaatggccagtctcactaacatgagccgctccagtccttctgagcttagcctaaatgactccctgcgatag

SEQ ID NO: 235700 - DNA, 1476 bp, synthetic construct
  misc_feature 1..1476: note = Description of Artificial Sequence: Synthetic coding sequence
  source 1..1476: mol_type = other DNA
atggtgttcggcgagttcttccataggccaggccaggatgaggaactggttaacttgaacgtaggcggttttaaacagtctgtggaccaatccacactgctccggttccctcatacacgcttagggaaattgctcacctgccactcggaggaggccatcctggaactgtgtgacgactattcagtggcagataaggagtactattttgatcggaaccctagcctctttagatatgtgcttaatttctattatacaggaaagttgcacgtgatggaggaactgtgtgttttttccttttgtcaggaaattgagtactgggggatcaatgagctcttcatcgactcctgctgttctaaccgatatcaggagcgaaaagaggagaaccacgagaaagactgggaccagaagagccatgacgtgtctaccgacagctctttcgaggagagctctctttttgaaaaggagctggagaaatttgacacgctccgtttcggacagctgagaaagaaaatttggattcgcatggaaaacccggcttattgcctgtctgcaaagctgatcgcaattagttcccttagcgtggtgctggcaagtatcgtagccatgtgtgttcattctatgtcggaattccaaaatgaggatggagaagtggacgacccggtcttagaaggagtcgagatagcctgcattgcatggtttaccggtgagttggctgtccgcctcgctgcagctccatgtcagaagaaattttggaaaaatcccctcaacatcatagactttgtgagtataatccccttttacgccacactcgcagttgatacaaaggaggaggaaagtgaagatattgaaaatatgggtaaagtggttcagatcttgcgactgatgagaatattccgaatcttgaagctggcccgtcactccgttggccttaggtccctgggggcaacactgcgccactcatatcatgaggtagggttgctcctactgtttcttagcgtcggcatttccatctttagcgttctgatttactccgtggaaaaagacgatcacactagttccctcaccagtattcctatttgttggtggtgggcaacaataagcatgactacggtcggatacggtgacacccaccctgtcactctcgctgggaagctgatagccagtacttgtatcatttgcggcattctggtagttgctctccctataaccattattttcaataagttctctaagtattaccagaagcaaaaagatatcgacgtagaccagtgctctgaagacgcgccagagaagtgccacgaactgccctactttaatatacgggatatctatgcccaaagaatgcataccttcatcacttccttatcttctgttgggatcgtcgtgtccgatccggattctactgacgcatctagtatcgaggataatgaggatatttgtaacaccaccagcctcgagaactgtacagccaagtag

SEQ ID NO: 235701 - DNA, 1476 bp, synthetic construct
  misc_feature 1..1476: note = Description of Artificial Sequence: Synthetic coding sequence
  source 1..1476: mol_type = other DNA
atggtgtttggcgaatttttccatagacccggtcaagatgaagaacttgtaaacctgaacgtggggggtttcaaacagagtgttgatcagtccacgctgcttcgttttcctcatacacgcctaggcaagcttctgacctgccactccgaggaggcgatcctggagctgtgtgacgactactcagtcgctgacaaggaatattatttcgataggaatccctcactatttaggtatgtcctgaatttttactataccggaaagttgcatgttatggaagagctgtgtgtcttcagcttctgccaggagatcgaatactgggggatcaatgagcttttcatcgattcctgttgctccaacaggtaccaggaacgcaaagaagaaaaccatgagaaggattgggatcagaagtcacacgacgtgtcaactgactcaagtttcgaggaatcttctcttttcgagaaggagctggagaaatttgacactctgcgcttcggtcaattgaggaagaagatctggatcagaatggaaaacccagcatactgtctatcagctaaactgattgccatcagctccttgtcagtggtgctcgcttcaatcgtcgcaatgtgtgtgcactcaatgagtgagttccagaatgaggacggagaagtcgatgatcccgtgctcgagggcgtggagattgcttgtatcgcctggttcacaggtgaattagcggtgaggctggccgctgcaccatgccagaaaaagttttggaagaacccacttaacatcatcgactttgtgtcaataattcccttttacgccacgctcgccgttgacacaaaagaggaagagtctgaggacatcgaaaacatgggcaaggtggtccagatccttcggctcatgcgcatcttccggatcctgaagttagccaggcacagcgtcgggctgcgatccctcggcgcaactttacggcactcctaccatgaggttgggctgctgctcctctttctatctgtgggcatctccattttctccgttcttatttattctgtagagaaggacgaccatacatccagtctcacctctatccccatctgttggtggtgggccacaatcagcatgacaaccgtgggatacggcgacacccaccccgtcactctcgccggaaagctaattgcaagcacatgtataatttgcgggatcctggttgtggcgctgcccattaccattatttttaacaaattttcgaaatattatcagaagcagaaagatattgacgtcgaccagtgttccgaagacgcaccagaaaaatgccacgaacttccatatttcaacatcagggacatttatgcccagcgcatgcacacgttcataacttctctgtcttcagttggcatagtggtgtctgatcccgattccaccgatgcatcaagtatcgaagacaacgaggatatctgcaacaccaccagcttagagaattgcaccgccaagtag

SEQ ID NO: 235702 - DNA, 225 bp, synthetic construct
  misc_feature 1..225: note = Description of Artificial Sequence: Synthetic coding sequence
  source 1..225: mol_type = other DNA
atggttttcggagagttttttcacaggcctggccaggatgaggagcttgtgaatctaaacgtgggtggattcaaacaatctgtagaccagtcaaccttactgcgattcccacacacccgactcggaaagctcttaacatgtcatagcgaggaagcaatcctagagctgtgcgatgattacagtgtcgccgacaaagaatactacttcgaccgcaatcccagttag

SEQ ID NO: 235703 - DNA, 390 bp, synthetic construct
  misc_feature 1..390: note = Description of Artificial Sequence: Synthetic coding sequence
  source 1..390: mol_type = other DNA
atgatcctgagcaacactaccgccgtgacaccttttctgaccaaattgtggcaggagaccgtgcagcagggagggaacatgtctggccttgcgaggaggtcaccacgatcctcagatggaaagcttgaagccctatacgttcttatggttctgggattctttgggttctttacgctggggattatgctgagctacatccgcagtaaaaagctggagcactcaaacgaccccttcaacgtttatattgagtctgacgcctggcaagaaaaagacaaggcttacgtgcaggctagagtgctcgagagctaccggtcttgctacgtcgtggagaaccatctcgcaattgaacaacctaacacgcacctgccagaaaccaagccgtctccctag

SEQ ID NO: 235704 - DNA, 390 bp, synthetic construct
  misc_feature 1..390: note = Description of Artificial Sequence: Synthetic coding sequence
  source 1..390: mol_type = other DNA
atgattctgtctaacaccactgcagtgacaccttttctgactaagctgtggcaagagactgtgcaacaaggtggtaatatgagcggtttggcgaggaggagtcctcggagcagtgacggtaagttagaagcattatacgttcttatggtgcttggcttttttggcttttttactttggggatcatgctttcatacattagatctaaaaagttggagcactcaaatgatccattcaacgtgtacattgaatccgatgcgtggcaggaaaaagataaggcctatgtccaggccagggtcctggaatcataccgaagttgctacgtagtagagaaccacctggccattgagcagccgaatacacacctgccagaaaccaaaccttcaccttag

SEQ ID NO: 235705 - DNA, 390 bp, synthetic construct
  misc_feature 1..390: note = Description of Artificial Sequence: Synthetic coding sequence
  source 1..390: mol_type = other DNA
atgatcttatccaacaccactgcagtcacaccctttctgactaagctgtggcaagagacagtccagcaaggcggaaacatgagcggactcgccagacggagccctcgttcttcggatgggaagctggaggccctgtatgttctaatggtgctcggcttctttgggtttttcaccctcggaatcatgcttagctacatccgcagcaagaaacttgagcattctaatgacccctttaacgtttacatcgagtctgacgcatggcaagaaaaagataaggcctatgttcaggcgagagtcctggagtcctatcgtagctgttacgttgttgaaaatcatctggctatagagcaaccaaacactcatctcccagagaccaaacccagtccctag

SEQ ID NO: 235706 - DNA, 390 bp, synthetic construct
  misc_feature 1..390: note = Description of Artificial Sequence: Synthetic coding sequence
  source 1..390: mol_type = other DNA
atgatcttgtcgaataccaccgccgtcacccctttcctgactaaattatggcaggaaactgtgcaacaggggggtaatatgagtggcctggccaggcggagccccagatctagtgatgggaaactggaggccctctacgtacttatggtgctgggattctttggattcttcaccctagggattatgttatcttacatccgctctaagaaattggaacatagcaatgacccctttaatgtgtacattgagagtgacgcttggcaggaaaaggacaaggcgtatgttcaggcccgagtgctcgagagctataggtcatgttatgtggttgaaaaccatctggccattgagcagcctaacacgcatctaccagagaccaaaccctctccatag

SEQ ID NO: 235707 - DNA, 390 bp, synthetic construct
  misc_feature 1..390: note = Description of Artificial Sequence: Synthetic coding sequence
  source 1..390: mol_type = other DNA
atgattctcagtaacacaaccgcggtgaccccttttctcaccaagttgtggcaggagaccgtacaacagggcggtaacatgagtgggttggccagacgctccccaagatcgagcgacggaaaactggaggccctgtacgtgctcatggtgctcggttttttcggcttcttcactcttggcatcatgttaagctatatccgctccaagaaactggagcacagtaacgatccttttaacgtatatatagaaagtgatgcttggcaggagaaagacaaggcttatgtgcaggcaagagtgttggagagttaccgctcctgttacgtggtcgagaaccatctggcgatagaacagccaaacacccacttgcctgaaactaagccatcgccttag

SEQ ID NO: 235708 - DNA, 390 bp, synthetic construct
  misc_feature 1..390: note = Description of Artificial Sequence: Synthetic coding sequence
  source 1..390: mol_type = other DNA
atgattctctccaatacgacagcagttacgccctttctcacaaagctctggcaagagacggtgcaacagggtggaaatatgagcgggctcgccagacgcagtccaaggtcatcagatggcaaactggaagcgctgtacgtgctgatggtactcggtttcttcggctttttcactttagggatcatgctgtcgtacatccgttccaagaaactggagcacagtaacgacccattcaacgtgtacattgagagtgacgcttggcaggaaaaagacaaagcctacgtgcaggcaagggttttggaaagttaccgttcttgctatgtggtggagaatcacctggcgatagagcagcccaacacccaccttcccgaaactaaaccaagcccttag

SEQ ID NO: 235709 - DNA, 372 bp, synthetic construct
  misc_feature 1..372: note = Description of Artificial Sequence: Synthetic coding sequence
  source 1..372: mol_type = other DNA
atgtccacactgtccaacttcacgcagaccctggaggacgtgttccggaggatcttcatcacttatatggataactggagacagaacaccaccgccgaacaggaagctctgcaggcgaaggtggatgcagagaatttttactacgtaatcttgtacctaatggttatgatcggcatgttttcatttatcatagtggcaatcctagtgagtacggtaaagtcgaaacgtagagagcatagcaatgacccctatcatcaatacattgtggaagactggcaagagaagtacaaatcccagatattgaatttggaagaaagcaaggccacgattcacgagaacataggcgctgcaggatttaagatgtcaccctag

SEQ ID NO: 235710 - DNA, 312 bp, synthetic construct
  misc_feature 1..312: note = Description of Artificial Sequence: Synthetic coding sequence
  source 1..312: mol_type = other DNA
atggagacaacgaacggcacagaaacctggtatgagagccttcacgccgtactaaaagctttgaacgccacattgcatagtaatcttctctgtcggccaggcccagggctggggcctgacaaccaaacagaagaacgccgtgcaagcctccctggcagggacgacaactcatacatgtacatactgttcgttatgttcctctttgccgtgacggttgggtccctgatcctaggctatacgagatcacgcaaggtggataaacggtcagatccctaccatgtgtacatcaaaaatcgtgtcagtatgatctag

SEQ ID NO: 235711 - DNA, 312 bp, synthetic construct
  misc_feature 1..312: note = Description of Artificial Sequence: Synthetic coding sequence
  source 1..312: mol_type = other DNA
atggaaacgactaatggtacagagacttggtatgagtccctccacgcagtgctgaaggccctgaacgctacgttacattctaacctgctatgccgacctggtcctggcctggggcctgacaatcagaccgaagaaagacgggcatcgctgcctggacgggacgataactcatatatgtatattctgttcgttatgtttctcttcgccgtcactgtgggcagtctgatcctgggctacacaagatcccggaaagtcgataaacggagcgacccttaccatgtgtacatcaaaaacagggtcagtatgatctag

SEQ ID NO: 235712 - DNA, 39 bp, synthetic construct
  misc_feature 1..39: note = Description of Artificial Sequence: Synthetic coding sequence
  source 1..39: mol_type = other DNA
atggagaccaccaacgggaccgaaacatggtatgagtag

SEQ ID NO: 235713 - DNA, 153 bp, synthetic construct
  misc_feature 1..153: note = Description of Artificial Sequence: Synthetic coding sequence
  source 1..153: mol_type = other DNA
atggaaaccacaaacggcacagaaacttggtatgagagcctgcatgccgttttgaaggcgctgaacgccactctgcatagtaaccttctgtgcagaccaggacccggactaggaccagataaccagactgaggagagacgagctagtctctag

SEQ ID NO: 235714 - DNA, 162 bp, synthetic construct
  misc_feature 1..162: note = Description of Artificial Sequence: Synthetic coding sequence
  source 1..162: mol_type = other DNA
atggaaactaccaatgggacagagacctggtacgagagtctgcacgcggtcctcaaagccctgaacgctactcttcacagcaacctactgtgtcgtcctgggcctgggctcgggcctgacaatcaaaccgaagagcgacgcgctagtctacctgggagatag

SEQ ID NO: 235715 - DNA, 300 bp, synthetic construct
  misc_feature 1..300: note = Description of Artificial Sequence: Synthetic coding sequence
  source 1..300: mol_type = other DNA
atggagaccaccaacggcaccgaaacgtggtatgagagtcttcacgccgtacttaaagccctgaacgcaactctgcattccaatctactttgtagaccagggcctgggttaggcccagataatcagacagaggagagacgggcatctctgcccggacgagatgacaacagctatatgtacatcctgttcgtgatgtttctctttgccgttaccgtgggctctctcatactcggttacacccgaagccggaaagtcgacaagaggagtgacccataccatgtctacatcaaaaatcgctag

SEQ ID NO: 235716 - DNA, 513 bp, synthetic construct
  misc_feature 1..513: note = Description of Artificial Sequence: Synthetic coding sequence
  source 1..513: mol_type = other DNA
atgctcaagatggaaccgttaaactccacccatcccggaacagcggctagcagttctcctttggaaagccgggctgcgggaggtggctcagggaatggaaatgaatacttctacatcctcgtggtgatgtccttttatggtattttcctgataggcatcatgctcggatacatgaagtccaagcggagggaaaaaaagtcaagtctgctcctcctgtacaaagacgaagaacgcctttggggagaggcaatgaaacccttaccagtcgtgtccggattgcggtcagtccaggtacccctcatgctgaacatgctgcaggaatccgtggccccagccctgtcctgcaccctatgtagcatggagggcgattctgtcagcagcgaatcgtcctcacccgatgtacatctgacaatccaagaagagggcgctgacgacgaactggaggagacctcagagactccactgaatgagagctccgaagggagttcggagaatatccatcagaatagctag

SEQ ID NO: 235717 - DNA, 2031 bp, synthetic construct
  misc_feature 1..2031: note = Description of Artificial Sequence: Synthetic coding sequence
  source 1..2031: mol_type = other DNA
atggcggcagcctcttctccaccaagagcagagcggaaacgctggggatggggcaggctgccaggtgccagacggggtagcgccggtctcgccaagaagtgccccttttctcttgagttggcggaggggggacctgctggtggagcactttatgcacccatagccccaggagccccagggccagcaccacccgcatctcccgctgctccggcagccccacccgtggccagcgatttggggccacgcccacctgtctccctggatcctagagtgtcaatctattcgaccaggcggcctgtccttgcacgcacacatgtgcaggggagggtctacaacttcttagaaaggccgaccggatggaaatgttttgtatatcactttgccgtcttcttaatagttcttgtctgtttgattttttccgtgttgtccacaatagagcaatatgcagcactagccaccggcactctgttttggatggaaatcgtgctggtagtgttctttggcacagaatacgttgtgcgactgtggagtgccggttgccggtctaaatatgtcggtttgtggggacggttgcgattcgctcggaagcctatctccataatagatctgatcgtggtagtcgcaagcatggtggtgttatgcgtaggtagcaaaggccaggtgtttgctaccagtgcgattcgcggaatccggttcctacagattctaaggatgctccatgtcgacaggcaggggggtacttggcgtctgctcgggtctgtggtttttatccacagacaggagttgattacaactctgtatatcggtttcctgggcttgatatttagctcatattttgtatacctagctgaaaaggatgccgtcaacgaaagcggcagggtcgaatttgggtcatacgcagacgccttgtggtggggtgtagtgacggtgactaccattggctatggcgacaaggttcctcagacatgggtgggaaaaaccatcgcctcgtgcttcagcgtcttcgctattagctttttcgccctgcctgctggtatcctcgggagcggctttgctctgaaagtgcagcagaaacagagacagaagcacttcaatcgtcaaattcccgctgccgcttccttaattcaaacagcctggaggtgttatgctgcagaaaatcctgactcaagcacttggaagatatatatcagaaaagctcctcgaagccacacactattgtctccaagcccgaaaccaaagaagtcggtggtggttaaaaagaagaaattcaaactcgacaaagataacggggtaactcccggagagaagatgctcactgtaccccatatcacatgcgatcctccagaggagagacgactggatcattttagcgtcgacggctatgacagttcagtaagaaagagtcctaccctgttagaggtctcaatgcctcattttatgcgaacgaattccttcgccgaggatctcgacttggagggggaaaccctcctcacccccatcacacacatatcgcagctccgcgagcaccatcgtgctacgataaaggtcataaggcgtatgcagtattttgtagcgaagaaaaagttccagcaggcgaggaagccctacgatgtgcgcgatgtgatagaacaatactcccaaggacacctcaacctaatggttagaatcaaggaactgcagcgcaggttggaccagtccattggcaagcccagcctcttcattagtgtgtctgagaaatctaaagatcgcggatcgaatactataggagcacggttgaacagagtggaagataaggtgactcagctagatcagcggctggccctaatcacagatatgctgcatcagctcctgagcctccacggcggaagcactccaggctccggcggaccacctcgcgaaggaggcgctcacatcactcagccatgcggaagtggcggatcagttgatccggaactcttcctgccaagcaacaccctgccgacatacgagcaattgactgtccccaggaggggaccggacgaaggctcttag

SEQ ID NO: 235718 - DNA, 1650 bp, synthetic construct
  misc_feature 1..1650: note = Description of Artificial Sequence: Synthetic coding sequence
  source 1..1650: mol_type = other DNA
atggattttctaatcgtcctggtttgcctgatatttagtgtgctttccactatcgagcagtatgctgcacttgcaaccggcaccttgttttggatggagatcgtgttagtcgtgttcttcggaacagagtacgtggtccgtctgtggtctgcgggatgccgctctaagtatgtgggcctttggggaagacttaggttcgcacgcaagcctatcagtattattgatttaatcgtggttgtggcttcaatggtggtgctgtgtgtgggtagtaaagggcaagtattcgcaaccagtgcgatccgtggaatccggttcctgcagatcctccggatgctgcacgtggatcggcaaggcggaacgtggcggctgctgggctctgttgtcttcattcatcgacaggaattaattactactctatacattggtttcttgggacttatattcagctcgtattttgtgtacctggccgagaaagacgctgttaatgaatccgggagagtggagttcggctcctacgccgatgccctctggtggggcgtggtcacagtcacgaccattggttacggtgacaaggtgccccagacgtgggttggtaagactattgcgagctgtttcagcgtgtttgctattagcttctttgccttacctgcaggaattttagggagcgggtttgcccttaaggttcagcagaagcagcgccaaaagcatttcaatcgacagatccccgctgccgcaagcctgatccagaccgcctggcggtgttacgccgcagagaaccccgattcctccacttggaagatatatatccgaaaggcccctcggagtcacacgttgctgagtcctagcccaaagccaaagaaatcagtggtggttaaaaaaaaaaagtttaaacttgacaaagacaatggagtgacacccggagaaaagatgctgaccgtgccacatattacctgtgatcctcctgaagagaggcgtctggatcacttttccgtggacggttatgattcctcggtgagaaagtcgcccacgctcttggaggtctcaatgcctcactttatgcggactaacagctttgccgaggatctcgacctggagggggagactctgctcacccctattacgcacattagtcagcttagggaacaccatagagctacaatcaaagtgatacgtcgtatgcagtacttcgtggccaaaaagaagttccagcaggccaggaaaccttacgatgtgcgcgacgtaattgagcagtactctcagggacatttgaaccttatggtgcggatcaaggaacttcaacggcgtctggaccagagcatcggcaaaccctcactgtttatcagcgtgtcagagaaatcaaaggaccggggatccaatacaattggagcgaggttgaaccgcgttgaagacaaggtgacccagctcgatcagagactcgcattaatcactgacatgctccatcagctgctgagcttgcacggcggttcaaccccagggtcgggcggaccacccagggagggtggagcccacataactcagccctgtggttcaggcggatctgtggacccggagttgtttctccctagcaacacgctgccaacctacgaacaattaaccgttccacggagaggcccagatgaggggagctag

SEQ ID NO: 235719 - DNA, 1182 bp, synthetic construct
  misc_feature 1..1182: note = Description of Artificial Sequence: Synthetic coding sequence
  source 1..1182: mol_type = other DNA
atggtacaaaagtcccgtaacggcggagtttaccccggaccatcaggggaaaaaaagctgaaagtggggtttgtgggtctcgatcccggagccccagattctacccgtgacggtgcgctgctgatcgccggttccgaagccccaaaaaggggttcaatcttgagcaagccacgggcagggggagctggtgccggtaaaccccctaaacgcaacgccttctatcggaagctgcaaaatttcctgtataacgtactcgaaaggcctcggggttgggcctttatctaccatgcatatgtgtttctgctcgttttcagctgtctggtacttagtgtgtttagcaccattaaggaatacgaaaagagctctgagggagctctatacatccttgagatcgtgaccattgtggtttttggagtggaatacttcgtgcgaatctgggccgcaggctgttgttgccggtaccggggttggcgcggacgccttaagttcgccagaaagccattttgtgttatcgacattatggtgttgattgcaagtatcgccgtcctcgctgccggatcgcaaggcaacgtctttgcgacgtctgctttgcgcagtctgcgtttcctccagatcctgcgtatgatccgcatggacaggcgcggtggcacatggaagttgttaggatccgtcgtgtatgcccactccaaggagctagtcactgcatggtacattggatttctgtgtctgatcctggcttctttcctcgtgtatctggccgagaagggggaaaatgaccacttcgacacttatgccgacgccctctggtggggactgattacactaacgaccatagggtatggcgataagtacccccagacgtggaacgggaggctgctggccgctacttttactctcatcggggtaagcttcttcgctctgcccgctggaattctcggcagcggattcgctctcaaggtgcaagagcagcacaggcagaagcacttcgagaagcggcgaaaccctgccgcaggtctgattcagagtgcttggagattctacgcaacgaacctttcaagaaccgacctacacagcacgtggcaatactatgaaagaaccgttacagttcccatgtacagatacaggaggagggcccctgccaccaaacaactgtttcacttcctctttagcatttgctcctag

SEQ ID NO: 235720 - DNA, 2607 bp, synthetic construct
  misc_feature 1..2607: note = Description of Artificial Sequence: Synthetic coding sequence
  source 1..2607: mol_type = other DNA
atggtccaaaaatcacggaacgggggagtttatccaggcccttccggggagaagaaactgaaggtaggattcgtgggcctcgatccaggggcaccagatagcaccagagacggcgctttgttgattgcgggttccgaggcccctaaacgaggcagcatcctgtccaagccaagggctggcggtgcaggagccggtaaaccgccaaaacggaatgccttttacaggaagcttcaaaactttctgtacaacgtgctcgagcgaccaagagggtgggcctttatctatcatgcttacgtctttctcctggtgtttagctgtcttgtgctcagtgttttctcaacgatcaaagagtacgagaaaagtagtgagggcgcactgtacatcctcgagattgtcacaatcgtggtgttcggtgtcgagtattttgtgcgaatctgggccgcagggtgttgctgtagataccggggatggcgtggccgtttgaagttcgccagaaagcccttctgcgttatcgacatcatggttctaatcgccagtatcgcggtgcttgccgcaggttctcaggggaatgtatttgcaacatcagcattaagaagcctccggtttcttcagatactaaggatgatcaggatggatagacgcggagggacgtggaagcttctgggtagcgtggtctacgctcactctaaagagttggtgacagcctggtacatcgggtttttgtgcctaattctggcctcatttctcgtgtacctggcagaaaagggcgaaaacgaccacttcgatacctatgcggatgctttgtggtgggggctcatcacactgaccaccatcgggtatggcgataaatatcctcagacctggaatggtcgcctgctagccgctactttcacactcattggcgtctcgttctttgccttgccagctggcattttgggctccggctttgccctcaaggtgcaggaacaacatagacaaaaacatttcgagaaaagacgtaaccctgcagcaggcctaattcagtccgcctggcggttttacgcgacaaacctctcccggactgacctgcacagtacctggcagtactacgaacgaactgtgacagtacccatgtacaggttaatcccgccacttaaccagttggagcttcttaggaacctgaagagcaagagcgggctggcgtttagaaaggatcctcccccagagcctagcccaagtccgcgtggcgtggccgctaaaggaaagggctctccacaggcccagaccgtaaggagatctccatcagccgatcaatccctagaggactcccctagcaaggttcccaagtcatggagttttggcgaccggtctagggccaggcaggcatttcggataaagggcgctgcgagtaggcagaattcggaggaagccagcttgcccggagaggacatcgtggacgacaaatcttgtccgtgtgagttcgtgactgaggatctgaccccagggctgaaggtatctattcgcgcagtatgcgtcatgcggttcctggtgtccaagaggaaatttaaagagtctctacgcccatacgacgtgatggatgtgattgagcagtattctgcaggccacctggacatgctgtctagaattaaatccctgcagagcaggatcgatatgatcgttggaccacctcccccttccacccctcgccataagaagtacccaacaaagggtccgactgcaccccctcgagagagtccccagtattccccccgagtggaccaaattgttggtagaggtccagccatcacagacaaagaccgaaccaagggtccagctgaagccgaactgcctgaggacccgagcatgatgggacgtctaggtaaggtggagaagcaagtgctaagtatggagaagaaactagacttcctggtgaatatatacatgcagcggatgggcatcccgccaaccgagacagaggcctactttggagctaaagagcctgaaccggctcccccttaccacagccctgaagattcccgagagcatgtcgaccgacatgggtgcattgtaaagattgtgaggagtagttccagcactggacagaagaacttttccgcccctcctgccgcacctcctgtacaatgccccccttcaactagctggcagcctcagagccatccacggcaaggccatgggacctcacccgtcggcgatcatggctcactggtgcggatcccacctccacctgctcacgaaagaagtctgagcgcctacgggggaggcaatcgtgcttcaatggagttcctcagacaggaagacactccaggttgtcgaccccctgagggcaatctccgagactctgacacatccatatcgataccatctgtagaccatgaggagctggagagaagcttctccggcttctctatcagccagtcgaaagaaaacctggacgccctcaatagttgttacgctgctgtggcaccatgcgccaaagtgcggccatacatcgcagagggtgagtcagacaccgattctgatctgtgcaccccctgcgggccaccgcctaggtcagccaccggggagggcccttttggcgatgtcgggtgggcgggacctagaaagtag

SEQ ID NO: 235721 - DNA, 2643 bp, synthetic construct
  misc_feature 1..2643: note = Description of Artificial Sequence: Synthetic coding sequence
  source 1..2643: mol_type = other DNA
atggtccagaagtcccggaatggcggagtgtatcctgggccttcaggggaaaaaaagttgaaggttggtttcgtgggcttggaccctggtgcccctgatagtacacgcgacggagccctattgattgccggtagcgaggcccctaagcgtggtagtatcctttcaaagcctcgcgcagggggagccggagcaggtaaaccaccgaagcgtaacgccttctaccggaaacttcagaatttcctctataatgtgctcgagcgaccaaggggttgggcattcatctaccatgcatatgtgtttttgctagtgttttcctgcctcgtgctctcagtcttttccaccattaaagagtatgagaagagttctgagggggcattgtatatactggagatcgtgaccatcgtagttttcggagtggagtactttgtgcgcatctgggctgcaggttgctgttgtcgatacaggggctggaggggacgcttaaagtttgccaggaagcccttttgcgtcatcgatatcatggtgctgatcgcatccattgccgtcctcgctgccggaagccagggaaacgtgttcgcgacgtcagcgctgaggagcctgaggtttttacagatactgcggatgattaggatggatagaagggggggaacatggaaactgctggggtccgtcgtgtatgctcattcaaaagagttggtaacagcatggtatataggctttctctgcttgatcttggctagcttcttagtgtatcttgcagaaaagggggagaacgaccattttgatacatacgctgacgcattatggtggggccttattacgcttactactatcggttatggggacaagtatccgcaaacctggaatgggagactgctcgcagctacttttacactcattggggtgtcgtttttcgcccttcccgcaggtatactggggtctggcttcgccctaaaagttcaggaacagcaccgtcagaagcactttgaaaaaaggagaaaccccgcagccggactcatccagtcggcctggagattttacgcgacgaacttatccagaactgacctccacagtacctggcagtactatgagcgcactgtgacagtgcccatgtacagattaatcccaccattgaatcagttggaattacttcggaacctcaagagtaagagcgggctagcgtttcggaaagatccccctccggaaccgtcccctagccagaaagtttcactcaaagaccgcgtttttagcagtcccagaggcgtcgcggctaagggcaaagggagcccacaggcacagacagtgcggaggagcccaagtgctgaccaaagtctggaggactccccaagtaaggtgccgaagtcctggtcattcggtgatcgtagcagggcgaggcaggcttttagaattaagggcgcagcttctagacagaatagtgaggaggcctcactcccaggagaggacattgttgacgacaagagttgtccttgcgaattcgtgacagaggatctgaccccaggtttaaaagtctccatccgcgctgtctgtgtgatgcgtttcctggtgtctaagcgaaaattcaaagagagccttcgtccttatgacgtgatggacgtcatcgaacagtactcagccggtcacctggacatgttgagcagaatcaaatccctgcaaaccggaatcgatatgattgtcggccctccacctccctccacacctagacataagaagtacccaaccaagggtccgacagccccaccgagagagtctccccagtactcaccgcgagtggaccagatcgtcgggagaggccctgccataaccgacaaggataggaccaaagggccagctgaagccgaactgcccgaagatccatccatgatgggacggctgggcaaagtagaaaagcaggtgctgtctatggaaaagaagctggattttttggtcaacatttacatgcagcgcatgggtattcctccaactgaaaccgaagcgtatttcggggctaaagaaccggaacctgctccaccctaccatagccccgaagacagccgcgagcacgtggatcgacatggatgcattgttaagattgttagaagttcaagctcaacaggccagaaaaatttttcagcccctccagcagccccaccagtccagtgcccaccgagtacttcttggcagcctcaatctcacccgaggcaaggacatggaacttcgcccgttggcgatcacggatccctggtacgcatacctccccctcctgcccacgaacgcagcctatccgcttacgggggaggaaaccgcgcttccatggagttcttacgccaggaagacactccaggatgtaggccccctgaaggtaacttacgcgattcggatacatccatctctataccgagcgtagatcacgaggagcttgagcggtcttttagcggattctcaatctctcaaagcaaggagaatcttgatgcccttaattcttgctacgccgctgtcgctccatgtgccaaggtgcgcccttatatcgctgaaggggaaagcgataccgactctgatctgtgcacaccttgtggacctccccctcgctcggccacaggcgagggtcctttcggagatgtaggttgggctggcccacggaaatag

SEQ ID NO: 235722 - DNA, 2565 bp, synthetic construct
  misc_feature 1..2565: note = Description of Artificial Sequence: Synthetic coding sequence
  source 1..2565: mol_type = other DNA
atggtacagaaatcaagaaatggtggggtttaccctgggccatcaggtgagaagaaactaaaagtgggatttgtaggcctggaccccggagcccctgattccacacgggatggcgctctcctcatcgccggtagcgaggcgcctaagagggggtccatcctgtccaaaccacgcgctgggggagctggcgctgggaaaccgcctaagagaaacgctttttatcggaaactccagaatttcctgtataatgtgttggagagaccgagggggtgggcattcatctaccatgcgtatgtgttcctcctggtgttctcctgcctcgtgcttagtgtgtttagtacaatcaaagagtatgagaagtcctcagaaggggcactctacatactcgaaattgtcacaatcgtggtcttcggtgtggaatacttcgtaagaatttgggcggcaggctgttgttgccgatatcgcggatggcgaggccgactgaagttcgccagaaagcccttttgtgtgattgatatcatggtactgattgctagcatcgccgttctcgcggcagggtcccagggtaatgtgtttgccacaagtgctctgagaagtctccgcttcctgcaaatcttgagaatgattcggatggatcgcagaggaggtacatggaaactactaggctccgtggtctacgcccattcaaaggagctggtcaccgcttggtatataggatttctgtgtctgattcttgcttcctttctagtataccttgcagaaaaaggtgagaacgaccacttcgacacatatgcggacgcactgtggtggggactgattactctgaccacaatcggttatggcgacaagtacccccagacttggaacgggaggctcctcgcagcaacatttaccctgataggggtgtcatttttcgcgttgccagccggtatcctgggtagcggattcgccttaaaggtgcaagagcagcatcgacagaaacacttcgagaaaagaaggaaccccgctgccggactgatccagagcgcttggcgtttttatgctacgaacctgtctcgaaccgatctgcactccacatggcagtactatgagcgcacagtgacagtgcccatgtattcttcgcagactcagacgtacggagcctcaagacttatacctcctcttaaccagctggagttactcagaaatctgaagtctaagagtggacttgccttccgcaaggatccacctcccgagccaagcccatcccagaaggtatccttgaaggaccgggtattttccagcccaaggggcgtcgcagctaagggcaaaggaagccctcaggcacagacggtgcggagatcacctagcgccgaccagtcattggaagactcaccctcgaaggtcccaaagtcctggtcattcggggatcgcagccgggcacgacaggcctttcgcattaagggcgcagcctcaagacagaacagcgaggaagccagtctccccggtgaagatatcgtggatgacaaatcgtgtccatgcgaattcgtaaccgaggatctcactccagggctgaaggtgtctatcagagctgtgtgcgtgatgaggtttctggtgtccaaacgcaagttcaaggagagcttgagaccctatgatgttatggacgtgatagagcagtattccgccggtcacttagacatgctcagcaggattaaatcactccagagcagagtggatcaaatagtcgggagagggccagccattacagacaaggatcgcaccaaagggcctgctgaggctgagctaccggaggacccttcaatgatgggaagactcgggaaggtggaaaaacaggttctttccatggagaaaaagcttgacttcctggtcaatatttacatgcagcggatgggcattccacctacagagactgaggcctattttggggctaaagagccagagccagccccaccctatcattccccagaggactccagggagcacgtggacagacatggttgtattgtgaaaattgtgcgttcgtcctcttctacggggcagaaaaatttttccgcccctcctgctgcgcctcctgtgcagtgcccgcctagcactagctggcaaccccagtcccatcctcgccagggtcacggcacatcccccgtgggagaccatggctctctcgttcgaattcctccaccccctgctcacgagagatccctgtctgcctacggtggcggtaatcgggcaagcatggagttccttcgacaggaggacaccccagggtgtcgccctccggagggtaacctaagagattcagatacgtccattagcataccaagtgttgatcacgaagagctggaaagaagctttagcgggttctcaatctctcagagtaaggaaaacctcgacgccctgaacagttgttacgccgcagtggctccgtgcgccaaagtgcgtccttacattgcagaaggcgagagcgacaccgacagtgatctgtgtactccttgtgggcctcctcctcggtccgctactggagaggggccatttggcgatgtggggtgggccggacccaggaaatag

SEQ ID NO: 235723 - DNA, 2619 bp, synthetic construct
  misc_feature 1..2619: note = Description of Artificial Sequence: Synthetic coding sequence
  source 1..2619: mol_type = other DNA
atggttcaaaagagtcggaacggcggtgtgtacccgggaccatcaggcgaaaagaagctaaaggtaggctttgttgggctagatcccggagcgccagattctacaagagatggggctctgctgatcgctgggagcgaagccccaaagcgcggtagtattctgtcaaaaccacgagctgggggtgctggggctggaaagcctccgaaacgcaatgccttctatcgaaaattacagaatttcctgtacaacgtcctggaacggccacgaggatgggctttcatataccacgcatatgtgttcttgttagtcttctcttgcctcgtcttgtctgtcttctctacaattaaggaatatgaaaagtcctctgaaggggctctgtacatcctggaaattgtcactatcgttgtcttcggggtggaatattttgtacgtatttgggctgccggttgttgttgcagatatagaggatggagaggtcgcttgaaatttgctagaaagccattttgcgtgatcgacattatggtgctgatcgcctccattgctgtgttggccgctggttcccagggcaatgtgtttgcaacctcagctctgaggtccttgcgatttctccaaattttgcgaatgattaggatggaccgacgcggtggcacttggaagctactgggaagtgtcgtgtacgcccattcaaaagagctcgtcacagcatggtatatcgggttcctgtgtcttatcttagcctctttcctggtctaccttgccgagaagggggaaaatgatcacttcgatacatatgcggatgccctttggtggggactgatcacactcaccaccatagggtatggagacaagtatccacagacctggaacggccgactgctggccgcaaccttcacactgatcggagtctccttctttgctcttccagccggaatcttgggatcaggtttcgctttgaaagttcaggaacagcacagacaaaaacacttcgaaaagcgaaggaacccagccgctggccttatccagagcgcctggcgcttctatgccacaaacctatcacgcaccgacctgcattctacgtggcagtattatgaacgcactgtgacagtgccaatgtacagcagccagactcagacctacggcgcatcgcgcttgatcccccctttgaatcagctggagctgcttagaaacctgaagagcaaaagtggccttgcctttcggaaagaccctccaccagaaccttctcccagtaaaggttctccttgcagaggccctctttgtgggtgttgccctggcaggtcctctcagaaggtgagcctgaaggaccgcgtcttcagctcccctcggggagtggctgccaaaggcaaaggcagcccccaggctcagaccgtaaggcgctcaccatcggccgaccagtccctggaggattccccaagcaaggttcccaagagctggagcttcggagacagatcgagggcacggcaagcctttcgcattaagggcgcagctagtcggcagaattccgaagaggccagtctgcctggagaggacatagtggacgacaagtcctgtccctgcgaattcgttacagaggatctcacaccgggtctaaaagtgtccatccgcgctgtgtgcgtgatgagatttttggtgtcaaagagaaagtttaaggaatctctgaggccctacgacgtgatggacgtgattgaacagtactctgccggacatttggacatgctatctaggattaagtccctacagtccagggtggaccagatcgtcggacgaggtccagctataacagacaaagatagaactaaggggccagcagaggccgaattacctgaggatccatccatgatgggtaggttgggtaaagtggagaagcaagtcctgtcaatggagaaaaaactagacttcctggtgaatatttacatgcagaggatgggtatcccacccaccgagaccgaggcctactttggggcaaaagagcctgagcctgctcccccttatcattccccagaagacagcagagagcatgtagaccggcacggttgcatcgtgaaaatcgtgcgaagttcctccagcaccgggcaaaaaaatttctctgctcccccagcagcaccaccagtgcagtgtccaccaagcacaagctggcagccccaaagccaccctcgtcagggccacggtacgtcacctgtcggcgaccacggtagtctggtaagaatccctccgccacctgcacacgaaagatcactatctgcatatgggggaggaaaccgggctagcatggaattccttcgccaggaggacacacccggttgccggcctcctgagggaaatctgcgagatagcgatacatcaatctctatccccagtgtcgatcacgaggagcttgagcggagctttagcgggttctccattagccagtctaaagagaatcttgatgcgctgaattcatgttatgccgcagtggcgccttgcgctaaagtaagaccctatatcgccgagggcgagtccgatactgatagcgatctttgcactccatgtggacctcctcctagatcggccacaggcgaggggccatttggggatgtgggctgggcgggtccacggaagtag

SEQ ID NO: 235724 - DNA, 2619 bp, synthetic construct
  misc_feature 1..2619: note = Description of Artificial Sequence: Synthetic coding sequence
  source 1..2619: mol_type = other DNA
atggtacaaaagtctagaaatggcggtgtgtaccccggaccctccggcgaaaagaaacttaaagtcggcttcgtaggcctcgaccccggtgcacccgacagtacccgcgacggagctctgctcattgctggcagcgaagcgccaaagcgaggctctatcctcagtaagcccagggcaggcggagcaggcgctggcaaaccaccaaagagaaatgcattttaccgcaagctgcaaaactttttgtacaacgtcctcgagcgcccacgaggctgggccttcatatatcatgcctatgtcttccttctcgtgttcagttgcttagtgctttccgtattctcaacgatcaaggagtacgagaagagcagcgagggggcactgtacatcctggaaatcgtgaccatcgtggtgtttggagttgaatacttcgtgaggatctgggccgcaggttgctgttgtcggtatcggggttggaggggacggctgaagtttgcccgaaagccattctgtgtgattgacattatggtgcttatcgcctctatcgctgtgttggcagctggttcccagggcaatgtctttgccaccagtgcactgcgcagtctccggtttttacagatcttacggatgataaggatggatagacgcggaggcacttggaaactgctggggagcgtggtctacgcgcacagtaaggagttagtgacagcctggtatattgggttcctgtgcctgatcctagcctcgttcttagtgtacctcgcagaaaagggtgagaatgaccactttgatacttatgcggacgccctatggtggggactgataacactaaccacgattgggtacggcgataaatatccacaaacctggaatgggaggcttctcgccgctacctttacgcttatcggtgtgagtttttttgccttgcctgccggtattttgggaagcggtttcgccttgaaggttcaggaacagcacaggcagaagcattttgaaaaaaggcgcaaccccgctgccggtttgatccaaagcgcgtggcggttctacgctacaaacctgtctcgcacggaccttcattccacatggcagtattacgagagaaccgtgacggtccccatgtatagtagccagacccagacatacggagctagcagacttattccccctctgaatcagttggaactactgcgcaaccttaaatctaaatctgggctcgcgtttcggaaagaccctcctcccgagccatcgccatctaagggttctccatgcagaggacctttgtgtggttgttgccccggacgttcgagtcagaaggtttctctcaaggacagagtatttagcagtcctcggggagtggctgccaagggcaagggatctccccaggcccaaactgtccgcaggtctcccagcgccgatcagtcactggaggatagcccttctaaagtacctaagagctggtctttcggagaccgatcacgtgcaagacaggcgttcaggattaaaggcgctgcgagcagacaaaattcagaggaagcctcactgcccggtgaagatatagtggacgacaagtcgtgtccgtgtgaattcgttaccgaggatctgacaccgggactcaaagtcagcatacgagccgtgtgcgtcatgcgcttcctcgtctccaaaagaaaattcaaggagtcgctgcgaccttacgacgtgatggacgtgatagagcaatattccgcgggacacttggatatgctgtctagaatcaaatcattgcaatctcaggtggaccaaatagtcggtagaggccctgcaattacggataaagataggacaaaagggccagccgaagccgagctgcccgaggaccccagtatgatgggcaggctcggcaaagtggaaaaacaggtcttatccatggagaaaaaactggatttcctggtgaacatctacatgcagcggatgggaatcccaccaaccgagaccgaggcctactttggtgccaaggagccagagcctgctcctccatatcattcgcctgaggacagtagggagcatgtggatcggcatggatgtatagttaaaattgtgcgaagttcctcgtcgacagggcagaaaaatttcagcgccccacccgctgctcccccagttcagtgccccccaagcactagctggcaaccacagtcccaccccagacagggccacgggacctcccccgtgggggaccacggatctctcgtccgcatcccccctccacctgcacacgagagaagcctgagcgcatacgggggagggaatcgcgcttccatggagttcctgcgccaggaagacacccccggttgccggccacccgagggcaacctgagggatagcgatacatcaattagcattccgtccgtcgaccacgaggagctggagcgttctttcagcgggttttcaatctcccagtccaaagaaaacctagacgcccttaactcctgctatgctgctgtagcaccctgtgccaaggtcagaccttatatcgccgaaggggagagcgacaccgacagtgacctctgcactccttgcggacctccaccacggagcgccaccggggagggacctttcggggacgtgggatgggccggtcccaggaaatag

SEQ ID NO: 235725 - DNA, 2535 bp, synthetic construct
  misc_feature 1..2535: note = Description of Artificial Sequence: Synthetic coding sequence
  source 1..2535: mol_type = other DNA
atggtgcagaagtctcgcaatggcggagtgtatccagggccatctggggagaaaaagctaaaagtcggattcgttggactcgatccaggagcacccgattccacccgggatggggcactgctgattgccggatccgaagctcccaaacgtggcagcattctaagtaaacccagagcaggcggagctggagctggaaaaccccctaaacggaatgcgttctatcggaaattacagaatttcctgtataacgtgctggagaggcctcggggttgggcattcatctaccatgcttacgtctttcttctggtgttcagctgccttgtgctgtcagttttctctactataaaggagtatgaaaagagctccgagggagccctctacatcctggagattgtgacaattgtcgtgtttggtgtcgagtatttcgtccggatctgggccgctggttgttgctgccggtacagagggtggcggggtcggctaaagttcgccagaaaaccattttgcgtaatcgacatcatggtgcttatagcaagcattgctgtcctggctgcaggcagtcaggggaacgtgttcgccacttctgcgctgaggagtctgcgcttcctgcagatactgcgcatgattcgcatggatcgcaggggcggtacatggaaattactgggctcggtggtgtatgcccattcaaaggagctggtgactgcctggtatattggctttctctgccttatcctcgcttcctttttggtttatttagcagaaaaaggggagaatgatcatttcgatacctatgctgatgcgctgtggtggggactcataaccttaacaacaattggctacggcgacaaatacccccaaacctggaacgggaggctgcttgcagccacctttacattaatcggggtctcattcttcgccctcccagctgggatcctgggctcaggttttgcattgaaagtgcaagagcagcataggcagaaacactttgagaaaagaagaaacccggctgctggcctcatccagtcagcgtggcggttctacgcgaccaacctttcacgcaccgatctccatagcacatggcagtactatgagcgcactgttaccgtgccgatgtatcgccttatccccccacttaatcagctggagctcctgagaaacctgaagtcaaagagcgggttggcttttcgtaaggatccacctcccgagccctcccctagccagaaggttagtcttaaagatcgagttttttccagtccgcgtggagtggccgcaaagggaaaaggcagtcctcaggctcaaacggttaggaggtctcctagcgccgaccaaagcttggaggattcacccagcaaggtgcctaaaagctggtcattcggggatcgcagcagagcgaggcaagcattcagaattaagggagcagctagccgacagaactcggaagaggcctcactgccaggggaagacatagttgatgacaagtcatgcccgtgtgagtttgtgacggaagatctcacgcccggactaaaggtaagcataagagccgtatgcgtcatgcgattcctcgtttccaagaggaaattcaaggagtcactacgcccttatgacgttatggacgtaattgaacagtattccgctggccatttggacatgctaagtcggataaagagtttgcagtcacgggttgaccagattgtgggcagagggcctgctattactgacaaggacagaactaaaggaccggctgaggctgaacttccagaagacccttccatgatgggtcgactgggcaaggtggagaaacaagtgctctctatggagaaaaagctcgattttctcgtgaacatctatatgcaaagaatgggaattccaccaacagaaacagaggcctactttggcgcaaaggaacctgagccagccccaccttaccactcccccgaagattcccgtgagcacgttgatcgtcacggatgtatcgtgaagatcgtgcgaagtagttccagtactgggcaaaagaattttagtgcgccacccgctgcccctccggttcagtgcccccctagcaccagttggcaacctcagtcacatccacggcaggggcacggaacctctcccgttggggatcatgggtccctggtgcgaatccccccaccccctgctcacgagaggagcctgagtgcctatgggggtgggaatcgcgcaagcatggaatttctgcggcaagaggatacccccggatgcaggcccccagaggggaatctgcgtgattcagatacatctatcagtattccatctgtggaccacgaagagttggagcgctcattcagcggtttttcgatctctcaaagcaaggagaatctggacgccctcaactcatgctacgccgcagttgccccttgtgcaaaggtcagaccgtacattgctgagggcgaatctgatacagatagcgacctgtgcacgccttgtggtcctccccctaggtctgctaccggtgagggcccatttggagatgtggggtgggcaggaccaagaaagtag

SEQ ID NO: 235726 - DNA, 1311 bp, synthetic construct
  misc_feature 1..1311: note = Description of Artificial Sequence: Synthetic coding sequence
  source 1..1311: mol_type = other DNA
atggtgcagaaaagccgaaacggaggcgtgtatcccggtccctcaggggaaaagaaactcaaagtaggctttgtgggcttagacccaggtgcacccgattctactcgcgatggtgctctgctgattgcgggttccgaagctcccaagcgtggatctattctgagtaaacctcgtgctggcggagctggggcaggcaagcccccaaaaagaaacgccttctatagaaaattgcagaactttttatacaacgtgctggaacgcccaagagggtgggccttcatttaccatgcctacgtcttcttattagtgtttagttgtcttgtgctgtcagtgtttagcaccatcaaggagtatgagaaaagttccgaaggggcactgtacatcctggagatagtgaccattgttgtgtttggagttgagtatttcgtcagaatatgggcagcaggatgctgttgccgctaccggggatggcggggaagattaaaatttgccaggaagcctttctgtgttattgacatcatggtattgattgcaagtatcgctgtgctggccgcagggtcccagggcaacgtgttcgccacttcggcgttaaggtcccttcggttcttgcaaatactgaggatgataagaatggatcgccgtggaggaacatggaaattgcttgggagcgtggtgtatgcccattcaaaggagctggtcacagcctggtacattggcttcctatgcttaatcctggcgtcattcctagtgtacctcgcggagaagggcgaaaatgaccatttcgacacatatgctgatgctctgtggtggggactgatcaccctcaccacaatcggttacggcgacaaataccctcagacatggaacggcaggttgttagcagccacctttacccttatcggcgtttccttcttcgccttaccggcagggatactcggaagtggattcgctttgaaggtccaggaacagcacaggcagaaacactttgagaaacgccgtaacccagccgctgggctaattcagtccgcttggcgcttttacgccacaaacctgtctagaacggatttgcatagtacatggcagtactatgagcggactgttacagtccctatgtataggcttatccctcctctcaatcaacttgaattattgcggaatctgaagtccaagtcaggtctggctttccggaaggacccgccaccagagcctagcccccgaagcgtaccccctgccgcaactctcgtgagtgctgtttgcaccgctgtttggtccctcagccacacatgcgcccagccagtaatggagatgtag

SEQ ID NO: 235727 - DNA, 1848 bp, synthetic construct
  misc_feature 1..1848: note = Description of Artificial Sequence: Synthetic coding sequence
  source 1..1848: mol_type = other DNA
atggtgcagaagagtcgaaacgggggagtttatccgggacctagtggcgagaaaaagctgaaggtgggcttcgtcggactggatcctggggcacccgactcaactcgggacggagccctccttatcgccggaagcgaggctcccaagagaggctcaatcctgtccaaacctcgtgcagggggtgccggagcgggtaaacctcccaaacgcaacgctttctacaggaaacttcagaatttcctctacaatgtgcttgagaggccaaggggatgggcctttatctatcatgcttacgtcttcttgttggtttttagttgcctagtgttgagtgtgttctcaacgataaaagaatatgaaaaatcctctgagggtgcgttgtacattttggagatagtgactatcgtcgtgtttggtgtcgagtacttcgtgaggatctgggctgctggctgctgttgtcggtatcgtgggtggagggggcgactcaagtttgctaggaagcccttttgcgtcattgatatcatggtgctgattgcatccatcgccgtactggccgctggatcccaggggaatgtgtttgcgaccagtgcactgcggtctctacgcttccttcagatcctccgcatgattagaatggatcgacggggaggaacctggaaactgcttggctccgtggtttacgcccacagtaaagagctggtgacggcctggtacatcggcttcctctgcttaatcttagcaagcttcctggtgtatctggcagagaagggagagaacgatcatttcgatacctatgcagatgcgctatggtggggactcatcacgcttacaaccatcggctatggggataaatacccacaaacctggaacggtcggttactggccgcaacttttactctgatcggcgttagctttttcgcactaccagcagggatcctggggagcggttttgctcttaaagtccaggagcagcaccgccagaagcattttgagaagcgaagaaaccctgccgcaggcttgatccaatctgcatggcggttctacgcaacaaacttatcaaggacggatctccacagcacatggcagtactatgagaggaccgttaccgttccgatgtacagattaatccctccgttgaatcaacttgagttattgcggaatctgaagtcaaagagtggcctggcctttcgtaaggacccaccaccggagcctagcccatcgcaaaaggtgtccctgaaagatagggtcttctcttcccctaggggagtggctgcgaagggaaagggaagcccacaggcacagacggtgcggagaagccccagcgcagatcaaagcctggaggattcgccaagtaaagtgcccaaaagttggtccttcggcgaccgctcacgggcaaggcaggccttccgaattaagggtgcagcctccaggcaaaattcagaagaagcttccctcccaggcgaggacatcgtcgacgacaagtcctgtccctgcgagtttgtgacagaggatctgacacctggccttaaagtgagtattcgggcagtgtgtgtgatgagatttcttgtttccaagcgaaagtttaaagagtccctgcggccttatgatgtcatggacgtcatcgaacagtacagcgctgggcacctggacatgttatccaggatcaaaagtttgcaaagccgccaggagccccgtctcccagttcagcagggcacgcgcacagggtgggcctctggtacaaagcctaccgtagcacacggcggatccgcgggaggtgtgtgggctggtccgcctcctcacccacgcagacctttgtcagcttccgtggtctcaagtcaatctctcttctag

SEQ ID NO: 235728 - DNA, 2643 bp, synthetic construct
  misc_feature 1..2643: note = Description of Artificial Sequence: Synthetic coding sequence
  source 1..2643: mol_type = other DNA
atggtccagaagagccggaatgggggagtgtaccccggacctagtggcgagaagaaactgaaagtgggctttgttggacttgacccgggtgccccagatagcacgagggacggagcactccttattgccggatctgaggctcctaaaagggggtcaatcctgtccaagcctcgagccggaggagccggtgccggaaagccaccaaagcgcaacgcattctatcgtaaactgcaaaatttcctgtacaacgtgctagagcgacctcgcggttgggcttttatctaccacgcctatgtattcctgctggtctttagctgcctcgtgcttagcgtcttttcgacaattaaagagtacgaaaagtcctcagagggagctttatacattctcgaaatcgtcactatagtggtcttcggtgttgagtattttgtcagaatctgggctgctggatgttgttgcagatacaggggttggcgcggacgtctgaaatttgcacgaaagcccttctgcgtaatcgatattatggtcctgattgcgtctatcgcggtgctggccgctggttcccaaggaaacgtgtttgcgaccagtgcactccgaagccttcgattcctccaaattttaagaatgatcaggatggaccgtcggggagggacgtggaagctccttggctccgtggtgtatgcacacagcaaggaactcgttaccgcatggtacatcgggttcctgtgcttgatcctcgccagcttcctggtgtatttagctgagaagggagagaatgatcacttcgatacctacgctgatgctctctggtggggcttgatcaccctcacaaccatcggatatggggataaatatccccaaacctggaatggacgactgttggccgctaccttcaccctcattggtgtctcgttcttcgccctccctgccggtatactaggatctgggtttgcccttaaggtacaggagcagcacaggcaaaagcacttcgagaagcgacggaatcccgcagctggtctaattcaaagtgcttggcggttctatgccacaaatctgtcacggactgacctacattcgacttggcaatactatgagaggactgttaccgtgccaatgtaccggctgatacccccactgaatcagctggagctgctccgaaacctgaagagcaaatctgggctagcattcagaaaagacccacccccagagccatctccttcccagaaggtgtctctcaaggaccgggtcttcagtagccctagaggtgtagctgccaagggcaagggctccccacaagctcaaacagtgcggagatccccaagcgctgaccaatcactcgaggatagcccctctaaagtcccaaagtcatggtctttcggggatagatcccgggctaggcaagccttccggatcaaaggagcagccagcaggcagaatagcgaagaagcttctctgcccggtgaagatattgtggacgataaatcctgcccctgcgaattcgtcacggaagatctgacgcccggactgaaagttagcatacgagctgtgtgcgtgatgagattcctggttagtaagagaaagtttaaagagagtctccgcccttacgacgtgatggacgtcatcgagcagtattccgccggtcatttggacatgctttcgcgcattaaaagtctccagtctcgtattgacatgatagtgggcccaccgcctccttctacccccaggcacaagaagtatccaacgaagggacccacggcgcctcctagggagtcgcctcagtattcccccagggtcgatcagatagtaggacgcggacctgccatcacggacaaggatcgaaccaaaggtcccgctgaggctgagctccccgaggacccttctatgatgggacgtcttggaaaggtagaaaaacaagtactatccatggaaaaaaaattggacttcctggtgaatatttatatgcaaaggatgggcatccctcccaccgaaaccgaagcatattttggtgctaaagagccagaacccgcacccccttaccattcccctgaggatagtcgagaacatgtggaccgacatggatgcatcgtcaagatcgttaggtcttcatctagcacggggcagaagaatttctctgcaccacctgctgccccaccggtccagtgcccaccctctacttcatggcagccacagagtcatcccagacagggtcacgggacctcaccagtgggtgatcacggatcactggttaggattccgcctccacctgcgcacgaaaggagcttatccgcttatggcggagggaatagagcttcaatggagtttttgaggcaggaagacactcccggatgcaggcccccagaggggaatcttcgagactcagacaccagcatttctattccttccgtggaccatgaggagcttgaacggagcttcagcggtttctctattagtcagagcaaggagaatctggatgccctgaacagttgctatgccgctgttgcaccttgtgccaaggtgcgcccttacatcgccgagggagaaagtgataccgactcagacctgtgcactccctgcggccctcctcccaggagcgccacgggtgaggggccatttggcgacgtcggctgggcaggcccaaggaagtag

SEQ ID NO: 235729 - DNA, 2529 bp, synthetic construct
  misc_feature 1..2529: note = Description of Artificial Sequence: Synthetic coding sequence
  source 1..2529: mol_type = other DNA
atggtgcagaagtcccgaaacggtggtgtatatcccggtcctagcggggagaagaaactcaaggtgggattcgttggattggacccaggcgctcctgacagcactagggacggtgccctgctgattgccggatcagaagcgcctaagcgcggaagtatcctttccaaacctagagctggcggtgctggcgctggtaagcccccaaagcgaaacgccttttatagaaaactgcagaattttctgtataatgtccttgagagacctcgcggatgggccttcatttatcacgcttatgtgtttctgctggtgtttagttgtctggtgttatccgtgtttagtactataaaggagtacgagaagagttccgagggggctctctatattttggagatcgtcacgatcgtggtcttcggcgtcgagtactttgtcagaatctgggctgcaggatgctgttgtcgctatcgcggatggaggggtaggctcaaatttgctcgaaaacccttctgcgttatagacattatggtgctgatcgcttcaattgctgttctggccgcaggctcacaaggcaatgtatttgctaccagtgctttgaggtctctgaggttcctgcagatacttagaatgatccgcatggatcgccgaggcggaacatggaaactgcttggctcagtagtgtatgcgcatagcaaagaactggtcacggcttggtatatcgggttcctgtgcctgatcctcgcttccttcctggtgtacctggccgagaagggagagaacgatcattttgatacttacgctgatgccctgtggtggggcctgataacccttacgacaatcggttatggggacaagtacccccaaacatggaatgggaggctgctcgccgctaccttcactctaataggtgtgtcattttttgccctccccgctgggatcctcggcagcggtttcgccttaaaggtgcaggagcagcatcgccagaaacatttcgaaaagcggcgaaatcctgcagcgggactcattcagagcgcttggcgtttctatgccacaaatctgagcaggactgacctgcactccacctggcagtattacgaacgtactgtgactgtgccaatgtactcctcccagacacagacctatggggcttccagactgattccccctctgaatcagctggagcttcttcgaaacctgaaatcaaaatctggactggccttccgcaaggaccccccaccggaaccctccccgagcccgcgtggagtggctgccaaaggtaagggcagcccgcaggcgcagacagtcagacggagcccatcggctgatcagtcgctggaggacagcccgagcaaagtgccaaaatcttggagcttcggggatcgcagtcgcgcacggcaggctttcagaataaagggagccgcatcaaggcagaacagcgaagaggcctccctgcccggtgaagatatcgtagatgataagagctgtccctgtgaattcgtcacggaggatttgacccctggcctgaaggtgagcatcagggccgtttgcgtgatgcgatttctggtgtcaaagcggaaattcaaggagtccctccggccatacgatgtgatggacgtaatcgaacagtactcagctggtcatttggatatgttgagtcgcattaaatccttgcaatcgcgggtggatcagatcgtaggcaggggccctgctattaccgacaaggatagaactaagggcccagccgaagcagagcttccagaagacccttccatgatgggccgactgggtaaggtcgagaaacaggtattgtcgatggagaaaaagctggatttcttagttaacatctatatgcagcgcatgggaatccccccaactgagaccgaggcttatttcggcgcaaaagagcccgagccggctccaccatatcacagtcccgaagatagtagggagcatgtggaccgccacggctgcattgtgaagattgtgaggtctagttcttctaccggccagaaaaatttcagcgctcccccagcagctccacccgtgcagtgtcccccttctaccagttggcaaccgcagagtcaccctcgacaaggtcacggcacctctcccgtcggagaccatggatcccttgtgaggattccaccgccacctgcccacgagaggagcttgtctgcttacggcggaggcaatcgggcatctatggagtttcttcggcaggaggatactccaggctgccgcccacctgaggggaacctgagagactcggacacctccatctctatccccagtgtagatcatgaggagttagagcgaagcttcagcggcttctcaatcagccaaagcaaagagaacctggatgcacttaactcttgttacgcggcagtggccccatgtgcaaaggtgcgtccgtacatagcggaaggcgagtcagacactgacagcgatctctgcacaccctgtggtccccctcctaggtccgccaccggcgaagggcctttcggggacgtgggatgggcaggccctaggaaatag

SEQ ID NO: 235730 - DNA, 2526 bp, synthetic construct
  misc_feature 1..2526: note = Description of Artificial Sequence: Synthetic coding sequence
  source 1..2526: mol_type = other DNA
atggtccagaagtctcgcaatggaggagtgtatccaggaccgtcaggtgagaagaaactcaaggtaggattcgtcggtctagatccaggcgcacctgatagcactagggatggggcacttctcatagcaggatcagaagcacccaaaaggggatctatactgtctaagcctcgggctggtggggctggggctggaaagccgcctaagcgtaacgctttctatcgtaaactgcagaattttctgtacaacgtcttagagcggcctagagggtgggcttttatttatcatgcctatgttttcctgctggtgttctcttgcttagtactgagcgtgttttccactatcaaagaatacgaaaagtcatcagagggtgctctgtacatactcgagattgtgaccatcgtggtattcggagttgaatatttcgtgcggatctgggctgctggctgctgttgtcgttatcggggatggcgcggaaggttaaagtttgcacggaagcccttctgcgtcatagatattatggtactgattgccagcattgccgttcttgccgctggtagccagggaaatgttttcgccacttcggccctgcgctccctccggttcctgcagatcctcaggatgattaggatggataggcggggtgggacctggaagttattaggctccgtggtgtacgcccattcgaaggagctggtgacggcgtggtatatcgggttcctctgtctgatcctggcctccttcctggtttatctggccgaaaagggcgagaacgatcacttcgatacatacgccgatgccctgtggtggggtttgatcactctgacgaccatcggctacggcgacaagtacccccaaacttggaatggacggctgttagccgctacttttactctgatcggcgtgagctttttcgcactcccagccggaatactggggagcgggttcgcactcaaggtacaagagcagcaccgacagaaacattttgaaaaaaggcggaaccccgctgccggtttgatccagtctgcctggcgcttctacgcaacaaatctgagcagaaccgatcttcattcaacatggcagtactacgagcgcaccgtgacggtgccaatgtactcctcacaaacccagacgtacggcgcttcaagactcataccacccctgaatcagctggaattgctgcgaaatctgaaatcaaagtcaggtctggcatttaggaaagacccgccaccagagccttcaccatcccctcgaggcgtggccgctaagggcaaaggcagccctcaggcacaaaccgtgcgtaggagcccctcagcagatcagtctttagaggattccccgtcaaaggtgcccaagagttggtccttcggtgaccgcagtcgcgctcgccaagcctttaggatcaagggtgccgcaagccgtcagaactcagaagcttcccttccaggcgaggatattgtagatgacaagagctgcccgtgcgagtttgtcactgaagatcttacgcccggactgaaggtgtcaattagagctgtgtgcgtgatgcggttccttgtgtcaaagcggaaattcaaggaatccctaagaccatatgacgtcatggacgtcattgagcaatatagcgccggacacctggacatgctctctcggatcaagagcctacaatctcgcgtcgatcagatcgtgggaagaggccctgctattacggacaaagataggaccaagggccctgccgaagccgagctgccagaggacccttcaatgatggggagactggggaaagttgaaaagcaggtgctatcgatggagaagaagctagattttctcgtgaatatctacatgcagaggatgggaatccctccgacggaaaccgaggcttacttcggtgccaaagagcctgagcctgcgccaccttaccacagtcccgaggatagtagagagcacgtggacaggcacggctgtattgtcaagatcgttcggtcatcctcctccacaggacaaaagaatttcagtgcaccgccagccgcaccgccagttcaatgtccccctagtacctcctggcagccgcagtctcatcctcgtcaggggcatggaaccagtcccgtcggggaccatggaagcctcgtgaggatccccccacctccagctcatgaacggtcactttcagcatacgggggaggcaatcgcgcatccatggagttcctgaggcaggaagacacaccgggttgccgcccaccagaagggaatctgcgagattcggatactagcatctctattcctagtgtcgatcacgaggagctcgaaaggtcatttagtggattctcaatctcgcagagcaaggagaatcttgacgcattaaattcctgctacgccgctgtagccccatgtgctaaggtaagaccctatattgccgagggtgagagcgacactgatagcgatctgtgtaccccttgcggaccccctccgaggtcggcaacaggcgaggggccatttggggacgtggggtgggctggcccaaggaagtag

SEQ ID NO: 235731 - DNA, 2619 bp, synthetic construct
  misc_feature 1..2619: note = Description of Artificial Sequence: Synthetic coding sequence
  source 1..2619: mol_type = other DNA
atggggctgaaagccagacgggcagcaggcgcagcaggtggtggcggtgatggcggagggggtggtggaggggctgccaaccctgctgggggagacgccgctgcagccggtgacgaagagcggaaggtggggctggcccctggagatgttgaacaggtcacccttgccctaggtgcgggagctgataaagatgggacactgttgctggaggggggagggcgtgatgaggggcagaggcggactccacagggaattgggctcctggctaagacccccctgagcagacccgtgaagcgaaataatgcaaagtacagacgaattcagaccttgatttacgacgccctggagcgaccaagaggctgggctttactctaccacgcgttggttttcctgatcgtcctgggatgcctgatccttgcggtcctcacaacgttcaaggaatatgaaaccgtctcaggtgattggctgcttctgcttgaaaccttcgccatttttattttcggcgcagagttcgctctgagaatatgggctgctggctgttgttgtaggtataaaggatggcgaggcagattgaaatttgccaggaaaccactttgtatgcttgacattttcgtgctgatcgcctccgtcccggtcgtggcagtcgggaaccagggaaacgtgctggctaccagcttgaggtctctgcgctttctgcaaatccttcggatgttgaggatggatagacgcggtggcacttggaaacttctcggttcagctatatgcgcccattcaaaggagcttattactgcgtggtacattggatttctcaccctgattctgtcctcttttcttgtgtatcttgtcgagaaagatgtgcctgaagtggacgcccaaggagaggaaatgaaggaggagtttgagacttatgcagacgctttgtggtggggcctgattacactggcgactattggttacggggacaaaacgccaaaaacatgggaggggcgactcatcgccgcaacctttagcttaatcggggttagtttcttcgccttacccgctggtattttgggtagtggcctggcactgaaggtgcaagagcaacacagacaaaagcactttgaaaaacggagaaagcctgccgcagagcttattcaggctgcatggcgctattacgcgacaaatcctaaccgaattgatttagtggctacctggaggttttacgaaagtgtcgtgagcttcccctttttccggaaggagcagcttgaggctgcttcctcccagaagttgggccttctagaccgagtacgccttagtaaccccagaggctctaatacgaaaggaaaactgtttacacccctgaatgtagacgctatcgaggagtcaccctctaaggaaccaaaacccgtgggcttaaacaataaggaaagattccgcacagcattccgtatgaaagcatatgccttttggcagtcctcagaggacgcgggaaccggcgatccaatggccgaggacaggggctatggcaatgattttccaattgaggatatgatcccgacactgaaagcagctatcagggcggtgcgcattctccagtttagactttacaaaaaaaaattcaaagagactctcagaccctatgatgtaaaggatgtaattgaacagtattccgcaggacaccttgatatgctgagccgtattaaatacctgcagaccaggattgacatgatctttacaccgggtccaccctctacccccaagcacaaaaagagtcagaaaggtagcgccttcacatttccgagccagcagtccccaaggaatgagccatatgtagccaggcccagcacatcggaaattgaggaccagagcatgatgggaaagtttgttaaggtggagcgacaagtacaagatatgggtaaaaagctagactttctcgtggacatgcatatgcaacacatggaaagattgcaagtacaggtgactgagtactacccgacgaagggtactagctctcctgcggaagctgagaaaaaggaggataatcgatactctgacttgaagacaattatctgtaattactccgagactggaccgccagaacccccatactcctttcaccaggtgacaatagataaggtctcgccatacggatttttcgcccacgacccagtgaacctgccccgagggggtccaagtagcggaaaggtccaggcgactccgccatcttcagccacaacctatgttgaaagaccgaccgtgttgccaatccttaccttgcttgattctcgcgtttcttgtcattcacaggccgacctgcaaggtccttattcagacaggatcagcccaagacaacgccgatctatcaccagggattcagataccccattgtcactgatgtcggtcaaccatgaagaactggagcgaagcccctctggttttagtatttctcaagacagggatgactatgtctttggaccaaacgggggatcttcatggatgagggagaagcgatacctggctgagggcgagactgataccgacaccgatccttttacaccatcggggagtatgcccctatcgtctaccggcgacggaatttcagatagcgtgtggacaccctctaataagcctatatag

SEQ ID NO: 235732 - DNA, 2256 bp, synthetic construct
  misc_feature 1..2256: note = Description of Artificial Sequence: Synthetic coding sequence
  source 1..2256: mol_type = other DNA
aagcctaagaagcatggacctatgtttttgatagtgttgggatgcctcatcctggccgtgctgactaccttcaaggagtacgaaaccgtttccggcgattggcttctgctgctggaaacatttgccatctttattttcggggcagagtttgccctgaggatctgggctgctggatgctgctgtagatataagggatggcgcggaagactgaaatttgcaagaaagcccctgtgtatgcttgacatttttgttctcatcgcgagcgtgcctgtcgtggccgtcgggaatcagggaaacgttctggcgacatccctgcgttctctgagatttttacagattcttaggatgctgcggatggatcgcagaggaggtacttggaagctattaggcagcgcgatctgtgctcatagtaaagagcttatcacagcctggtatatcgggtttctcactttgatcctgtcctccttcctcgtgtacctggtggaaaaagacgtccccgaggtggacgctcagggcgaggagatgaaagaggaattcgaaacctacgcggacgctctgtggtggggattgataacactggcgactatcggttacggcgataagacccccaaaacttgggaagggcgactgattgccgcaacatttagtctgattggggtctcattttttgcactgccggcaggaattttaggtagtggactcgctctcaaagttcaggagcagcaccggcagaaacactttgagaaacgtagaaagcccgcagcggagttaatccaggcagcttggcgctattacgccaccaaccccaatcgcattgacctcgtggccacctggcgattctacgagagcgtggtatcttttcctttttttcgtaaggagcaacttgaggctgcctcgagtcagaaactggggctcctcgacagggtacgtttatcaaatccaaggggttccaatactaaaggtaaactgtttacaccgttgaatgtggacgctattgaagaaagccccagcaaggagccaaagcccgtgggactgaataacaaagagcggttccggaccgcctttcgtatgaaggcatatgccttttggcagtcttcagaggatgccggtaccggcgatcctatggcagaggatagaggctatggaaatgatttcccgatcgaggatatgatccctaccctgaaggccgctattcgggctgtacggattctgcagtttcgtttgtacaaaaaaaagttcaaggagaccctgcgaccttacgacgtgaaggatgtaattgagcagtattctgcagggcacctggacatgctgtcacgcattaaatatctgcagactcggattgacatgatctttacccctgggccaccatcaactccgaagcataaaaaaagccagaaaggctctgcttttacttttcctagccagcagtcacctaggaacgaaccttacgttgccagaccctctacaagcgaaattgaggatcagtcaatgatgggaaaattcgtaaaggtcgaaaggcaggtccaggatatggggaaaaagcttgactttctggttgacatgcacatgcagcacatggaaagattgcaggtccaggtgaccgaatattatcctaccaaaggtacatcatctcccgcagaggccgagaagaaggaggataatcggtattccgacctcaagaccataatctgtaactactctgagaccggtcctccggagccaccatattcatttcaccaagtaacaatcgataaagttagcccttatggtttctttgcccatgaccccgtgaatctccctcgcggtgggccttcttccggaaaagtgcaagccactccaccttcaagcgccacgacatacgtcgagcgccctactgtgttgcctattctgacattgctcgactctcgggtgtcatgccactcgcaagccgaccttcaagggccatacagcgacaggataagtcccagacaacgcagaagcataactcgagacagcgatacccccctgagccttatgagcgtcaaccacgaggagctggaacggtccccaagtggcttcagtatcagtcaggaccgggatgactacgtttttggccctaacgggggatccagctggatgcgcgagaagagatatttagctgaaggagagaccgatacagataccgatccgtttacaccctcggggagtatgcccttaagctccaccggggatggaatctccgacagcgtttggacgccatcgaacaagcctatttag

SEQ ID NO: 235733 - DNA, 2550 bp, synthetic construct
  misc_feature 1..2550: note = Description of Artificial Sequence: Synthetic coding sequence
  source 1..2550: mol_type = other DNA
agagcggctgccgaaaaggccaagcgcccagctggggctaggcaaatgggcctaaaagcaagaagggctgctgctggcgacgaggaaaggaaagtcggcttggcacccggtgacgtggaacaggttaccctggctctgggggctggcgctgataaagacggcactcttctgctggaaggaggaggcagagacgagggacagcgaaggacccctcagggtatcggactactcgccaaaacacccctgtctcgcccagtgaaacgcaataacgctaagtacaggaggattcagacgctgatctacgatgccctcgaaagaccgagggggtgggcgctgctgtaccatgcgctggtttttctcattgtgctgggatgtttgattctcgccgttttgacaacctttaaagaatacgaaacagtgtctggtgactggcttcttctcctagagaccttcgcgatattcatcttcggcgctgaatttgccctgaggatttgggccgctggatgttgctgtcgctataaaggatggagggggaggctaaagttcgccagaaaaccgctgtgtatgcttgatattttcgtgctcatcgcctctgtcccagtcgtggccgtcggcaatcagggcaacgtcctagccacatccctgaggtcactccggtttctccaaattcttcggatgcttcgcatggataggaggggagggacgtggaaactgctggggtccgccatctgcgcccactccaaagagttgattacggcatggtacatagggtttttgacactaatcctgagcagttttctcgtctatctcgttgagaaggacgtccctgaggtggatgctcagggagaagaaatgaaagaggaattcgagacctatgctgacgcgctttggtggggcctgattacactagccacaatcggctacggagataaaacccctaagacttgggaaggcagattgatagctgcgaccttctctctgattggcgtctcctttttcgctctcccggctgggatcctcggctcaggactggctttgaaagtccaggagcagcatcgacagaaacatttcgaaaagcgcagaaagccggcagcggagctgatccaggccgcatggcggtactatgctaccaaccccaaccggatagatctggtagctacgtggaggttctacgagtcggtggtgagttttcccttctttcggaaagagcaactggaagccgcatccagccaaaaactcggacttttagaccgggtccgtctttctaatcctcggggtagtaataccaaaggcaagctgttcacgccactgaacgtggatgccattgaggaatccccatctaaggagcccaagcccgtggggctaaataataaagagcgctttcggacagccttcaggatgaaggcctatgccttctggcagagttcagaggacgcaggtactggggacccaatggccgaggatcgtgggtacggcaatgactttccaattgaggacatgattccgactctcaaagccgctattagggctgtgcgcattttacagtttcggttgtataagaaaaagttcaaggagactctcagaccctatgatgttaaagatgtcattgagcaatactccgccggtcacttagacatgctttctagaataaagtatttgcagacccgcatagatatgattttcacgcccggtccccctagcactccaaagcataaaaagtcgcagaaaggcaacgagccatatgtggcgaggcccagcacctctgaaattgaagatcagagcatgatgggcaagtttgtgaaggtcgaacgtcaagtacaggatatgggaaagaagctggacttcttggtcgatatgcacatgcaacacatggagcgtctgcaggtgcaagtgacagaatattatccaaccaagggaactagtagccccgcagaggccgagaagaaagaggacaaccggtacagtgatctcaaaaccattatctgtaactattccgaaaccggtcctcctgaacctccatatagctttcaccaagtaaccattgacaaggtgagcccctatggcttcttcgcccatgatccggttaacctgcccagaggcggacctagcagcggcaaggtgcaggccaccccaccctcttcagccacaacatacgtagagcggccaacagtactgcctatcctcacgttgctggactcccgcgtaagttgccacagtcaggctgatctgcagggcccatattctgacaggatcagtccgaggcagcgcagaagtattaccagggacagcgataccccattaagcctgatgagtgtcaaccacgaggagctcgagcgaagccctagcggattttcgattagccaggacagagacgactacgtatttggtcctaacggcggttccagttggatgcgagagaagcgatacttggcagaaggcgagacagacacggatacggacccctttaccccttctggatccatgccactgagttctaccggcgatggcatcagcgactctgtttggaccccctccaataaacctatttag

SEQ ID NO: 235734 - DNA, 2088 bp, synthetic construct
  misc_feature 1..2088: note = Description of Artificial Sequence: Synthetic coding sequence
  source 1..2088: mol_type = other DNA
atggccgaagctcccccaaggaggctcgggctaggccctccccctggcgacgccccacgcgctgagctggtcgccttgacggccgttcaaagcgaacagggagaagctggagggggaggctcacctaggcgtcttggacttctgggctctcctcttcctcccggagctcccctgcctgggccagggtccggtagcggctctgcctgcggtcagcggtcctctgcggctcataagcgataccgcaggcttcagaactgggtctacaacgtgctcgagaggcctcgcggatgggcgttcgtgtaccacgtctttattttcctgctggtgttctcgtgcttggtgctaagtgtgttatccactattcaagaacaccaggagttggccaatgagtgcctgctgatactcgagtttgttatgatcgtggtcttcggtcttgagtatatcgtacgcgtctggtccgctggatgctgttgcaggtaccgtgggtggcagggccgattcaggttcgccagaaaacctttttgtgtcatagacttcatcgtgttcgtcgcttctgtcgcagttattgctgccggtactcaaggtaatatcttcgccactagcgcgttgaggtctatgcggtttctgcagattctacgaatggtccgcatggaccgcagagggggaacttggaagctcctcggcagcgtggtgtacgcccatagtaaagagcttatcactgcttggtacattggcttccttgtgctgatcttcgcttccttccttgtgtatctggcagagaaggacgcaaactccgacttctctagctacgctgactccctgtggtggggcactattacactgaccactattgggtacggcgataagaccccgcatacgtggctgggccgagtcctcgccgcaggcttcgccctgctggggatttctttttttgcactgcctgctggcattcttggttctggcttcgccttgaaggttcaggaacagcaccgccagaaacactttgagaagaggcggatgccagctgccaatctgattcaggctgcctggaggttatattccacagacatgagcagggcctacctgacggctacttggtactactacgattcaatcctgccatcgttccgagaactggcattgctgttcgagcacgtgcagcgggctaggaacgggggactacgcccactcgaagtccgaagagcccctgtgccagacggtgctccaagccgataccctccggtcgcaacatgtcaccggcctggttcaacaagcttctgcccaggcgaatcctctcgtatggggatcaaggataggatccggatgggtagttctcagagaagaaccggaccatccaagcagcatctagccccaccaactatgcctacatcaccctccagtgagcaggtcggggaggcaacttcccctacaaaggtgcagaaaagttggtctttcaatgatcgcacccggttcagagcgagcctgagactgaagccacggacaagtgccgaggacgccccttcagaggaggtggcggaggagaaatcctaccaatgcgaactcactgtagacgacataatgcctgccgtgaagaccgtcattcgctctatccgaattctaaaatttctggtggccaaacggaagttcaaagaaaccctacgaccatacgatgtcaaggatgtaatagagcagtattccgcgggtcatctggacatgttggggcgaatcaaaagccttcagacacgtgtggatcagattgtggggcgaggcccaggcgacaggaaagcgagagaaaagggtgataaaggacccagtgatgccgaggttgttgatgaaatatctatgatgggacgcgtggttaaggtggagaaacaggtgcagtcgatagagcataagctcgatctgcttttaggattctactccagatgcctgcggagcgggacctcagcctccctgggcgctgtccaggtccccctgtttgatcctgacattacatctgactatcacagcccagtggatcacgaggatatctctgtctctgcccagacacttagtattagtcgctccgtttcaaccaacatggactag

SEQ ID NO: 235735 - DNA, 2856 bp, synthetic construct
  misc_feature 1..2856: note = Description of Artificial Sequence: Synthetic coding sequence
  source 1..2856: mol_type = other DNA
atgcccagacaccatgccggtggtgaggaggggggagctgctgggctgtgggtgaagagcggcgctgcggctgcagctgcaggaggaggacgcctgggctccgggatgaaagatgtcgagagtgggaggggcagagtcctgctgaactccgccgctgctaggggtgacggtcttctgctactcggaacgcgggcagccactttgggcggtggcggtggtggacttcgggaatcacgacgcggtaagcaaggagctcggatgagcctgctgggaaaaccactctcctacacatcctctcagtcctgtagaagaaatgtgaaataccgccgtgtccagaactatttatacaatgtcctggaacgccctagaggctgggcgttcatctaccatgcttttgtgtttcttctcgtgtttggttgcttaatcctgtccgtgttctctactattcctgagcataccaaactggcgtcttcctgcctgctcatcctcgaattcgtcatgatcgtcgtgttcgggctcgagttcataatccggatttggtcagctggatgctgttgccgatatagggggtggcaaggaaggttaaggtttgctagaaaaccattctgcgtcattgacacaatcgttctcatcgcatctatcgcagtcgtgagcgctaaaacacaaggaaacatctttgctacttctgcactgcggagccttagatttctccagatactgaggatggtaagaatggatcgaagggggggaacctggaagctgctgggcagtgtggtatacgctcattccaaggagctgattacagcttggtatattggattcctcgtcctgatattctcatcctttttggtgtacctcgtagagaaggacgccaataaagagtttagcacctacgcagacgcgctttggtggggcactatcactctcacaactataggatacggcgacaagacccccctcacatggctcggcaggctgctctctgccggtttcgccctcctagggataagcttcttcgccctccccgcaggcatactcgggtctgggtttgccctcaaagtccaggaacagcaccgccagaagcatttcgaaaagcggaggaatcctgccgctaatttgatccagtgcgtgtggcggtcttacgcggctgacgagaaatcagtgtctattgccacttggaaaccacatttgaaggcactgcatacgtgttcaccaaccaagaaagagcagggagaggcctcttcgtctaagttttgctccaataagcaaaaattattccgtatgtacacctccagaaagcagtcacagaaactgtcctttaaagaaagagtacggatggcttcacctcgtggccagagtataaaatctcgacaggctagcgtgggagataggagatcacctagcacggacataaccgcagaaggatctcctacaaaagtgcagaagtcctggtcctttaatgatagaactagattcaggccctcactgcggctgaagtcatctcagcctaaacccgttattgatgccgacaccgctcttggcacggacgatgtctacgacgaaaagggctgccaatgtgatgtgagtgttgaggacctaacccctccacttaaaaccgtgatcagggctatccgtattatgaaatttcatgtagcaaagagaaaatttaaggaaacactgcgcccatatgatgtgaaggatgtaatcgagcaatatagcgccggtcacctcgacatgctgtgtcggattaaatcactgcagacccgcgtggatcagattttgggcaagggacagattacatccgataaaaagagccgagagaaaatcaccgccgagcatgaaacaacagatgatttaagcatgctggggcgtgtggtgaaagtggaaaagcaagtgcagagcatcgagagcaagctggactgtctcctggatatataccagcaggttctgcgcaaggggtctgcttcagcccttgccctggcaagcttccagattccacctttcgagtgcgaacagacttctgactaccagtcccccgtggattcgaaagatctgtcaggatctgcccagaactcgggctgcctgtcaaggtctacatccgcaaacatttctcggggactgcagtttatcctgaccccgaatgaattcagtgcccagacattttatgccctgagccctacaatgcactcccaggctacccaggtgccgattagtcagtccgacggctcagcagtcgctgcaaccaatacgattgccaaccaaatcaatactgctccaaaacccgcagctcccaccacgttacagatacccccaccactgccagcgattaagcacctgccacgacctgagacactccaccccaaccccgcaggcttgcaggagtcaatcagtgatgtcaccacctgtctcgtcgccagtaaagaaaacgtacaggtcgcgcagtctaatctgaccaaagaccgatcaatgcggaagtcattcgatatgggcggagaaaccttgctgtctgtgtgcccaatggttccgaaggacctaggaaaaagtctgtccgtgcagaacttgatacggtcaacggaagagctgaatatccaactgagtggcagcgagtccagcggctcaaggggcagccaggatttttatccaaagtggcgagaatccaagctatttattaccgacgaggaagtaggaccagaagagaccgagactgacactttcgatgctgcccctcagcccgcaagggaagccgcattcgcttccgattctttgaggaccggcaggtcacggagctcccagtcgatttgtaaggcaggagagagcaccgatgctctgtccctcccccacgttaagctcaagtag

SEQ ID NO: 235736 - DNA, 2799 bp, synthetic construct
  misc_feature 1..2799: note = Description of Artificial Sequence: Synthetic coding sequence
  source 1..2799: mol_type = other DNA
atgcctcgtcaccatgcagggggtgaagaaggaggtgccgctggactgtgggtgaaatccggtgccgcagcggcagccgcaggcggtggccgtctaggatcagggatgaaggatgtagaaagcggtagaggacgtgttcttctaaattcagccgcagcccgaggtgacggcctccttttgctgggcacaagggctgctactctcggaggcggtggtggcggtctcagagagagtcgccgaggaaaacagggggctcgtatgtctctgctgggaaaacccctgagttatacctcctcacagtcctgccggagaaacgttaaatacaggcgggtacagaactatttgtacaacgtcctggagaggcccaggggctgggccttcatttaccacgccttcgtattccttcccgtcttcggatgtctaatcctctccgtcttcagcactatacccgagcacaccaaattggctagttcatgtctgctcatactggaatttgtcatgatcgtcgtatttggattagaatttattatcaggatctggtctgctggatgctgttgccggtataggggctggcagggcaggttgcgctttgcccgaaaaccattttgtgtgatagataccatagtgctcatagctagtattgcagtcgtgagtgccaagacccagggcaacatctttgcgacaagtgcactaaggtccctgcggtttctgcagattctccgcatggtgcgtatggaccgacgcggaggaacgtggaagcttctcggatctgtcgtgtacgcccattctaaggaactgatcacagcctggtatatagggttcctcgtcttgatctttagctctttcctggtgtatcttgtcgaaaaagatgctaataaagagttttccacatatgcagacgcactgtggtggggaaccattactctgacaactatcggttacggggacaagactccattaacctggcttggaaggctgctatccgcgggttttgccctgctcggcataagcttttttgctctacccgcaggaatcttaggtagtggctttgccctcaaagtgcaggagcagcaccggcagaaacacttcgagaagagacgaaatcccgctgccaaccttatccagtgcgtttggcgcagctacgcagcagatgagaaaagcgtctccatcgctacatggaagccacacctgaaagcgcttcatacttgtagccctactaagaaggaacaaggagaggcatctagctcacaaaagctcagctttaaggaacgggtcagaatggcctctccccgtggacagagtattaagtccaggcaggcttctgtgggcgacagacgatcaccgtcgaccgatatcaccgccgaggggtcaccaaccaaagttcagaagagttggtccttcaacgaccgaactcggttcagaccctcgctgaggctcaagtcctcccagcctaagcccgttatagatgcggataccgccttggggactgatgacgtctacgacgaaaaaggatgtcagtgcgatgtgtctgtagaagatctcaccccaccattaaaaacagttattcgagctattcggattatgaagtttcacgtggccaagagaaaattcaaggagacacttcgtccctacgacgtcaaagatgtcattgagcagtattccgccggacatcttgatatgttatgtagaatcaaatctctacagactcgcgtggatcagatcctgggcaaaggtcagattacctccgacaaaaagtctcgggagaagatcaccgccgagcatgagactacagatgatctgagcatgcttgggagagttgttaaggtagaaaaacaagtccaatcgattgagtctaaactcgactgtttgttggacatatatcagcaggtgcttcgcaaggggagcgcctccgctttagctctcgctagtttccagatccctccatttgagtgcgaacagaccagcgattaccaatcgcccgtagactcaaaggacctgagcggttctgctcagaacagtggctgcctgtcccggtcaacttccgctaatataagtaggggcttgcaatttatcctgacccctaacgaattcagcgctcagacgttttacgccctcagtccaactatgcacagccaggccacacaagttcccatcagccagagtgacggaagcgcagttgccgctacaaacaccattgccaatcaaataaacaccgcacccaagcctgccgcacccacgactctccagatccccccacctctacccgcaatcaaacatctgcctagacctgaaacactgcatcccaaccctgctggactccaggaatccatttccgatgttaccacatgtttagtggcttcaaaggagaatgtacaagttgcacagtcaaatttgactaaggaccgatccatgagaaaatcctttgatatgggcggtgaaacgctcctctcggtctgccctatggtgcctaaggacctgggcaagtctctttccgtgcaaaatttgatacgctcgacggaagagcttaatattcaactgtctggcagcgagagtagtggcagccgaggctcccaggacttttatccaaaatggagggagagcaagctgttcatcactgacgaggaagtggggcctgaggagaccgagactgacactttcgacgcagctccacaacccgcacgggaagccgcatttgccagcgactccttgcggacagggcgatccagatccagccagagcatttgcaaagctggtgagagcacagacgcattatcactcccccatgtaaagcttaaatag

SEQ ID NO: 235737 - DNA, 2802 bp, synthetic construct
  misc_feature 1..2802: note = Description of Artificial Sequence: Synthetic coding sequence
  source 1..2802: mol_type = other DNA
atgcctcgacaccacgccggaggtgaggagggtggggctgctggcctctgggtaaaatcaggggctgctgcggcagctgctggagggggacgactgggcagcggcatgaaggacgttgagtctggcagaggcagggtgctcctgaactctgctgcagctaggggcgacggccttctgctgctaggcacaagagccgcaactctcggtgggggagggggagggctaagggagtcacgccgaggcaagcaaggcgcaagaatgtccctgctgggtaagccattaagctacacctcaagccagtcatgccggcgaaacgtcaagtaccgacgagttcagaactatttgtataacgtactggagagacccaggggctgggccttcatctatcacgcattcgtgttcctgttggttttcggatgcctgattctgagcgtgttcagtacaatccccgagcataccaaactggctagcagctgtctcctgattcttgagtttgtgatgattgtcgtgttcggactggagtttatcatccgcatctggtctgctggctgttgctgcaggtatcgagggtggcaagggagattgcgatttgcaaggaaacccttttgtgtgatcgatactatagtgctcatcgcatccatcgcagtagtgtccgctaaaactcagggaaatattttcgccacttctgcgctccgctccttgagattccttcagatactacgcatggtcaggatggacaggcggggtggtacgtggaagttattagggtccgtcgtgtatgcccactccaaagaactgataacggcctggtacatcgggttcctagtgctcatcttttctagcttcctcgtttatcttgtcgaaaaggatgcaaataaagaattttccacctatgcggacgctctgtggtggggcacgattactctgacgacgattgggtatggtgataagacccctttgacatggcttggccgactcctcagcgccggatttgccctgcttggcatcagcttcttcgctctgcccgcagggatactcggatcaggcttcgcactgaaggtgcaggagcaacatcgccaaaaacactttgaaaagaggcgcaatcccgctgccaaccttatacagtgtgtgtggcgaagctacgccgcagacgaaaaaagtgtgagcatcgctacctggaagcctcacctgaaggcccttcatacatgtagtcctactaaacaaaaccagcagggcgaatcccagtcttgtcaaaagctctccttcaaagagcgggtgagaatggcatcccctcgaggacaatccattaagtctcgacaggcctctgttggtgataggagatctccaagtacagacatcacagctgaggggtcacctacgaaagtccagaagtcttggtccttcaacgatagaaccagatttcgccctagcttgcgacttaagtcttcacagcctaagcccgttattgacgccgacacagcactcggcacagatgacgtctatgacgagaaaggctgccagtgcgacgtctccgttgaggacttaacccctcccctgaagaccgtgatacgcgcaattcggattatgaagttccatgtcgccaaaagaaaatttaaggagacactgcggccatacgacgtgaaagacgtgattgagcagtactcagcgggtcaccttgacatgctatgtcggatcaaatccctacagacacgggtcgaccagatcctaggcaaaggccagattacctcagataaaaagtcaagagaaaagatcacggccgagcatgaaacaactgacgacctgagcatgcttggcagggtcgtgaaggttgagaaacaagtacaaagcatcgaatcaaagcttgattgtttactggatatatatcagcaggtcctccggaagggatcagcctccgccttagcgctggcatctttccagattccccctttcgagtgcgagcagacatctgattatcagtctccagtggactcaaaagacctgtcaggttcagcgcagaactccgggtgtctgtccaggtctacatctgctaacatctccaggggtcttcagttcattttgacacccaacgagttttctgcacagaccttttatgccctttctcctaccatgcattcccaagccactcaagttcctatttcccagagcgatggctcagctgttgctgcgaccaacactatcgcgaatcagattaacactgcccctaagccagcggctcccactaccctccaaattccacctcccctgcctgcgataaaacatctgccccgaccagaaacattacacccgaacccagcgggtttacaagagagcatcagtgacgtgaccacctgcctggtcgcttctaaggagaatgtgcaagtggcgcaatctaacctgacgaaggatcgcagcatgcgcaagtcatttgacatggggggtgagacactcttgagcgtttgtcctatggtgccgaaggacctcgggaaaagtttgagtgtgcagaatctgattaggtccactgaggaattgaacatccagctttccgggtccgagtctagcgggagccgcggttcacaggacttctacccaaagtggagggagtccaagcttttcatcacagatgaggaagtgggccctgaagagaccgaaaccgacacctttgacgccgcacctcaacctgcaagggaggcagcatttgcttccgattctttgcgaacaggcagatctcgcagctcgcaaagcatttgcaaagctggcgaatccactgacgccctgagtcttccccacgtcaagctgaagtag

SEQ ID NO: 235738 - DNA, 1284 bp, synthetic construct
  misc_feature 1..1284: note = Description of Artificial Sequence: Synthetic coding sequence
  source 1..1284: mol_type = other DNA
atgccccgacatcatgcaggtggggaagaggggggagcagcgggactttgggtgaaatcgggcgcagccgcagcagctgccggaggaggtcggctcggaagcggaatgaaagatgtggagtctggaagaggacgagtgctcctcaatagcgccgctgccagaggagacggccttctccttctgggcactagggctgctaccctggggggaggcggaggagggctccgcgagagtcgccgtggcaagcagggggcacggatgtcgttgcttgggaagcctttaagctacacatctagccagtcttgtcgcagaaacgtaaagtatcgcagggttcaaaactacctctataatgtattagaacgtccaagaggctgggcctttatctatcatgctttcgtctttctgctggtctttggctgcctcatcctcagtgtgttcagtacaatcccagaacatacgaagcttgcatcatcctgtctgttaattctcgagtttgtaatgatcgtcgtgttcggcctggaattcataatcagaatttggagcgccggttgttgttgtaggtaccggggttggcagggtcgactgaggttcgccaggaagcctttctgcgttattgacacaatcgtcctgatagctagcattgctgtcgtctctgcaaagactcaggggaatatttttgctacttctgccctgcgtagcctacggtttctgcaaatcttgagaatggttagaatggacaggcgtggcggtacttggaaacttctaggcagtgtggtctatgcacattctaaggaactgataaccgcctggtatattggattcttagtactgatcttttcatcctttttggtgtacctggtagaaaaggatgcaaacaaagagttcagtacctacgccgacgctctttggtggggcaccatcactttaacaacaattgggtatggagataaaacccctctgacttggcttggccgactcttatctgccggattcgctttgctcggaatttctttctttgccttaccagcgggaatattagggtcaggctttgccctgaaggtgcaggagcagcatagacagaagcacttcgagaagcgtcgcaacccagctgccaacctgatccagtgtgtgtggaggtcatacgccgcagatgagaagtccgttagcatcgcaacatggaaacctcacctgaaagcgctccacacctgttcacccaccaagaaggaacagggcgaggcttcctctagattcgtgatttctcttctgcttcatgtgtgcctgtag

SEQ ID NO: 235739 - DNA, 2799 bp, synthetic construct
  misc_feature 1..2799: note = Description of Artificial Sequence: Synthetic coding sequence
  source 1..2799: mol_type = other DNA
atgcctcgccaccacgccggaggagaggaagggggagcggcaggtctgtgggttaagtcaggggcagcagccgcagctgcagggggaggaaggttgggctccggcatgaaagatgttgagagcggcaggggaagggtcctacttaatagcgccgctgctaggggcgatgggttgctcctcctaggcactcgcgctgcaaccttagggggaggtggaggtggactacgggagtcaaggaggggcaaacaaggagccagaatgagcctcctagggaaaccgctgtcatacacctctagtcagtcttgtcgtcggaacgtaaagtatcgcagagtgcaaaattacctgtacaacgtcctggaaaggccacgcggttgggctttcatctaccacgccttcgtgttcctgttagtgtttggctgtctaatcctgagtgtcttttccactattcccgagcatacaaagctagcttcaagctgccttcttattcttgagttcgtgatgatcgtggtcttcgggttggagtttattatccgaatttggagtgccggttgttgttgtcgatacagaggttggcaggggagacttcgcttcgcccgaaagcccttttgtgttattgacaccatcgtcttgatcgcgtccatcgctgtggtctcagcaaagactcagggaaacatttttgccacttctgcacttcggtctctccgatttctgcagatcctccgcatggtaaggatggatcggagagggggaacctggaagctactgggctccgtcgtgtacgcccatagcaaggagctcattacagcttggtatattggattcctcgtgttgatcttttcatcattcctggtgtatcttgtcgaaaaggacgctaacaaggagttttccacttacgctgacgctctgtggtggggtaccatcactctaacaaccattggatacggcgacaagacccccctgacttggcttgggaggctgcttagcgctggctttgctctgctgggaatcagcttttttgccctgcccgcaggtattctcggcagtgggttcgctctcaaagtgcaagagcagcaccggcagaagcactttgagaagcgaagaaatccagctgccaacctgattcagtgtgtctggcggagctacgcagcggatgagaagagtgtttctatcgcaacctggaagccccacctaaaggcgctgcacacttgctcacccacaaagaaagaacagggtgaagcttcttcctcccagaagcttagttttaaagagcgagtccgaatggccagcccacgcggacagagcattaagtctcgccaggcctccgtaggcgataggcgctcacccagcactgatattactgccgaaggctctccaactaaagtacaaaagtcctggagcttcaacgaccgcactaggtttcggccttctttgcgcctcaagagttcacagcccaagcccgtcatcgacgccgacacggcgcttggtacagatgatgtgtacgacgagaagggttgccagtgcgacgtgagcgtggaggatctgactccacccctgaagacagtgatccgagctatcagaataatgaagttccacgtcgctaagagaaaatttaaggaaacactccggccttacgacgtgaaggacgttatagaacagtatagcgccggacacctcgacatgttgtgccgtataaagagcctccagacacgggtggaccagatcctgggcaagggtcaaattacctccgacaaaaagagcagggagaagattaccgctgaacatgagactaccgacgatctttccatgctaggacgggttgttaaagtggagaaacaagtgcagtctatcgaatcgaagcttgactgtcttctcgacatttaccagcaggtcctccggaaaggctccgctagcgctctggcccttgcctctttccagattccaccgttcgagtgcgagcagacctcagactaccagtcaccagtcgactcaaaggacctatcaggctcagcccaaaactccggttgtctctctagaagtaccagcgctaatatcagccggggactgcagttcatccttactcctaatgaattctctgctcaaaccttctacgccctgagtccgacaatgcatagccaggcgacccaggtgcctatctcacagagtgacgggtcagccgttgcggcaaccaatactattgctaatcagattaacacagcccctaagcctgcagctcctaccactcttcaaattcctcctccattgcccgcaatcaagcacctgcctaggcccgaaaccctgcatccaaaccccgctggcctgcaggaatccatctccgacgtcacgacttgcctggtggcttccaaggagaacgtccaggtcgcccaatcgaatctgaccaaagacagatccatgagaaagtcatttgatatgggtggcgagacattgctgagcgtctgcccgatggttcccaaggacctgggcaaaagtctgagtgtgcagaacctgatccggagtaccgaggaactcaacatccagttatccggctcggagtccagcggttctcggggttctcaggatttttaccccaagtggagagaaagtaagctgtttattacagacgaagaagtgggcccagaagagaccgaaactgatactttcgacgccgcaccgcagccggcacgcgaggcagccttcgcctcagactcattaagaactggccgtagcaggtcaagccaatcaatctgcaaggcaggcgagtctactgacgccctttccttgccccacgtgaagcttaaatag

SEQ ID NO: 235740 - DNA, 2829 bp, synthetic construct
  misc_feature 1..2829: note = Description of Artificial Sequence: Synthetic coding sequence
  source 1..2829: mol_type = other DNA
atgcccagacaccatgctgggggagaggagggaggggcagccggactctgggtaaaatcgggcgctgccgctgccgcagcgggagggggtcgactcggttctggtatgaaggatgtggagtctgggagaggcagagtcctgcttaattcggccgcagctagaggagacggcttactgcttttaggcacccgtgccgctaccctcgggggaggcggaggcggtttgagagagagtcgtagaggaaaacagggggctaggatgtccctgctgggtaagcccttgtcttatacttctagtcaaagctgtcggcgaaacgtgaaatatcggcgtgtgcaaaactacttgtataatgtgttggaacggcctcgaggctgggcttttatataccacgcatttgtattcctgcttgttttcgggtgtctgatcctgtccgttttctcaactatcccggaacacaccaagctggcctcgagctgtttactcatccttgagttcgtgatgatcgtggtatttgggctggaatttattattagaatatggtcagctggttgttgttgccggtatagaggatggcaaggtaggctccgatttgccaggaagcctttctgcgttattgatacaattgtgctcatagctagcattgccgtcgtgtcagcgaaaacccagggcaatatttttgctacctctgccctgcgatcattgagatttctgcagatcctgaggatggtgcgcatggaccggaggggcggaacgtggaagctgctgggaagcgtcgtgtacgctcactctaaagagctgatcacggcgtggtatatcggattccttgtgctcattttttcctccttcctcgtctatcttgtggagaaagacgctaataaggagttcagcacatacgctgacgcactgtggtggggaaccatcaccctgacaaccattggttacggcgacaaaaccccccttacatggctgggccgtctgctgagtgcagggtttgcccttctgggcatcagcttcttcgcactgcccgcaggaatcctcgggagcgggttcgcccttaaggtgcaggaacaacaccggcagaaacattttgaaaaacggagaaatcctgcagcaaatctgattcaatgcgtgtggcgtagctacgctgccgacgagaaaagcgtatccattgccacatggaaaccacaccttaaagcgcttcacacctgcagtcctactaacaaattttgttccaataagcagaaactgtttcgcatgtacacctcacggaagcaatcccagaaactcagcttcaaggagcgtgtaaggatggcgtccccccgtggccagtcaatcaaatcaaggcaagccagcgtgggcgatcggaggtcaccttctaccgacatcaccgctgagggcagtccaacaaaggtgcagaagagctggtcgtttaatgacaggactagatttagaccctctcttcgtctcaagtcgtctcaaccaaagcctgtgattgacgctgacacagcattgggaacagacgatgtgtatgacgagaagggctgccaatgtgacgtttctgtcgaagatctcacgccacccctgaagactgtgattcgggctatacgcatcatgaagttccacgttgctaagagaaaatttaaagaaaccctgagaccgtacgacgtcaaagatgtcatcgaacagtattccgccggacatttggacatgctctgtcggatcaaaagcctgcagaccagagtggaccagattctagggaaaggtcagatcaccagtgataaaaagtccagggagaagatcacggctgagcatgagaccactgacgacctgagcatgttaggcagggtggtgaaagtggagaagcaagtgcagtccattgagtctaaactggactgcctgcttgatatctaccaacaggtgctgaggaagggcagtgctagcgcgttggcgttggcatcctttcaaatccctccttttgagtgtgagcagacatctgattaccaatctccagtggacagtaaagatttgtccggatctgcccagaactctggttgtctgtccaggagcaccagtgcaaatatttcaaggggtcttcaatttattttaactcctaacgagttttccgcccagacattctacgcactttctcctaccatgcactcacaggcaacacaagtgcccatttctcagtcagacggaagtgctgtcgctgcaactaatactattgcgaatcagatcaacaccgcaccaaagcccgcagcccctactaccctccagatccctccaccgctccccgctatcaagcacctgcccagacctgagacacttcacccgaatcccgctggattgcaggagtctatctcagatgtgaccacttgcttagtcgcctctaaagaaaacgtgcaggtagcacagtcaaatttgaccaaagaccggagcatgcgcaaatcttttgatatgggaggtgagaccctcctctcagtgtgtcccatggtcccaaaagatctcggtaaatccctatctgtacaaaacctgatcagatctacagaggaactgaacatccaactcagcggctccgagtcatcaggctcaaggggttcccaggacttctaccctaagtggagggaatctaagttgtttataaccgacgaagaggtgggccctgaggaaaccgagaccgacacatttgacgcagccccacaaccagcacgcgaggctgcattcgcctctgatagtcttaggacaggaagaagtagatcctcacagtccatctgtaaagccggagagtccactgatgccctgtctttgccccatgtgaaattaaagtag

SEQ ID NO: 235741 - DNA, 2772 bp, synthetic construct
  misc_feature 1..2772: note = Description of Artificial Sequence: Synthetic coding sequence
  source 1..2772: mol_type = other DNA
atgcccagacaccacgcaggcggtgaggaaggcggagctgccggactctgggtgaaaagtggagcggctgccgctgcggctggcggaggtaggctgggatccggaatgaaagatgtggaaagcgggaggggtagagtattacttaactctgctgccgctagaggggacgggctgctcctgctaggcacgcgcgcagccacgcttggagggggaggtggtggcttacgggaatccaggcggggtaaacagggggcaagaatgtcactgctcggaaaaccactttcctatacttcttcccagagttgtagacgcaacgtaaagtaccgcagggtccaaaactacctgtacaacgtactggagagaccacggggatgggcgttcatctatcacgctttcgtttttctgctggtctttggatgcctgatcttgagcgttttctctacaattcctgaacatactaaactggcatcttcttgcctgctgatcctcgaatttgttatgattgttgtgttcggcttggagtttatcattcgtatctggagcgccggatgctgctgtagatatcggggttggcagggaaggctgagatttgcaaggaagcctttctgcgtgatcgacacaattgtgcttatcgcaagtattgcggtggtctcagctaagacacaggggaatatttttgcaacaagtgctctgcggtccctgcgctttctccaaattttgcggatggtgcggatggaccgccgagggggaacttggaagctgttaggaagcgtggtatatgcccattccaaggagcttattacggcctggtatattggttttcttgtgctaatctttagctccttcttggtttacctggttgagaaagatgccaacaaggaattctcaacttacgccgacgccctgtggtggggaactataaccctgactacaatcggatatggagacaagacacctctgacttggctcggcaggctattgtcggctgggttcgctctgctgggaataagtttctttgccttgcccgctggaatcctgggctctggctttgccctcaaggtgcaggagcagcacaggcagaagcatttcgaaaaacggcgaaaccccgcagctaacctaattcaatgtgtgtggcggagctacgccgctgacgagaaatctgtgtccattgccacttggaagcctcatctcaaagcactccacacatgttcgccaacaaaccaaaagttatcattcaaggagagggtgcgcatggccagccccagaggccagagcataaaaagcaggcaggctagcgtgggggacaggcggagcccttccaccgatataactgcggaagggtctcctactaaggtgcagaaatcatggagtttcaacgatcggactagatttaggccatccctgcgtctgaaaagcagccagccaaagcccgtcattgatgcggacactgcactgggcactgatgacgtgtatgatgagaaggggtgccagtgtgatgtttccgtggaagatctgactccgcctctaaagacagtgattcgtgctattcgcattatgaagttccatgttgccaagagaaagttcaaagaaacccttagaccgtatgatgtaaaggacgtcattgagcagtactccgccggacacctcgatatgctatgcaggatcaagagcctccagaccagagtggaccagattcttggaaagggacagataacaagcgataaaaaatctagggaaaaaatcacagccgagcatgagactacagacgatctgtctatgctgggccgagtggtgaaagtcgaaaaacaggtgcagtccatcgagagcaaactggattgtttgctggatatctatcagcaggtgttaaggaagggcagcgcaagtgcccttgcgcttgccagttttcagatccccccatttgaatgcgagcagacctcggactatcaatcacccgtagactccaaggatctgagcgggtctgcacaaaattccgggtgcctctctaggagcactagtgctaacatctctagaggactgcagttcatcctgacccccaatgagttctccgcacagacattctatgcattatctcctaccatgcactcccaagccacgcaggttccgattagtcagtccgacggctccgccgtcgcagctacaaataccattgcaaaccagattaacacggctcccaagcctgccgcacccacaacattgcagatccccccacctctgcctgccatcaaacatttgccacgcccagagactcttcaccccaatcccgcaggcttacaggaatctatctcagacgtcaccacctgtctcgttgcctccaaagagaatgtgcaggtggctcagagcaacctgaccaaggatcggagtatgcgtaagtcatttgacatgggaggggaaacgttactctcagtctgccccatggtccccaaggatctcggcaagtccctttccgttcaaaaccttattagatctaccgaggagctgaatatccagcttagtgggtcagagagctctggatctaggggctcccaggacttttaccctaaatggcgcgaaagcaaactcttcatcaccgatgaagaagtggggccagaagagacggaaaccgatacttttgacgccgcaccgcagcccgctagagaagccgctttcgcctcagacagcctccgcaccggaaggtcccggtcatcgcaatcgatttgcaaggcaggcgaaagcactgatgcgttatcattgccccatgtcaagttgaagtag

SEQ ID NO: 235742 - DNA, 2469 bp, synthetic construct
  misc_feature 1..2469: note = Description of Artificial Sequence: Synthetic coding sequence
  source 1..2469: mol_type = other DNA
atgccaagacaccacgcgggtggggaggaagggggagcagccggactttgggttaagtcaggagccgctgccgcagctgccggaggaggacggttaggctccggtatgaaggatgtcgagtcgggtcgcggtcgggttcttctgaacagcgcagctgcaaggggggacggactgcttttactgggtacccgcgcagccacgcttggtggtggaggaggaggactccgagagtctcgccgaggcaagcagggggcaaggatgtccctgctgggcaaacctctgtcctatacatcaagtcaaagctgtagacgaaacgttaagtatagacgggtgcagaattacctctacaacgtactcgaacgccctagggggtgggcttttatctaccatgcattcgtgtttctgttggtgtttggttgcttaattctgagcgtgttttccaccatccccgaacacaccaagctcgcatcaagctgcttactgattctcgaatttgtcatgatcgtcgtcttcggactagagttcatcattaggatatggagcgccggatgttgctgccggtaccgtggctggcaggggaggttgcgctttgctcgcaagccgttctgcgtgattgatacaatagtcttaatagcctcgatcgccgtcgtgagtgctaagactcaagggaatatcttcgccacatcagcactgagaagtttgcgctttctgcaaatcctgagaatggtgaggatggaccggagagggggaacctggaagctcctcggctcagtggtttacgctcattctaaggagctgatcaccgcctggtatatcggatttctcgttctgatctttagtagttttctggtctaccttgttgagaaggacgctaacaaggaattctcaacctatgctgacgctctgtggtggggtacaattaccttgaccaccattgggtacggggacaagacgcctctcacttggctcggcagattactctcagcgggatttgcgctgctcggtatatcatttttcgccctcccagctggcatcttaggttctggcttcgccctcaaggtgcaagagcagcatcggcagaaacacttcgaaaagcggaggaacccagcggcaaatctcatacaatgtgtgtggagatcttacgccgcagatgagaagagtgttagcattgctacttggaaaccccacctgaaggcccttcatacctgcagtccaacaaagaaggaacaaggcgaagcctcatctcgtattatgaagtttcacgtagctaagaggaagttcaaagagaccctgaggccatatgacgtgaaggacgtgatcgagcagtatagtgctggacacttggacatgctgtgcagaatcaaaagtctgcagactagggtggaccagatccttggcaagggccaaatcacatcagataagaagtcacgcgagaagatcacagcagagcatgagacaaccgacgacctgtccatgttaggtagggttgtgaaagttgagaagcaggttcagtcgattgaatccaaactcgactgtctgttagatatctatcagcaggtgctaagaaagggcagcgctagcgctcttgcccttgccagtttccaaatacccccattcgagtgcgagcagacatccgattaccagagtcctgtggactctaaggacctgagcggctccgcacagaactccggatgcctatccaggagtacatccgcaaatatttcacgaggtctgcaattcatacttactcctaatgaatttagtgcccagaccttctatgcgctctcgcctacaatgcacagccaggccacacaggttccaatctcacaatcagatgggagcgccgtcgccgcaactaatacaatagcaaatcagattaacactgctccgaaaccggctgccccaaccaccctccaaattcctccacccctgcccgctattaaacatcttcctcggcctgagactctccaccctaaccctgccggtctccaggagtctatttccgatgtaactacttgtctagtcgccagtaaggagaacgtccaagtcgctcagagtaaccttacaaaagatcgtagcatgaggaagagttttgatatgggaggagagacgctgctcagtgtttgtccaatggttccaaaagatctcggaaaatcgctgagcgtgcagaacttgattcgatccaccgaggagttgaacattcagctatctgggagcgaatcatcgggttctcgcggttcccaagacttctatcccaagtggcgggagtctaagctgtttattacggatgaagaggtgggtccagaggagaccgaaaccgatacttttgatgccgcacctcagcctgcaagagaggcggctttcgcgtcggattctcttaggacagggaggtcgagaagctcccagagtatatgcaaggctggcgagtcaacggatgccttgagcctccctcatgtgaaactgaaatag

SEQ ID NO: 235743 - DNA, 2856 bp, synthetic construct
  misc_feature 1..2856: note = Description of Artificial Sequence: Synthetic coding sequence
  source 1..2856: mol_type = other DNA
atgcctagacaccacgccggaggcgaagaaggtggggctgccggattatgggtgaagagcggcgctgccgctgccgctgcgggtggtggcaggctggggtcagggatgaaggacgtggagtcaggcaggggcagggtccttttgaacagcgccgcagcgagaggcgatgggctgctcctgctgggtactcgcgctgctaccctcggaggcggaggcggaggtctcagagagtcaaggcggggaaagcagggtgcacgcatgtcactgttgggcaaacccttgtcatacacaagttcccaaagctgccgaaggaacgtgaagtaccgaagagttcaaaattacctgtacaatgtgctggagcgacccagaggctgggcattcatctatcacgccttcgtgttcttacctgtgtttggatgcctgatcctttcggtattttctaccataccagaacatacgaagctcgcaagctcatgtctgctgattctggagtttgttatgattgttgtctttggactagaattcatcatacgaatctggtccgccggatgctgttgccgctacagaggatggcaaggccgactgcggtttgccaggaaacctttctgcgtgatagacaccattgttctgattgcatccatcgcagtggtaagcgccaagacccaggggaatatattcgccacatctgcacttcggtccttgaggttcctgcaaattttgcggatggtgagaatggatcgtagggggggaacctggaaactgctgggcagtgtggtgtacgcccacagcaaggaactcatcacggcctggtatattggatttctggtgctgatcttctcttccttcctagtctatctggttgaaaaggatgccaacaaggagttttctacctatgccgacgccttgtggtgggggaccattaccctaacaactatcgggtatggagacaaaactcccctcacctggctgggccgtcttttgtccgctgggtttgccctgcttgggatatccttttttgcattgcctgcaggtatactcggatccggctttgctctgaaggttcaagaacagcatcggcagaaacatttcgaaaaaagacgaaatccagctgccaacctgattcagtgcgtgtggcgatcctatgccgcagacgaaaagagtgtgtctatcgctacatggaagccgcatctaaaggcgttgcatacatgttcacccacaaaaaaagagcagggtgaagcctcaagctcaaaattctgttcaaacaagcagaaattgtttagaatgtatacgtcaaggaagcaatcgcaaaaactgtccttcaaggagcgtgtacggatggctagcccccgaggtcagtcaatcaaatcacgccaggcatcagtcggtgatcgaaggagcccctccacggatattactgccgagggctcaccgacaaaagtgcagaagtcctggtcatttaatgatagaactcgtttccgcccatctctaaggctgaaatccagtcagcccaagccggttattgacgcagacaccgcactgggcaccgatgacgtttacgatgaaaaaggttgtcagtgcgatgtcagcgtggaggatttgacccccccactgaagacagtgattagagctatacgcattatgaagtttcacgtggcgaaacggaaattcaaggaaaccctgagaccgtacgatgtcaaagatgtgatagagcaatatagcgccggacacttggacatgctctgtaggataaaatcactgcaaacgagagttgaccagatcctggggaagggccagatcacctctgacaaaaagtcccgcgaaaagatcacggcggagcacgaaactacagatgacctgtccatgctgggtagggttgtaaaggtagagaaacaggtacagtcaattgaatctaaactggactgccttctagatatttatcagcaggttctcaggaaggggtccgcaagcgcacttgcactggcatcattccagatccctccctttgaatgcgaacaaacgagcgattaccaaagtcccgtggattctaaggacctctccgggagcgcacagaattcaggctgtctttccagatctacctctgctaatataagccggggtctgcaatttattctaacccccaacgaattcagcgcacagactttctatgctctctctcccaccatgcattcccaggccactcaggtacctatttcgcagtctgatggctccgccgtcgctgcgacaaacaccatagccaaccagatcaatacagcgccaaagcccgctgcgccaactacgctccaaattccaccccctttgccagccattaaacatttgcctagacccgaaacactccaccctaatccggcaggcctccaagaatctattagcgacgtgaccacatgccttgttgcaagtaaggaaaacgttcaggttgcccagtccaatctgacaaaggacaggagcatgcgtaagtcatttgatatgggaggcgagacactgctctcagtgtgcccgatggtccccaaggacctgggtaagtccttgagtgtgcagaacctgatccgctccacagaagaactgaacatacagttgtcaggaagtgaatcctcaggttcaagagggagccaagacttctacccaaaatggagggaatctaagctctttattacagacgaggaagtcggtcccgaagaaactgagacagatacctttgacgccgctccacaaccagccagggaagctgctttcgcgagcgatagcctcaggacggggaggagcagaagctctcagagcatttgtaaggcaggtgaaagcaccgatgccttgtcactcccacacgtgaagcttaagtag

SEQ ID NO: 235744 - DNA, 2577 bp, synthetic construct
  misc_feature 1..2577: note = Description of Artificial Sequence: Synthetic coding sequence
  source 1..2577: mol_type = other DNA
atgcctgccggaatgacaaaacacggaagccgatctacatctagcctacccccagagccaatggagatagtccgctcgaaagcttgctctagaagagtccgactgaatgtaggcggacttgcccacgaagtattgtggcgcaccttggaccgtctgccacgcacacgactggggaagctgagggattgcaatacacacgattcgttgttggaagtctgtgatgactacagccttgacgacaatgaatacttttttgaccgccatccaggagccttcacctctatacttaacttctacaggactgggaggctgcacatgatggaagagatgtgcgccttatcatttagccaggagttagactactggggtatcgacgagatttatctggagtcttgttgtcaggccaggtatcaccagaagaaggaacagatgaacgaggaacttaagagggaggctgaaactctccgcgagagggaaggcgaagagttcgacaacacctgttgcgccgagaaacgaaagaagctgtgggacctgctagagaagccaaatagctctgtcgcggctaagatactggcaatcattagtatcatgtttattgtgctgtccacaatcgcactgtcactaaacaccctacctgaattgcagagtcttgatgagtttggccagtctacagataatccccagcttgctcacgtggaggcagtctgtattgcctggttcaccatggaatacttgttacggttcctctccagcccaaagaaatggaagtttttcaaaggacctctaaatgccatcgatcttcttgctattcttccttactatgtgacaatttttttgacggagagcaacaaatcggtactgcaattccagaatgtcagaagggtggtgcagatcttcaggatcatgaggatcctgagaatcttgaaactggctcggcattctaccgggcttcaatcattggggtttacacttagacgcagctacaacgaactgggcctcttaatcctcttcttagccatggggatcatgattttttcaagtctggtatttttcgcagaaaaggatgaggatgataccaaattcaagtccatccctgctagcttctggtgggcgactataacaatgacaacagttggatacggggacatttatcctaagacgttgttgggcaaaatagtcggcggactgtgctgcattgccggagttctcgtgatagcgctgcctatccctatcatcgtcaacaatttttctgagttttacaaagaacagaagcgccaagaaaaggcgatcaaaagaagggaggccttggaacgcgcaaagcgtaacggctctatcgtgtccatgaacatgaaagatgcctttgcaagatcgatcgagatgatggacatcgtggtagagaagaatggggagaatatgggcaagaaggacaaggttcaagacaatcacctgtctccaaacaagtggaagtggacaaagcggaccctgtccgaaacttcaagctcaaagtcgtttgagaccaaagagcagggctctcccgagaaggccaggtcatctagtagcccccaacacctcaatgtgcagcagctggaggacatgtataacaagatggccaaaacccagagccagcccatcttaaacactaaggaaagcgctgcccagtctaagccaaaggaggagctcgaaatggagtccataccatctccagtggcccctctgcctacaagaaccgaaggggtgatcgacatgcgctccatgtctagcatcgactctttcattagctgcgcaactgattttcctgaagcaaccagattctcacatagccccctcacaagtttgccgtccaaaaccggaggctccactgctcctgaagttgggtggcggggagcactcggggcatctggcggacgattcgtggaggctaacccaagcccagatgcaagccagcacagttccttcttcattgaatctcctaagtcctctatgaagactaacaaccctcttaaattgcgagctctgaaggttaatttcatggagggggatcccagtccactgctgcctgtactcgggatgtaccacgacccattgagaaaccgcggttcagctgccgcagctgtcgccggattagagtgcgcgacactgctggataaagccgtcctcagtcctgaatcaagcatttacactaccgcgtcggccaaaactccccctagatccccagaaaaacacactgctattgccttcaacttcgaggcaggcgtccatcagtatattgatgctgacactgatgacgaaggtcagctgctttattccgtcgattctagtccacctaagtcacttcctgggtcaacgtcaccaaaattctccaccgggacccgctctgagaagaaccatttcgagtcatccccgcttccaacctcacccaaatttctgcggcagaattgcatttatagtacagaggccttgacgggtaagggcccatcaggccaggagaaatgcaaactggaaaaccatatctcccccgatgtcagagtcctgcccggaggtggggcacacgggtctacaagagaccaaagtatctag

SEQ ID NO: 235745 - DNA, 2442 bp, synthetic construct
  misc_feature 1..2442: note = Description of Artificial Sequence: Synthetic coding sequence
  source 1..2442: mol_type = other DNA
agggatggcggagagaagacggccgtcactaggcttggcaagctccgcgactgtaatacccacgacagtctgctggaggtctgtgacgactacagtctggatgacaatgagtattttttcgatcggcatcccggtgcttttacaagcatactgaacttctacagaaccgggagactgcacatgatggaagagatgtgcgctctgtcattttcacaggaactcgactactggggaattgacgagatttacttagaatcatgctgtcaggcaagataccaccagaagaaggagcagatgaacgaggaactgaagagggaggccgagactctcagggaacgcgaaggagaagagttcgataatacgtgctgcgcagaaaaacgaaaaaagctttgggatctgctggaaaagcctaactccagcgtggctgccaagatactcgccattatatcaatcatgtttatcgttctgagcactatcgcactgagcctgaacaccctgccagagctgcagtccctagacgagtttggccagtctactgataatccccagctggctcacgtagaggctgtttgtatcgcctggtttacaatggagtacctgctgagattcctgtctagcccaaagaagtggaagttttttaagggaccattgaacgcgattgatctgctggcaattcttccctactacgtgacaattttcctcacggagagtaacaagagtgtcctacagtttcagaacgtgcgcagagtggttcaaatcttccgaattatgcggattttacggattcttaaactggcacgacacagtaccggtctgcagtcactggggtttactctgcgaagatcatataacgaattggggctgctaattctcttcctcgccatgggcattatgattttctcttccctcgtatttttcgcggagaaagacgaggatgacactaagttcaaaagcattcctgcctcattctggtgggccactattacgatgactaccgtaggctacggggacatataccctaaaaccctgctgggaaagattgtgggcggattgtgttgtattgccggtgtactggttatcgctctcccaatacctattatcgtcaacaattttagcgagttctacaaagagcagaagcgtcaagagaaggccataaaaagaagagaagcactcgagcgcgctaagagaaacgggtccatcgtgtctatgaatatgaaggatgccttcgcccgtagcatcgaaatgatggatatcgtggtagagaagaatggtgagaacatggggaaaaaggacaaagttcaggataaccacctttcaccaaataagtggaagtggactaagcggacgctttcagagacctcttcaagcaagagctttgagaccaaggagcaggggtcacctgaaaaggccaggtcctctagctctcctcaacatttgaatgtccagcagctggaggatatgtataacaagatggctaagacacaatcacagccgatcctgaataccaaggagtctgcggctcagtctaagcccaaagaggagcttgagatggagtcaataccatctcccgttgccccactgccaaccaggactgagggagtgatcgatatgaggtccatgtcaagcatagactcattcattagctgcgccaccgatttcccagaggcaactagatttagccactctcccctgacatctcttccctccaaaaccggcggatccaccgctcccgaggtgggatggagaggcgcactgggtgccagcggaggccgtttcgtggaggcgaatcccagccctgatgcgtctcagcactcatcattctttattgaaagccctaaatcatccatgaagacaaataacccactaaagctgcgggcactgaaggtgaactttatggaaggtgacccctcccctcttctgcccgtgctgggtatgtatcatgacccgttgcgtaaccgcggaagcgcagccgctgcagtggctggcttagaatgtgctacactcctagacaaggcggtcctgtcccccgaatcttccatctacaccacagcctcagctaagaccccaccgagatccccagaaaaacatacggctattgctttcaacttcgaagcaggtgtgcatcagtatatcgacgcagacactgacgacgagggacagctgttgtacagcgtggattcctcccctccaaaatccctgcccggttccaccagtcccaaattctctacaggaacccgctccgaaaagaaccattttgaatctagtcctctccccacgagcccaaagttcctcaggcagaattgcatatatagcaccgaagcgttaactggaaagggaccttcaggccaagagaaatgtaagctggagaatcacattagtcccgacgtaagagttctccccggaggcggagctcacggtagcacccgcgaccagtctatctag

SEQ ID NO: 235746 - DNA, 2736 bp, synthetic construct
  misc_feature 1..2736: note = Description of Artificial Sequence: Synthetic coding sequence
  source 1..2736: mol_type = other DNA
atggctgaaaaggcgcctcccggactgaatcgcaagaccagtcggtctaccctgtcactccctccagagccagttgatatcatccggtccaagacctgttcgagacgggttaagatcaatgtggggggactcaatcacgaagtactgtggcgaacacttgatcgacttccacgaactaggctgggcaagctccgtgactgcaatacccatgagtcgctgcttgaagtatgtgatgattacaacctcaacgaaaacgagtatttctttgataggcatccaggggcatttacctctatcttgaacttttatcgaacagggaagctccatatgatggaggagatgtgcgccctgagcttcgggcaggagttagattactggggcatcgatgaaatctatctggagtcttgctgtcaagccagataccaccagaagaaggagcagatgaatgaggagctccgacgcgaagcagagaccatgcgggaaagagagggcgaagagttcgataatacttgctgtcctgacaaaaggaaaaaattgtgggatttactggagaagccgaactcttccgtggccgcaaaaattctggccatcgtctccatcctcttcatagtgctctccactattgctctctctctcaacacccttcctgaactgcaggagactgatgagttcgggcaactgaatgacaatcggcagctggcgcatgtggaggccgtctgtattgcttggttcactatggaatacttgctccggtttctttcctctccgaataaatggaagttttttaagggacccttaaacgttattgatctcttggccatactgccttactatgttaccatttttctgacagagagtaacaagtctgtgctgcagtttcagaatgtgagacgggtcgtgcagatcttccgcatcatgcggattcttcggatcctgaagctggccaggcacagtaccgggctacagagtctgggatttaccctcaggagaagctacaacgagctggggctcctcatcctattcttagcaatgggtatcatgatcttctctagtctagtgttcttcgcagaaaaggacgaggatgccacaaagtttacgtccatcccggcttcgttttggtgggccaccattaccatgacgaccgttggttatggtgacatttatcccaagacactgctgggcaagattgtagggggtctatgttgtattgccggagtcctcgtcattgccctcccaatccccattatcgttaataacttcagcgaattttacaaggagcagaagcgccaggaaaaggctattaaacgaagagaggcgttggagagagccaaaaggaacggatccattgtgtctatgaatttgaaagacgcgtttgccaggagtatggaattgatcgacgtcgcagtcgagaaagctggtgaaagcgcaaatactaaagactccgccgacgacaatcacctaagtcccagccgatggaaatgggcgagaaaggcactgtcagagacgagcagcaacaagtcgttcgagaacaaataccaagaagtgtcccagaaggattcccatgaacagctaaacaataccagctcttccagtccacagcacttgtccgcgcagaagttagagatgctctacaacgagattacgaagactcagcctcattcgcaccccaatcctgactgtcaggagaagcctgaaaggccttctgcttatgaggaagaaatcgagatggaagaagtggtgtgtcctcaggagcagcttgctgtagcacagacagaggtgatcgtggatatgaagtcaactagcagcatagacagctttacatcctgtgcaacggacttcaccgaaacagaacggagcccactgccaccaccaagcgcatcccatctgcagatgaaattcccaactgacctcccgggaaccgaagagcaccagcgggcaagggggccaccattcctcaccctgagtagggaaaaaggacctgccgcaagagatggcactttggaatacgctcctgttgacattacagtcaacctggacgcatcaggatcccagtgtggcctgcactccccgttgcaatccgataatgctacagatagtcccaagagcagtcttaaggggtcgaatcctctcaagtcccgttcactcaaagtgaattttaaagagaatcggggtagtgctccgcagactcctccctccaccgcacgaccactgcctgtgaccaccgctgatttctctttgaccaccccacagcatatctcaacaattctgcttgaagagaccccttcccagggagacagacctctgctcggcacagaggtatccgctccttgccagggtccatccaaaggtcttagcccaaggtttcctaaacagaaattgtttcctttcagtagtcgggagaggcggtcattcaccgaaatcgatactggagacgacgaggactttctcgaattgcccggagccagggaggagaaacaagtagacagcagcccaaattgctttgcagataaaccatcagatggaagggatcctctcagggaggaaggttcagtcggcagttccagcccgcaggacaccggacataactgtcggcaggacatataccacgcagtttcagaagtcaaaaaagactcctctcaagaaggctgtaaaatggagaatcaccttttcgctcccgaaatccattccaatccaggagacaccggctattgcccgacaagagagacctctatgtag

SEQ ID NO: 235747 - DNA, 1206 bp, synthetic construct
  misc_feature 1..1206: note = Description of Artificial Sequence: Synthetic coding sequence
  source 1..1206: mol_type = other DNA
atgcaggtcagtattgcatgtactgaacataatctgaagtcacgaaacggggaagaccgcctgctgtccaagcaatccagcacagcgcctaatgtggtcaacgctgccagagctaaattccgtacagttgcaatcattgccagatctcttggaacattcacaccacagcatcatatatcgctcaaagagagtacagcaaagcagacaggcatgaagtatcgaaacctgggtaagtccggtctccgcgtttcctgtctcgggctaggcacttgggttacctttggcggtcaaatttcggatgaagtggcggaacgtcttatgaccatcgcgtacgagagcggggtgaatctctttgatacagccgaagtttatgcagctgggaaggctgaggtgatcctcggcagcattatcaaaaaaaaggggtggcggaggtcgtctctcgtcataaccacaaaactgtactggggtggcaaagcagaaaccgaacgtggcctgtcaaggaagcacatcatcgaaggcctcaaaggttctttgcaaaggcttcagctagaatatgtggacgtggtttttgctaacagaccggactctaatacaccgatggaggaaatcgtgagggccatgactcatgtcatcaaccaaggcatggcgatgtattgggggacaagcagatggagcgctatggaaatcatggaggcctactccgtcgccagacaattcaacatgatccctccagtttgtgaacaggctgagtatcacctttttcagcgagaaaaagtcgaggtacagctcccagaactttatcacaagatcggggtgggcgctatgacatggagcccgttggcgtgtggcatcataagcggcaagtatggaaacggagtgccagaatctagtcgggcatcgctgaagtgctaccagtggctgaaggaaagaattgtgtccgaggaaggcaggaaacaacaaaacaagctcaaagacttgtcccctatcgccgagcgacttggttgcaccctgccacagcttgcagtagcctggtgcttgcgcaacgaaggggtaagctccgttttgcttggtagttctactccagagcaactgatcgagaatttgggggctatccaagtcctcccaaaaatgacctctcacgtggtcaatgagatcgacaacatccttcgtaacaaaccttactcaaaaaaagactatcggtcttag

SEQ ID NO: 235748 - DNA, 1173 bp, synthetic construct
  misc_feature 1..1173: note = Description of Artificial Sequence: Synthetic coding sequence
  source 1..1173: mol_type = other DNA
atgctggctgccagaaccggagccgctgggagccagatttcagaagaaaatacaaaactcaggaggcaatctggcttttccgtggcaggcaaagataaatcaccaaagaaagcaagtgaaaatgcaaaggacagctccctgagtccaagcggggaatcccaattaagggcccgacagttggctttgttaagagaggttgaaatgaactggtacctgaaactgtgcgacctgagtagcgagcacacaaccgtctgtacaactgggatgcctcaccgcaacctggggaagtctggactgagggtgagctgtctcggtctcggaacttgggtgaccttcgggggacaaattagcgacgaagtcgccgagagactgatgacaatcgcatatgagtccggcgtgaatctgtttgatacagccgaggtttatgctgctggaaaagctgaggtcatactaggatccataattaagaaaaagggctggaggcggtctagcctggtgattacgaccaagctttactgggggggaaaggccgaaacagagcgcggactgagcagaaaacacattatcgaggagattgtccgtgcgatgacacacgtcattaaccagggcatggcaatgtattggggtacatccagatggtccgcgatggaaattatggaagcctacagcgttgctcgccagttcaacatgatacctcccgtctgcgaacaggcggaataccatttattccaaagggaaaaggtagaggtgcagttgccggagttgtatcataagatcggggttggggctatgacctggagccctttagcttgtggcatcatctctgggaagtatggaaatggagtgccggagtcgtcccgggcatctcttaagtgttaccagtggctaaaagaaagaatcgtcagcgaagagggcaggaagcagcagaacaagctgaaggatttgagtccgattgcagagagattgggctgcactctgcctcagctggcggtcgcttggtgcctcaggaacgagggggtaagttctgtgctgctgggctctagtactcccgaacagctcattgaaaatctgggcgcaatccaggttctgcctaagatgacaagccatgtcgtgaatgaaattgataacatcttacggaacaaaccatactcaaagaaagattaccgcagctag

SEQ ID NO: 235749 - DNA, 1227 bp, synthetic construct
  misc_feature 1..1227: note = Description of Artificial Sequence: Synthetic coding sequence
  source 1..1227: mol_type = other DNA
atgcacttgtacaagccggcatgtgcagacatccctagccctaagctggggctgcctaaatccagtgagtctgctctgaaatgccggtggcacctcgccgtcaccaagactcagcctcaggccgcttgtaaaccagtccggcctagcggagcagccgagcaaaaatacgttgagaagtttttacgtgtacacggcattagccttcaggagaccactcgggctgagaccgggatggcctaccgaaatcttgggaaaagcggactgcgggtttcatgtctgggactggggacatgggttacattcgggggtcagatcagcgacgaggtggcagagcgcctgatgaccatcgcttatgagtccggggtgaacctcttcgacaccgccgaggtatatgccgcagggaaagccgaagtgattctcggatccattatcaaaaaaaagggatggcggagaagctccctggtcattaccacaaaattatactggggaggtaaggctgaaacagaaaggggcctgtcacggaaacacatcatagagggactaaagggaagccttcagcgcttacagcttgagtatgtggatgtagtctttgcaaaccgccctgatagtaatacaccaatggaggagatcgtaagggctatgacacacgtcataaatcagggcatggccatgtactgggggacgtccagatggtccgcaatggaaattatggaggcttattcagttgctcgccagtttaacatgatccccccagtgtgcgaacaagcagagtaccatctgtttcagagagagaaagttgaggtccagctccctgaactgtaccacaaaattggcgtcggcgctatgacatggagcccattggcttgcgggattatcagcggtaaatacgggaacggagtccccgaaagctctcgagcatccctgaagtgctaccagtggttgaaggagcggatcgtcagcgaggaaggaaggaagcagcagaacaagctgaaggatctctctccaatagccgagcgtctaggctgcaccctaccccagctcgccgtggcttggtgtctgagaaacgaaggcgtgagtagcgtgctgctgggctcctctacacctgagcagctgatcgagaaccttggcgcaatccaagtgttgcctaaaatgacaagccatgtggttaacgaaattgacaacatccttcgaaataagccttactctaagaaagactataggtcttag

SEQ ID NO: 235750 - DNA, 1260 bp, synthetic construct
  misc_feature 1..1260: note = Description of Artificial Sequence: Synthetic coding sequence
  source 1..1260: mol_type = other DNA
atgcttgcagccaggacaggcgcagctgggagtcagatttcagaggaaaatacaaagcttcgcaggcagtccgggttctctgttgcaggaaaggacaagagcccgaaaaaggcttccgagaatgccaaagactcatccctgtcgccaagtggtgagtcgcaactgcgcgctcggcaactggcacttcttagggaagtggagatgaattggtaccttaagctttgtgatctgtcttcggagcacaccacggtgtgcacaacaggaatgccccacagaaatctggggaaaagcggactgcgggtttcgtgtctgggtttgggcacatgggtgacgttcggcggacagatttccgatgaagtagcagaaagacttatgacaatcgcttacgagagcggagtgaatcttttcgacactgcagaagtatacgcagccggaaaagcggaggtcatactgggctctattattaagaaaaaggggtggcgccgaagttctctcgtgatcactaccaagttgtattgggggggtaaggcagagacggaacgcggtctaagcagaaaacacatcattgaaggtcttaaggggtcattgcaaagactacagctcgaatacgtggacgtggtgttcgccaatcgaccagactccaatacacctatggaagaaatcgtccgcgctatgacacacgtcatcaaccaggggatggctatgtattgggggacctcacgatggagcgccatggaaattatggaggcttatagcgtggcacgccagtttaacatgatcccccctgtttgcgaacaggccgagtatcaccttttccagagagagaaagtagaagttcagcttccagaattgtaccataagatcggagtcggagctatgacttggagtccgttggcgtgtggtatcattagcggaaagtacggcaatggcgtgccagaatcaagccgagccagtttgaaatgctaccagtggctaaaggagagaatcgtcagcgaggaaggtagaaagcagcagaacaagcttaaagatctcagtcctattgccgaaagactcggctgcaccctccctcagttagcagttgcctggtgtctcagaaacgagggggtgtcttcagtcctcctgggctcttccacgcctgagcagcttattgagaatttgggagccatccaggtcctcccaaagatgacatcacatgtggtcaatgaaatagacaacatcctcaggaataaaccatatagtaagaaagattacagatcctag

SEQ ID NO: 235751 - DNA, 1104 bp, synthetic construct
  misc_feature 1..1104: note = Description of Artificial Sequence: Synthetic coding sequence
  source 1..1104: mol_type = other DNA
atgtatcctgaatccacaacaggatcccccgcaaggctgtctcttcgacagacaggaagtcccggtatgatctacagtaccagatatggatctcccaaacgtcagctgcagttttacaggaatctgggcaagtcaggcttgagggtcagttgcttaggcctgggaacatgggttaccttcggcggacagattaccgatgaaatggccgaacagctcatgactctggcatatgataacgggatcaacctcttcgataccgctgaagtgtatgcagcgggaaaggccgaagtggtattggggaatatcattaaaaagaagggctggagacgcagctctcttgtgatcacgactaagatattttggggaggcaaagctgagactgaaagggggctaagcagaaaacacatcatcgaaggtttgaaggcatctctcgaacgcctacagctcgagtatgtagacgtagtgtttgctaaccgtccagaccccaatacgcctatggaagagaccgtgcgagccatgactcatgtcatcaaccagggaatggccatgtactggggtacaagtcggtggtcatctatggagataatggaagcctactcagtggcacgccagtttaacctaactcctcctatatgcgagcaggccgaataccacatgttccaacgggaaaaggtggaagtccagctcccagagctgtttcataagattggtgtgggcgctatgacatggagccctctggcttgtggaattgtgtctgggaagtatgatagtggaattcccccttattcccgggcttcactaaaggggtaccagtggctgaaggataagatcttatccgaagaaggcagaagacaacaggccaaactcaaagagttacaggctatcgcagagaggctcggttgtactctgccccagctggcaattgcctggtgcctgcgcaatgaaggcgtctcttcggtgctcttgggcgctagtaacgcagatcaactgatggagaacataggtgccattcaggtcctgcccaagttaagcagtagtatcatccacgagattgactcaattctcggcaacaagccctactccaagaaagattatcgatcgtag

SEQ ID NO: 235752 - DNA, 1104 bp, synthetic construct
  misc_feature 1..1104: note = Description of Artificial Sequence: Synthetic coding sequence
  source 1..1104: mol_type = other DNA
atgtaccccgagagtactacaggaagccccgcacgtttgagtcttaggcaaaccggctcaccaggtatgatctattctacgagatatgggagcccaaaacgccagttacagttctacagaaaccttgggaaatcaggcctccgggttagctgtctcggcctgggtacgtgggttacatttggagggcagattaccgatgagatggccgaacagctaatgactttggcatacgacaatggtattaatctttttgatactgctgaggtttatgcagccggaaaagctgaggtggtcctgggcaatattatcaagaaaaaggggtggcgacggagctctctggtcatcacaaccaagatcttttgggggggaaaggcggaaaccgaaaggggcctgtcccgcaagcacatcatcgaaggtcttaaggccagccttgaaaggttgcagctcgagtatgtagatgttgtttttgcaaatagaccggatccaaatacacctatggaggaaaccgtgcgcgcaatgacacacgtgataaaccaggggatggctatgtattggggaacatccagatggtcttcaatggagattatggaggcctatagcgtcgctagacagttcaacctaacacccccaatttgcgagcaggcagagtaccatatgttccaacgcgaaaaggtggaagtgcaactgccggagctcttccataaaatcggggtgggagcaatgacctggtcgcctctggcatgcggaatcgtgtcgggaaaatatgattcaggcatccctccgtactctagagcatctctcaaaggataccagtggctaaaagacaagatattatctgaggagggcaggagacagcaggcgaagctcaaggagttgcaagccatcgccgagagactgggctgtaccttgccacagctggccattgcatggtgtcttaggaatgagggtgtatcctcagtgttacttggagcttccaacgcagatcagctgatggagaatattggagcgatccaggtgctgcccaaactcagctcttcaataattcatgagatcgactccatcctgggcaataagccctattcgaaaaaggactaccgatcctag

SEQ ID NO: 235753 - DNA, 1062 bp, synthetic construct
  misc_feature 1..1062: note = Description of Artificial Sequence: Synthetic coding sequence
  source 1..1062: mol_type = other DNA
atgtacccggaaagcactacaggaagccctgccagactgtcactgaggcagaccggttctcctggcatgatctatcgcaacctaggaaaatcaggtctgcgtgtgtcttgccttggcctgggcacatgggtgacctttggcggtcagatcactgacgagatggctgagcagctgatgaccctggcctacgacaatggaatcaatctgtttgatactgccgaggtgtatgccgcaggcaaagccgaagtggtgttgggtaacattatcaagaaaaagggctggcgcagatcctccctggtgatcactacaaaaatcttttggggcggaaaggccgaaactgagcgcggtctgtctcgaaaacatataattgaaggattaaaggcctcactcgagcgactccagctcgagtacgtagacgtagtttttgctaatcggccagatcctaatacccccatggaggagactgtcagagcaatgactcatgtcattaatcaaggcatggccatgtactggggtacctctcggtggtcttccatggagataatggaggcttactccgtcgcccgacagttcaatttgactccgcctatctgcgaacaggccgaatatcacatgttccaaagggaaaaagtcgaagtccagttgcccgagctgtttcacaaaataggagtgggggcaatgacctggtcacctttagcctgcgggattgtgagtggtaaatacgactctggtatacctccatactctagggctagcctgaaaggataccagtggctgaaagacaagatccttagcgaagaaggcagacgacagcaggccaaactgaaagaactgcaggcaatcgcagagaggctgggttgtaccctgccccagctcgctatagcctggtgcctgcggaacgagggtgtatcaagcgttctgctcggcgcatctaatgcggatcaactaatggagaacataggcgcaattcaagttttgcccaagctctcatcctccatcatccatgaaattgacagtattctcggaaataagccatactcaaagaaggattaccggtcatag

SEQ ID NO: 235754 - DNA, 1248 bp, synthetic construct
  misc_feature 1..1248: note = Description of Artificial Sequence: Synthetic coding sequence
  source 1..1248: mol_type = other DNA
atgctttccatgacatattctgagagcctgcgatctgtgagttcaagatgtcattctgagtgggcactgcacccagtgcgtcagacagatacactggaattgcagcggctgcgtgaggtgcgagctgctgcccaagccaggaatatggaaagctttctgcgcatgcatggtttatcgctggacgggtgcaccgctcagaggacagggatgaagtatagaaatctgggcaagtccggactccgagtgagctgtcttggcctgggtacatgggtcacattcgggggtcagatcactgacgagatggcggaacaacttatgacgctggcctatgataacggaattaacttgttcgatactgccgaggtttatgccgcaggcaaggccgaggtggttctgggaaacataatcaagaagaagggctggaggagaagctccttagtgatcactaccaagattttttgggggggaaaggcggagactgagcggggtctgtctcgcaaacacattattgagggactgaaggcatctctggaacgtttacagttagaatacgtggacgtcgtgtttgcaaaccgtccagaccccaatacaccaatggagggggaccctttcagcagcagcaaaagccggacattcatcatcgaagagacggtgcgcgctatgacccacgtgatcaatcagggcatggctatgtattgggggaccagccggtggtcatccatggagattatggaagcctattcagtggccaggcaatttaacttaaccccacccatttgcgagcaagctgagtatcatatgttccaaagggagaaagtggaggtacagctgcccgagctcttccacaagatcggagttggcgcaatgacgtggagcccgctcgcttgcggcatagtgagcggcaaatatgacagcggaattcccccatattctcgggcatctttgaaaggatatcagtggctgaaagacaaaatcctatctgaggaggggcgtcgccagcaggcaaagttaaaagagctccaggctattgccgaacggcttgggtgcactcttccgcagctggccatagcgtggtgcctcaggaatgaaggtgtaagctcagtgctgctgggggcttccaatgccgatcagctcatggagaatatcggggctattcaggtgctgcccaagctctcaagttccatcattcacgagatagattccatcttaggcaataagccctattctaagaaggattaccgcagttag

SEQ ID NO: 235755 - DNA, 522 bp, synthetic construct
  misc_feature 1..522: note = Description of Artificial Sequence: Synthetic coding sequence
  source 1..522: mol_type = other DNA
atgtatccggagagtaccactggcagccccgctcgcttgtccctccggcagaccggatcaccaggtatgatttattctaccagatacgggtcaccaaagcgtcagctgcagttttatcgaaatctggggaaatccgggttacgtgttagctgtctcggcctgggcacctgggtgaccttcggcggacaaattactgacgagatggccgagcagctgatgacacttgcctatgacaatgggatcaacctgttcgacaccgcagaagtgtatgcagctgggaaggcggaggtcgtactgggtaacatcattaagaaaaagggctggtcccagcaaggagagagagccggacaagccagagttacccccccttgtagtcttggaaggcgggctagggatgcatctaagagcgcgggagctggctgtcatctccaggcacaggcttgcgtgccaagttccacccaggccctgcaaaccacacgcggtagggcacccctgaaaccccctccacccctggcaagttag

SEQ ID NO: 235756 - DNA, 1062 bp, synthetic construct
  misc_feature 1..1062: note = Description of Artificial Sequence: Synthetic coding sequence
  source 1..1062: mol_type = other DNA
atgtatcctgaatctacaacggggtcacctgcaaggctctctctgagacaaactggctcccccggaatgatctacagaaatcttggaaaaagcggcttgagagtgtcctgtctcggcctggggacctgggtgaccttcggagggcagataacggacgagatggccgaacaacttatgacccttgcctacgataacggcattaacctgttcgacacagcagaggtctacgccgcaggaaaagccgaggtggttctgggcaacatcatcaaaaaaaagggatggaggcggtccagccttgtgataacgacaaagattttctggggtggaaaagccgaaacagagcgaggattgtctagaaagcacatcatcgagggcctgaaggcgagcctggaaaggctacagcttgaatatgtggacgtagtttttgctaatcgcccagatccaaatactcccatggaggagactgtccgcgctatgacccacgtaattaaccagggcatggccatgtattggggcacctcccgttggtctagcatggaaattatggaggcctactcagtagcccgacaatttaacctgacacctcccatatgcgagcaagccgagtatcacatgttccagcgtgagaaagtggaggtccagcttcccgagttgtttcacaaaatcggtgtgggagccatgacttggtctcccctggcatgtggcatagtctctggaaaatacgactcgggcattccaccatactcacgcgcttcgctcaaaggctaccagtggttgaaagataaaatcctcagtgaagaaggtaggagacagcaggccaagctcaaagagctgcaggccatcgccgaaagattgggatgtaccctgccacagctggcgattgcgtggtgcctgaggaatgaaggagtcagcagtgtcctgcttggcgcatctaatgctgaccagctcatggagaatattggtgcaatacaagttctgcccaaactctccagcagcatcattcatgagatcgactccattttgggaaataaaccttactctaaaaaagattaccgcagttag

SEQ ID NO: 235757 - DNA, 1104 bp, synthetic construct
  misc_feature 1..1104: note = Description of Artificial Sequence: Synthetic coding sequence
  source 1..1104: mol_type = other DNA
atgtaccccgagtcaacgaccggcagtcctgccaggctgtctcttagacagacagggagccccggaatgatatatagtacaaggtatggaagtcccaaaagacagctgcagttctatcgtaacctgggcaagtccggtctgagagtttcctgcctgggattagggacgtgggttacctttggcggacagataaccgatgaaatggctgagcagctcatgacactggcatatgataacggtattaacctattcgataccgccgaagtgtatgccgcaggtaaagcagaagtcgttctgggcaatatcataaagaaaaaggggtggcggcgatcgtcacttgttataaccacgaagattttttggggtggcaaggcagagacggaaagaggattaagtcgtaaacacatcatcgaggggctgaaggctagtcttgagaggctgcagttggaatatgtggacgtcgtgttcgccaacaggcctgatcctaataccccgatggaggagacagttcgagcaatgacccatgttataaaccagggcatggctatgtattggggtacttctcgttggagttccatggagatcatggaggcttactcagtcgccaggcagtttaatttgacccctcccatttgtgaacaggctgaatatcacatgtttcagagggaaaaggtggaggtgcagctgccagagctcttccacaaaatcggagtgggcgcaatgacttggagcccgcttgcctgtgggatcgtctctggaaagtacgacagcggaatccccccttacagtcgtgctagcctaaagggctatcagtggttaaaggataaaatcctctcagaggaggggagaaggcagcaggccaaacttaaagagctgcaggccattgctgagcgactgggctgcacattgccacaactggctattgcttggtgcttgcgcaacgagggcgtgtcctctgtcttactgggcgcttctaatgctgatcagctcatggaaaacattggagccatccaggtccttcctaagctatcctcctcgatcatccatgaaatcgactcaatcttaggtaataagccctatagtaagaaagattaccggtcatag

SEQ ID NO: 235758 - DNA, 522 bp, synthetic construct
  misc_feature 1..522: note = Description of Artificial Sequence: Synthetic coding sequence
  source 1..522: mol_type = other DNA
atgtaccccgagtctacaacaggctctcccgctaggctttctctaagacagacaggatctcccggaatgatatacagtactaggtatggctcacccaagaggcagctacaattctacaggaatttagggaagagcggcctgcgcgtgtcttgcctcggcctcggtacttgggttacctttggaggccagataaccgatgagatggccgagcagctgatgacgctggcttacgataatggcataaatcttttcgacaccgcggaggtctatgctgccggtaaggctgaagtagtcttggggaatatcatcaagaagaaaggttggaggcagcggggagagcgagctggccaggccagagtgacgcccccttgttctctggggaggcgcgctagagacgcctcaaaatcagcaggggctggatgccacctccaagcgcaagcctgcgtgccttcatccacacaagccctccagacaaccagaggacgtgccccactgaaacctccaccgcctcttgcgtcttag

SEQ ID NO: 235759 - DNA, 762 bp, synthetic construct
  misc_feature 1..762: note = Description of Artificial Sequence: Synthetic coding sequence
  source 1..762: mol_type = other DNA
atgtatccggagagtaccactggctcaccggcacgcctgagtctgcggcagacagggtcccctggtatgatctacagcacgaggtacggcagcccgaaacggcagctgcagttctacagaaacttaggcaaaagcggccttcgggtctcctgcctgggattggggacatgggtaacgttcggaggtcaaatcaccgatgaaatggccgagcaactgatgacccttgcatatgacaacgggataaatctctttgacaccgcagaggtgtacgcggctggcaaggccgaggtggtgctgggaaatatcatcaagaaaaaaggctggcgtcgatcaagtctcgtgatcacaacgaagatattctggggcggaaaggctgagacagaaagaggcttgtcccgtaagcacataatagaaggtctgaaggcctctctcgagagactgcagctggaatatgtggacgtggtttttgccaaccgtcctgaccccaacactcccatggaggaaactgtgcgggctatgacacatgttattaatcagggcatggccatgtactgggggaccagccggtggagctccatggaaattatggaggcctatagcgtcgcccgacagtttaatctgaccccccctatatgtgaacaagcggaataccacatgtttcagagagaaaaagtcgaggtgcagctaccagagctgttccacaaaataggggtcggtgccatgacgtggtcacctctcgcatgcggtattgttagtgggtag

SEQ ID NO: 235760 - DNA, 765 bp, synthetic construct
  misc_feature 1..765: note = Description of Artificial Sequence: Synthetic coding sequence
  source 1..765: mol_type = other DNA
atgtaccccgagtcgactacggggagcccagccagattgagcctcagacagactggcagcccaggtatgatttacagaaatctgggaaaatcaggcctccgcgtgagctgtctcggactgggaacatgggtcacctttgggggacaaatcactgacgagatggccgagcagcttatgacactagcttacgacaacgggatcaatctcttcgacaccgcggaagtttacgccgctggtaaggcagaggttgtgctggggaacataataaagaagaaggggtggagaaggtctagcctggtgataactactaaaattttctggggtggcaaagctgagactgaacggggtttgtcacgaaagcacatcatagaagggttaaaggcatcactggaaagattacagctggaatacgtcgatgtggtcttcgcgaatcgaccagacccaaatacacccatggaggaaacagtaagggctatgactcacgtgatcaaccaaggtatggccatgtattggggtacttcaagatggtctagcatggagatcatggaggcctattctgtcgccagacaatttaaccttacccctcctatttgcgaacaggcagagtatcacatgttccagcgtgaaaaggtcgaggtccaactccccgagctctttcataagatcggcgtgggcgctatgacatggtcgcctctagcatgcggaatcgtgtctgggaaatatgattccggaatccctccttacagcagagccagcttaaaatag

SEQ ID NO: 235761 - DNA, 288 bp, synthetic construct
  misc_feature 1..288: note = Description of Artificial Sequence: Synthetic coding sequence
  source 1..288: mol_type = other DNA
atgtacccagaatctactactggaagccccgcacgtctgagtttgcggcaaacggggtcacccggaatgatttacaggaacctcggaaaatccgggttgagggtttcctgcctcggactgggcacctgggtgacattcggaggtcagattacggacgagatggccgaacagcttatgactttggcctacgacaatgggattaacctattcgataccgctgaggtctacgccgcaggcaaggctgaagtggtgttgggaaacataatcaagaagaaaggttggcggtag

SEQ ID NO: 235762 - DNA, 159 bp, synthetic construct
  misc_feature 1..159: note = Description of Artificial Sequence: Synthetic coding sequence
  source 1..159: mol_type = other DNA
atgtacccagagtccactaccgggagccccgctcgactgtcacttcgccaaactggctctcccggtatgatctactcaacaaggtatgggtctcctaaaagacagcttcagttttacaggaatctaggcaaaagtgggctccgcgtgagttgcctgtag

SEQ ID NO: 235763 - DNA, 903 bp, synthetic construct
  misc_feature 1..903: note = Description of Artificial Sequence: Synthetic coding sequence
  source 1..903: mol_type = other DNA
atggccgaacagcttatgacactcgcatacgataacgggattaatttgtttgacaccgctgaagtgtacgccgcaggtaaggccgaggtcgtactgggaaatatcatcaagaaaaaggggtggcgcagatcttctctggtgattacaacaaaaatcttctggggcggtaaggccgagactgagaggggcctgtctaggaagcatatcattgaaggactgaaagcctccctcgagcggcttcagctcgagtacgttgatgtggtgttcgccaatcgcccagacccaaataccccaatggaggagaccgtccgggctatgacacacgtcataaaccagggaatggccatgtattgggggacctcgaggtggagctcgatggagattatggaggcctatagcgtggcccgacaattcaacctcactccgccaatatgcgaacaggccgagtatcatatgtttcaacgagagaaggtggaagtgcagctgcccgaactattccacaaaataggggtaggggctatgacttggtccccacttgcttgtgggatagtcagcggtaaatatgacagtgggattccaccctactctagagcatcactgaagggctaccagtggctgaaagataagatcttgtctgaggagggtcggaggcagcaggctaagttgaaagagctccaagcgatcgcagaaaggttgggatgcacgctgccccaattggcaatagcctggtgtctacggaatgaaggcgtgtcttcagtccttcttggagcatctaatgcagatcagctcatggagaacatcggtgccatacaggtgctacctaagctctcatccagtatcatccacgaaatcgactctatcctgggcaataaaccttatagcaagaaagattataggagctag

SEQ ID NO: 235764 - DNA, 1215 bp, synthetic construct
  misc_feature 1..1215: note = Description of Artificial Sequence: Synthetic coding sequence
  source 1..1215: mol_type = other DNA
atgcaggtctcaatcgcatgcactgaacagaaccttagatctaggtccagtgaggaccgcctttgcggccctagaccgggacctggagggggaaacggtggtccagcaggaggcggtcacggaaatccacccggaggaggcggttcaggcccaaaggccagagcagcactggttccacgccctcccgcaccggctggagctttgagggagagtacaggtcggggtactggcatgaagtatcgtaacctgggtaagtctggtttacgggtgtcttgcctggggctgggtacctgggtgacattcggaagtcagatttctgatgaaactgccgaggatgtgctcactgtagcatatgagcatggagttaacctgtttgatactgccgaagtgtatgccgcaggcaaggcagaaaggactttagggaatatcctcaaaagcaagggatggagacggagttcttacgtcataacaactaaaattttttggggtggccaggccgaaaccgagcgaggactgtctaggaagcacatcatcgagggattgcgaggttctctggagcgattgcagcttggctacgtggatattgtatttgccaatcgcagcgatcctaactgccctatggaagaaattgtgcgggctatgacatatgtcataaaccaaggtctcgcactgtactggggcacgtctaggtggggtgcagccgagattatggaagcctattctatggccagacagttcaacctcatcccacctgtttgcgaacaggctgaacatcacctgttccaaagagagaaggtggagatgcagttgcctgagctgtatcataagataggtgtgggctctgtcacctggtaccccttagcttgtgggctgatcacttctaagtatgacggcagggtgcctgatacctgccgagcaagtattaaaggctatcaatggctgaaagacaaagttcagtcagaggacggcaagaagcagcaggcaaaggtgatggacctgctgcctgttgcacaccagctgggatgtacagtggctcagcttgcaatcgcctggtgtctgagatctgaaggggtctcttccgtgctccttggcgttagtagtgcggagcagctcatcgaacatcttggagctctgcaggtcctgagtcagcttactcctcagaccgtgatggagattgatggcctcttggggaataaaccacactctaagaagtag

SEQ ID NO: 235765 - DNA, 2562 bp, synthetic construct
  misc_feature 1..2562: note = Description of Artificial Sequence: Synthetic coding sequence
  source 1..2562: mol_type = other DNA
atgagcgagaaagtggactggcttcagtcccaaaatggagtctgtaaagtcgatgtctactcacccggagacaaccaggcccaggactggaagatggatacatccaccgaccctgtccgggtgctgagctggctccgacgcgatttagaaaaatctaccgccgagttccaagacgtgcggttcaaaccaggagaatctttcgggggagagacttctaactccggcgatccccataaaggtttttctgtggattactacaatactaccaccaaagggacacctgagcggttgcattttgagatgacacacaaggagatcccctgccaaggtccacgagcacaacttggcaatggaagttctgtcgacgaagtgtctttctatgccaatcggcttactaatttagtaatcgcaatggctcggaaggagatcaatgagaagatcgatggatcagagaacaagtgtgtgtaccaaagtctgtatatgggaaacgaaccaacgcctacaaagtccctctcaaaaattgcaagcgaactggtgaatgagacagtcagtgcatgttcccgcaacgcagctccggacaaagctcccggaagcggagaccgtgtgagcggcagctcccagtcgccaccaaatttgaagtataaaagtacactgaaaatcaaggagtccacaaaggaaaggcaagggcctgatgacaagccaccaagcaagaagtcatttttctacaaggaagtattcgaatcccgcaatggagactacgcccgtgaaggagggaggttcttcccaagggagcggaaacgctttcggggacaggaacgacccgacgatttcactgcaagcgtgagcgaaggaatcatgacatacgccaattctgtggtgtcggatatgatggtgagcattatgaagactctgaaaattcaggtgaaagataccaccatcgctactattctgttgaaaaaggtcctgctgaaacatgccaaggaagttgtcagtgacctgatcgacagctttctgcgcaacctgcactccgtaacaggcacactgatgacggacacccaattcgtgtcagctgtcaagagaacagttttcagccatggatcccagaaggctacagacattatggatgccatgctgcgaaagctctataacgttatgttcgctaaaaaggttccagaacacgtgcggaaggcccaggataaagccgaaagttatagtctgatctcaatgaagggaatgggcgacccaaagaacagaaatgttaattttgccatgaagtcagagactaagctgcgggagaagatgtacagtgagccaaagtccgaggaggagacatgtgctaaaacgctgggagaacacataatcaaagaaggtctcacgctgtggcacaagacccaacagaaggagtgcaaaagcttgggttttcagcacgccgcatttgaagcgcctaatacgcagcgtaaacccgcttcggacatttcttttgagtatccggaagatatcggaaatctgtccctccctccttacccccctgagaagcctgagaatttcatgtacgattccgactcttgggctgaggatctgatcgtaagtgctctgttgctgatccagtatcacctggctcaagggggacgaagggacgccagatcctttgttgaggccgctgggacgacaaacttcccagctaatgaacctcctgttgcgccagacgagagttgtctcaaatccgcccctattgtgggagaccaggaacaagccgaaaagaaggatctgcgctctgtattctttaacttcatcaggaatttgctgagtgagacaattttcaaacgcgatcagagccccgagccaaaggtgcccgagcaacccgtcaaagaagaccggaagctctgcgagaggccattggcctctagccctccgcgtctttatgaagacgatgaaacaccaggtgccttaagtggactgaccaagatggcagtatctcagatagatggccatatgtcaggccagatggtggagcacctcatgaactccgtaatgaagctctgcgtaatcatcgcgaagtcctgcgatgcttccctggccgagctaggcgacgacaaaagtggcgatgcaagcagactgactagcgcattccccgatagcctatatgagtgtctgcccgcaaagggaaccggatccgcagaagccgtcttgcagaatgcctatcaggccatacacaacgagatgcgaggaacatccggtcaaccgcctgagggctgtgctgctccaaccgtgatcgtatccaatcacaatctgacagataccgtccagaataagcaattacaggccgttctgcagtgggtcgctgcttccgagcttaacgtacccattctctatttcgcaggtgacgatgaaggaattcaggagaagttgctccagctgagcgccgcagccgtggacaaaggttgctctgttggggaggtgctccaatctgttctgcgttatgaaaaggagaggcagcttaatgaagccgtgggtaacgtcacccccttgcagctgctcgactggctgatggtcaacctgtag

SEQ ID NO: 235766 - DNA, 1488 bp, synthetic construct
  misc_feature 1..1488: note = Description of Artificial Sequence: Synthetic coding sequence
  source 1..1488: mol_type = other DNA
atgacagtaatgtcgggagaaaacgtggacgaagcctctgccgctccgggtcatccccaggacggaagttatcctagacaggcagaccatgatgaccatgagtgctgtgaaagagtcgttattaacatcagtggtctacgattcgaaacacagcttaagaccctggcacagttccccaataccctcctggggaacccgaagaaaaggatgagatatttcgatccacttaggaacgagtatttttttgaccgcaacaggccttcttttgatgccatcctctactattatcagagcggaggtcgcctcagacgtcccgtaaatgtgcctcttgacatgttctctgaagagatcaaattctacgagctcggagaggaagccatggagaagtttcgagaagatgaggggtttattaaagaagaggaacggccactcccagagaaggaatatcaacggcaagtctggctgctgttcgagtatcccgagtcaagcggacccgctagggtgatagccatagtgtccgtgatggtaatcctgattagcatcgtcattttttgcttagagaccctgcccgagctcaaggacgataaagacttcacgggcacagtccatcgcatcgacaacacaaccgtgatttataatagtaacatcttcaccgaccctttttttatcgtggaaaccctgtgtattatatggttctccttcgagttggtggttcggtttttcgcttgcccgtcaaaaactgacttttttaaaaatattatgaactttatcgacatcgttgcaataatcccttactttatcacgttgggaaccgaaatcgccgagcaggaaggaaaccagaagggcgagcaggcaacaagcctcgccattttacgcgtgattagacttgtgagagtattccgcatttttaagctgtcccgtcattccaagggccttcagattttgggacagacattgaaggcatcaatgcgggaattgggacttctcatcttttttcttttcataggcgtaattcttttctcctcagctgtgtacttcgccgaggcagaggaggccgaatcacatttctccagtatccctgatgcattctggtgggctgtggtttcaatgacgacggttggatacggtgacatgtatcccgtgactattgggggaaagatcgttggtagcctgtgcgcaatcgctggcgtcctgacgatcgccctgccagtgcctgtgatcgtgtcaaacttcaactacttctatcaccgcgagacagagggcgaggagcaagcacagcttttacatgtttccagcccaaatttagcaagcgatagtgacctgtcacgcagaagttcttcaacaatgtctaagagcgagtatatggagatagaggaagacatgaataatagcattgcccactacaggcaagtcaatatcagaaccgcgaattgcaccacagcgaatcagaactgtgtgaataagtccaaacttctgacagatgtgtag

SEQ ID NO: 235767 - DNA, 1536 bp, synthetic construct
  misc_feature 1..1536: note = Description of Artificial Sequence: Synthetic coding sequence
  source 1..1536: mol_type = other DNA
atggacgtgtgtgggtggaaggagatggaggtggcactggttaacttcgacaattccgatgaaatacaagaggagccaggctacgcaactgattttgatagcacaagtcccaaaggccgtccaggcggatcaagctttagcaatggaaaaatacttatatccgaatctaccaaccacgaaacggctttctcaaaactaccgggtgactacgctgatcctcccggtcctgagcccgtagtcctcaatgaagggaaccagcgggtgatcattaatatcgccggactacggtttgagacacagctgcgcacactttcccagttccccgaaactctgctgggcgatcgcgagaagcgaatgcagttttttgacagtatgaggaatgagtatttttttgaccgaaacagaccatcctttgacgggattttatactattatcaatcgggaggcaaaattaggaggcctgccaacgtacccatcgacatcttcgcggatgaaatctcgttttacgagctgggaagtgaggccatggatcagttccgcgaggatgaaggtttcataaaggaccccgagacactgcttcctacgaatgacatccacaggcagttctggctgctgttcgaataccctgaatcttcctcagcagctcgggctgtggctgtcgtctctgtactcgttgtagtgatctcaatcacaatattctgtctggagacactgccagaattccgtgaggatcgagaactgaaggtagtgcgggatccaaacctgaacatgtccaaaactgttttatctcagactatgttcactgaccccttttttatggtcgaatctacttgtatagtttggttcacattcgaactggttctcagattcgtggtgtgcccgtcgaagacggacttttttagaaacatcatgaatattattgacataattagcataataccatactttgcaactctgatcaccgagctagtgcaggaaacggaaccttctgctcaacaaaatatgtctctggctatcctccgcatcatccgtctcgtgcgtgtcttccgtatctttaaactgagtagacactccaaaggactgcaaatcctgggccagacactgaaagcatctatgcgggagcttggtctgctgatcttcttcctgttcattggagtgattctcttctcctctgctgtgtattttgccgaggtggacgaacctgagagccatttcagcagcatcccagatgggttctggtgggcggttgtgacgatgaccacagtgggatacggtgatatgtgccctacgacccctgggggtaagattgtcgggaccctctgcgctattgcaggagttctcactatagcgcttccggtgcccgtgattgtctctaacttcaactacttctaccacagagagaccgaaaatgaagagaaacagaacatccccggagagattgaaagaatattaaactccgtcggctcacggatgggatcgaccgattctctcaataagacgaacggaggatgctcaaccgaaaaatcacggaaatag

SEQ ID NO: 235768 - DNA, 1728 bp, synthetic construct
  misc_feature 1..1728: note = Description of Artificial Sequence: Synthetic coding sequence
  source 1..1728: mol_type = other DNA
atggacgagcgcctcagtctgctgcgctccccccctcctccctcagccaggcaccgcgcacacccaccccaacgacccgcatcttcgggtggagctcacaccctggtgaatcacggttacgctgagcccgcagccggacgggaattaccgccagacatgacagtggttcctggggaccatttgctagagccagaggtggcagacggcggaggagctccccctcaggggggttgtggcggaggtgggtgcgaccgttacgagcccctgcccccttccctgcccgctgcgggagaacaagactgctgcggtgagcgcgtggtaatcaacatcagcggcctgaggttcgaaactcagttgaagacactttgccagttcccagagacacttctcggagatccaaaaagaagaatgcgttacttcgacccactgcgcaacgagtatttttttgatcgtaatcgaccttctttcgatgctatactgtactactaccaatccggaggacgaatcagacggccagtgaacgtcccaatcgacatattctccgaagaaattaggttttaccagttgggagaggaggctatggagaaatttcgggaggacgaggggttcctcagagaggaagaacgtcctctgccccgtcgagatttccagagacaggtgtggctcctcttcgagtaccctgaatccagtggacccgctagaggcatcgccattgtgtctgtgctcgtcattctgatttctattgtgatattttgtctggagacactgcccgagtttcgtgacgagaaagattatccagctagtacctctcaagattcatttgaggccgcaggtaatagcacttcgggtagccgggcaggggctagctcctttagcgatccttttttcgtcgttgaaacactgtgcatcatctggttcagctttgagctgctggtcaggttcttcgcctgcccttcgaaggccacctttagccgaaacattatgaatctcatcgatattgtggctatcatcccttactttatcacgttaggtacagagttggcagagagacaggggaacggccagcaggcaatgtctctcgccattttgagagtaatcagattggtgagagtgtttagaatatttaagttgtctcggcacagcaaaggattacagattctgggccagactctgaaagctagcatgagagagctcggccttttaatctttttcctgtttataggagttatcctgttctcaagtgccgtgtactttgctgaagccgacgacccaacaagcgggttttcttccattcccgacgccttctggtgggctgttgtcacgatgacaactgtcggttacggggacatgcaccctgttactatcggcggtaagattgtcggctctttgtgcgctattgctggggttcttacaatagctctacctgtgcccgtgatagtgagtaattttaactacttttatcaccgcgaaacggagggggaagagcaaagccagtacatgcacgtgggttcatgtcaacatctaagttcatcagccgaggagctgcgtaaggctcgctcaaatagcacccttagcaagagcgaatatatggtgatcgaagaaggaggcatgaatcattccgccttcccacagacaccatttaagaccggaaatagcactgccacttgcaccactaacaataatccaaacagttgcgttaacattaagaagattttcacggacgtgtag

SEQ ID NO: 235769 - DNA, 1962 bp, synthetic construct
  misc_feature 1..1962: note = Description of Artificial Sequence: Synthetic coding sequence
  source 1..1962: mol_type = other DNA
atggaggttgccatggtgagtgcagagagctctggctgcaatagccatatgccatatggctacgcagcacaagcccgtgccagggagagggaacgactggcccattcacgagctgccgcagctgcagccgtggcagcagctacagccgcagtggagggatcaggaggatccggagggggttcccatcaccatcatcagtcaagaggcgcatgcacatcacatgacccacagagtagtagaggctcacgcagacgacggagacagaggagcgagaaaaagaaagcgcactaccgccagagttcgttccctcattgtagcgacctgatgccatcaggaagtgaagagaagatcctccgcgaattgagcgaagaagaagaggatgaggaggaggaggaggaagaggaggaagaaggtcgattctattatagcgaagatgaccacggtgatgaatgctcttatactgatctcctgcctcaggacgaaggcggaggcggatactcttctgtgagatattccgattgttgcgagagagtggttatcaacgttagtggactaaggttcgagacacagatgaaaacgcttgcacagttcccagagactctccttggtgatccagaaaagagaacccaatatttcgatccactgaggaatgagtatttcttcgatagaaatcgcccatccttcgacgccattttgtactattaccaatctggaggtcggctgaaaagacctgtaaacgtacccttcgatatttttaccgaagaggtcaagttctaccagttgggagaggaagcccttctcaagttccgagaggatgagggctttgttagggaagaagaagacagggccctaccagagaatgagtttaaaaagcagatatggctcttgttcgaatatcctgaatcttcctcacccgctagaggtatcgcaatcgtgtcagtgctggtcattctcatttctatagtgatcttctgtttggagactcttcccgagttcagagatgaccgggatctggtgatggctctcagtgcaggtgggcacggtggactgctcaacgatacctcggctccccacctggaaaatagcggacacactatcttcaacgatcctttctttatcgttgagacagtgtgtatcgtatggttcagctttgagtttgtcgtcagatgtttcgcatgtccttcccaagcactgttcttcaaaaacattatgaacatcattgacatcgtgtccatcctgccttatttcatcaccctgggcacggatctggcccagcaacaggggggaggaaatggccagcagcagcaggcgatgagcttcgctattctgaggattattaggttggtacgcgttttcagaattttcaaactgtctcggcatagcaaaggattacagattctcgggcataccttgcgtgccagtatgcgcgagctggggctgctcatcttttttttgtttataggagtcatcctgttcagcagcgcagtctatttcgccgaggctgatgaacctacaacgcacttccagagcatacccgacgccttttggtgggctgtcgtcaccatgaccactgtgggatacggcgatatgaaaccaatcacggtcgggggaaagatcgtaggcagcctgtgtgcgattgctggagtactgactatcgccttgcccgtgccagttattgtgagcaactttaactatttttatcatagggagaccgagaacgaagaacaaacgcaactcacccagaatgcggtctcctgtccgtatctgccttccaacctgttaaagaagtttagatcttctacttctagctctttgggcgacaaaagcgagtatctggagatggaggaaggtgttaaagagtctctgtgtgccaaagaggagaagtgtcaaggcaaaggggatgatagcgaaaccgacaagaacaactgttccaatgcaaaagcggtggaaacagatgtctag

SEQ ID NO: 235770 - DNA, 1842 bp, synthetic construct
  misc_feature 1..1842: note = Description of Artificial Sequence: Synthetic coding sequence
  source 1..1842: mol_type = other DNA
atggaaatagcacttgtcccattggaaaacggaggagctatgaccgtgaggggcggtgacgaggctagggcaggctgtggacaagctactggcggagagcttcagtgtccaccaacagctggactctccgatgggccaaaagagcccgctccaaagggaaggggcgctcagcgcgatgcagattctggagtgaggccactcccgccactgccagatcctggggtccgaccattacctcccttgccagaagagttaccaaggcccagaaggcccccaccagaggatgaggaggaggagggggacccaggcctaggtaccgtcgaagatcaggccctgggtacggccagtttacatcatcaaagagtccatatcaacattagcggcttgagatttgagacccaactgggcacattggcccagtttcccaacacactcctgggagatcccgcaaagcggctaaggtatttcgatcctctgagaaacgagtactttttcgacaggaaccgcccttcatttgatgggatactgtactactaccaatcaggcggtagattgcgcaggccagtgaacgtgagcctggatgtgtttgcagatgagatccggttctatcagctgggggatgaggcgatggaacggtttcgagaggacgaaggcttcattaaagaagaggaaaaaccgttacctcgaaatgaattccagagacaggtatggttgattttcgagtacccagagagttccgggagtgccagagctatcgcgattgtctcagtgctggtaattctgatctcaatcataactttttgtttggagaccctgccagagttcagagacgaaagggagctccttcgccacccccctgcaccccatcagccccctgctccagctccaggcgctaacggcagcggtgtgatggcaccgcctagtgggccaacagttgccccactcctgcccagaactttggccgacccttttttcattgtcgaaactacctgcgtcatttggtttacctttgagctgctggtgaggtttttcgcctgcccatctaaggccggattctctaggaacatcatgaacattatcgatgttgtagctattttcccatattttatcaccctcggaacagagctggccgagcagcagcccggtggaggaggtggcggtcagaacgggcagcaggctatgtccctagcgatccttagggtaattagacttgtacgcgtttttcgcatttttaaactctccaggcattccaaaggtctgcagattctggggaagaccttgcaggcttcaatgagagaactgggcctcctgattttctttctctttatcggtgttatcctgttcagctcggccgtatatttcgctgaggccgacaaccaggggacacactttagcagtatcccggacgctttttggtgggcggttgtgaccatgacgaccgtgggttacggagatatgaggccaattacagttggaggcaaaatcgtaggatcattgtgcgccattgctggggtattgactattgcactgccagtccctgtcatcgtctccaactttaactacttttaccatcgcgagaccgaccacgaggaaccggcagttcttaaggaagaacaaggaacgcagtctcaaggtcctggccttgacaggggtgtacagcgcaaagtctctgggagtaggggaagcttctgtaaggcaggcggaactctggagaatgctgattcagccaggaggggatcatgcccattggaaaaatgtaatgtaaaagccaagtccaatgttgacctccgacggtctctttatgctctgtgtctggacacgagtagagagacggatctgtag

SEQ ID NO: 235771 - DNA, 1557 bp, synthetic construct
  misc_feature 1..1557: note = Description of Artificial Sequence: Synthetic coding sequence
  source 1..1557: mol_type = other DNA
atggcagcctctatggctcgcagactctggccgctcttgacaagacgcggtttccgacccaggggaggctgtatcagcaacgacagtccccgtcggtccttcaccactgagaaaaggaaccgcaacctcctgtacgaatacgcgcgtgagggctacagcgccctgccacagctggatattgagcgtttttgcgcctgccctgaagaagcagcccacgctcttgaattaagaaaaggggagctgcgcagcgcagacctccccgcaatcatctcgacttggcaggagctgcgacagctgcaggagcaaatccggtccttggaggaggaaaaagctgcggtgactgaggctgtgcgggcattactggccaaccaggacagcggagaggtgcagcaggacccgaaataccagggattgcgcgctcgcggacgggagattcgcaaggaattagtccatctctatccaagagaggcccaactggaagaacagttctatctccaggccctgaagctcccaaatcagactcatcctgatgtccccgttggcgatgagagccaggcccgagttttgcatatggtcggtgataagcccgtcttttcattccagccacgagggcacttggaaataggagagaagctggatattatccgtcaaaagcgcctgagccatgtctctggacaccgcagttattacttgcgcggtgccggtgccctgctgcaacacgggctagtgaacttcacctttaacaagctgctcagaagaggatttacaccgatgactgtcccagacctgctgcggggagctgtgttcgagggctgtgggatgaccccgaacgctaatccttcacagatctacaacatcgatcccgcaagattcaaagatcttaacctagcaggaaccgcagaagtggggctcgcagggtactttatggatcacacggtggcctttagggaccttcccgttcgaatggtgtgctcaagcacctgttaccgtgcagagaccaataccggccaagagccccgaggactatatcgcgtccatcactttactaaggttgagatgttcggagttactggcccaggcctcgaacagagttcacagttgctcgaggaatttctgagcctgcaaatggagattttgacggagttgggactccacttcagagtgctagacatgcccacccaggagctgggcttgcccgcatataggaaattcgatatcgaggcctggatgcctgggagaggtaggttcggcgaagtgacttcagcatcaaattgcaccgatttccagtccagaaggctgcatatcatgttccagacggaggcaggagagctgcagtttgcccacaccgtgaacgccaccgcatgtgccgtgcccaggctgctcatagccctgctcgaaagtaaccagcaaaaggatgggtccgtgctggtccctcccgcactccaatcctatcttggaaccgaccggattacggctccgacgcacgtgccgctccagtacatcggcccaaatcaacccaggaagccaggcctgccaggacagccggcagtgtcctag

SEQ ID NO: 235772 - DNA, 1893 bp, synthetic construct
  misc_feature 1..1893: note = Description of Artificial Sequence: Synthetic coding sequence
  source 1..1893: mol_type = other DNA
atggctgcaggagtcgccgcttggttaccctttgcaagggcggctgccatcgggtggatgcccgtggcctctggtcccatgccagcacccccacgacaggagagaaagagaacacaggatgcccttatcgtcctgaacgtcagtggaacacgtttccagacttggcaggacactcttgaacgctaccccgacactctcttggggtcaagtgagcgggactttttctatcaccccgaaacacaacaatatttctttgacagagaccccgacatattcagacatatcctgaacttctatcgaaccggaaaacttcattatcctcgccacgagtgtatcagtgcatacgatgaagagctggcctttttcggtctgatacctgagatcattggagactgttgctatgaggagtacaaggacagaaggcgggagaatgccgaacggttgcaagatgacgctgacaccgacaccgctggtgaatctgcgttacccaccatgaccgcccgtcagagggtctggagggcctttgagaacccacacacatctacgatggcgctcgtgttctactatgtcacaggtttttttatagcggtgagcgtgatcgccaacgtcgtggagaccgtgccctgcggctcctcccccggtcacatcaaagagcttccttgcggggagagatatgccgtagcctttttctgcctggataccgcttgcgtcatgatcttcaccgtcgaatacctgttacgtctagctgccgcaccttcccggtatcggttcgtgaggtccgtaatgagcataatagacgtcgtcgccatacttccttactacattggcctcgtaatgactgacaatgaggatgtgtccggggcttttgtgacactgagggtgtttcgggtatttcgcattttcaagttctctaggcatagccagggcctcaggatcttaggctataccctcaagagctgtgccagcgagttgggattccttttattcagcctgacaatggctatcattattttcgccaccgttatgttctacgccgaaaagggctcgtctgctagcaagtttacctcaattccagccgctttctggtataccattgtcactatgacaacactcggttatggcgacatggtgcccaagaccatcgccggaaaaatctttggctccatttgttccttgtccggggttctggttattgcactgccagtccctgtcattgtttccaatttctcacgtatataccaccaaaaccagagggctgataagcggcgtgcccaaaagaaggcgcgactggcccgaattcgtgcagccaagagcggctcagcgaacgcatatatgcagtctaagaggaacgggctcctttccaaccagctgcagtcaagtgaggacgaacaggctttcgtgagtaaaagtgggtcttcattcgagacccagcatcatcatctgctgcattgtctcgagaaaaccactaaccacgagtttgtggacgagcaggttttcgaggagagttgcatggaagtggcgacagttaatcgtccttcaagccactctccctctctctccagtcaacagggcgtcacaagtacttgctgcagccggcgacataaaaagacattcaggataccaaatgccaatgtgagcggaagccaccagggtagcatccaggagttatcaacaatccagatccggtgtgtagagaggaccccactgtccaacagtaggtcttctctaaacgcgaaaatggaggagtgcgtgaaactcaattgtgagcagccttatgtgactactgctatcatttctatccccacccctcccgtaactacccctgagggggatgacagacccgagtccccggagtactctggcggtaatattgtaagagtttcagctctctag

SEQ ID NO: 235773 - DNA, 1911 bp, synthetic construct
  misc_feature 1..1911: note = Description of Artificial Sequence: Synthetic coding sequence
  source 1..1911: mol_type = other DNA
atggcagcaggggtcgctgcttggctcccgttcgcccgagccgcagcaatcggctggatgcctgttgcgaactgccctatgcccctggctcccgcagataaaaacaagagacaagacgagctcatcgtcctgaacgtgagcggcaggcgctttcagacttggaggacaaccctggagagatatcctgatactctgctcgggagtacagagaaagagttcttttttaatgaagataccaaggagtatttcttcgacagagaccccgaggtgttcaggtgcgtactaaacttttacaggacagggaaattacactacccaaggtacgagtgtatctccgcgtatgatgatgaactggccttttatgggattctaccagagatcattggggactgctgttacgaggagtataaagatcgcaagagagagaatgctgagcggctaatggatgacaacgacagcgagaacaaccaagagtcgatgccaagtctttcttttaggcagaccatgtggagagcatttgaaaatccccacacaagcactctggctttggttttttactacgtgaccggtttttttattgcagtgtctgtgatcacaaacgtcgttgaaacagtgccgtgtggaaccgtgcccggttcaaaagagcttccatgcggcgagaggtattctgtggcgttcttttgtctcgacacagcttgcgtgatgatctttacagtcgaatatctgctgaggctcttcgctgccccatcccggtatagattcatcaggtctgtgatgagcattatagatgtggtcgcgatcatgccttattacatcggactcgttatgaccaataacgaagacgtgtctggagcctttgtcacgctcagggtgttccgcgtttttcggatctttaagttttcccgccactcgcagggcctgaggatcctaggatacacgttaaaatcttgcgccagtgagctaggcttcctattgttcagtcttacgatggctatcattatctttgcaacagtgatgttctacgccgagaagggtagtagtgcatccaagttcacatccatccctgcctccttctggtatactatcgtgactatgacgaccctggggtacggggatatggtcccaaagacgatcgctggtaaaatctttggtagcatatgttcgctgtcaggagtccttgtgatcgcattgccagtgcctgtaatcgtctcaaacttttctcgaatttaccaccagaaccaacgggctgacaagcgcagggcacagaagaaagcccgactggcccgtattagggtcgctaaaaccggctctagcaacgcctatctgcatagcaaaaggaacggtctgttgaacgaggcgctggagctgacagggacacccgaagaggaacatatggggaaaaccaccagcctcattgaatcccagcaccaccatttgcttcattgcctggagaagaccactaaccacgagtttatcgacgaacaaatgtttgaacaaaactgcatggaaagttccatgcaaaattatccaagtacccggtccccttcactgtcttcccacccagggcttaccaccacttgctgcagccgtcggtcaaaaaaaacaacccacctgccaaacagtaatctgcctgctaccagactgagatccatgcaggagctttcaactatccacatccagggaagtgaacagccttcgctgaccacctcgcgcagcagtctgaacctgaaggccgacgacggactcagacctaattgtaaaacctctcagatcaccactgcaattatcagcataccaactccccctgcacttacccccgagggagagagtcgtcctccacccgcttcacccggaccaaacaccaacattccttctatagcatcgaacgtcgttaaggtctcagccctgtag

SEQ ID NO: 235774 - DNA, 1968 bp, synthetic construct
  misc_feature 1..1968: note = Description of Artificial Sequence: Synthetic coding sequence
  source 1..1968: mol_type = other DNA
atggcggctggcgtggctgcctggctccccttcgccagagccgcagcgatagggtggatgcccgtggctaactgcccgatgcctctcgctccagcggacaagaacaaacggcaggacgaactcatagtgctgaatgtctcaggaagaagatttcagacctggcgcaccaccctggagagatatcccgatacattgctcggatcgacagagaaggagttcttttttaatgaggatactaaagaatacttcttcgaccgtgaccccgaagtattccgctgcgtgctgaacttctacaggacgggcaaacttcactatcccagatatgaatgcattagtgcctacgatgacgagctcgccttctacggaattttgccggagattataggagattgctgttacgaagaatataaagacaggaagcgagagaatgccgagcggctcatggacgataatgatagcgaaaacaaccaagagtcaatgccaagcctatccttccggcaaactatgtggcgcgcatttgaaaatccccacactagcacccttgctctcgtgttttattatgtcaccgggttctttatcgcagtgagcgtgatcaccaacgtggtggaaaccgtgccgtgcggcacggtccccggtagcaaggagctcccttgcggggaacgttacagcgtggctttcttttgtctggacaccgcctgtgtcatgatcttcactgttgagtaccttctacgcctgttcgccgctccctcccgctatcggtttatccggagcgttatgtctatcattgacgtcgtggctataatgccatattacatcggcctagtcatgaccaacaatgaagatgtaagcggggcattcgtgacactgagagtattccgcgtctttagaatttttaagttcagccggcacagtcagggcttgaggattcttggatacaccttgaaatcatgtgcttccgaattaggattcttgttgttttcactgactatggccattattatatttgctaccgtgatgttttacgctgagaaaggctcctccgcctcaaaatttactagcatccccgctagcttctggtacaccatcgtgactatgactacactgggctatggggacatggtgccaaaaactatagctggtaagatctttggttcgatctgcagcttatcgggggtcctcgtgatcgccctgccagtgccggtgatcgtgtctaacttcagccgtatttatcatcagaatcagcgggctgacaagcggcgagctcaaaaaaaggctcgattggctcgtattagggttgccaaaactggctcttctaatgcttatctgcatagcaaacgaaacgggctattgaacgaggcactggaattgacggggactcctgaggaagagcacatggggaaaactacttcactaatagagagccagcatcaccatttgctacactgcctagagaagacgactgggttgagttacctcgtggatgaccccttattgtctgtacgaactagcactatcaagaaccatgagtttattgatgaacaaatgttcgaacaaaattgtatggaaagttccatgcagaattacccttccacgaggagtccctctctttccagccacccaggactgacgaccacgtgctgcagtcggcgaagtaagaaaacaacacacctacctaatagcaacctgcccgcaactcgtctccgcagcatgcaggaactgtcaaccattcacatccagggatctgaacaacctagtctaacaacaagccgcagcagtcttaacctcaaggccgacgacggactgcgcccaaattgtaagacgagccagattactactgccataataagtattcccactcctcccgcactgaccccggaaggagagtccaggccaccaccagccagccccggacccaacaccaacatcccttctatcgcgtccaacgtggtcaaggtatcagccctctag

SEQ ID NO: 235775 - DNA, 1911 bp, synthetic construct
  misc_feature 1..1911: note = Description of Artificial Sequence: Synthetic coding sequence
  source 1..1911: mol_type = other DNA
atggctgccggagtcgcagcctggcttccatttgcacgggctgctgctatcgggtggatgccagtcgccaactgtccgatgccgctagctccagcggataaaaataaacgacaggacgaactgatcgtgttaaacgtctctggccgtcggtttcagacgtggaggacgacactggagagatatcccgatactctgctcggcagcactgaaaaggaatttttcttcaatgaggataccaaggaatacttttttgaccgcgaccccgaagtattccgctgtgtcctcaacttttaccggactggaaagctgcattatccgagatatgaatgtatcagcgcctacgacgatgaactagctttctacggaatcctgcctgagataataggggactgttgctatgaggaatataaagatagaaagcgggaaaacgcagagcgactgatggacgataatgatagcgagaataaccaggagagtatgcctagcttgagttttagacagaccatgtggcgcgcttttgaaaacccccatacatcaacccttgcactggtgttttattacgtaactgggttcttcattgccgtcagcgttatcaccaacgtcgtggaaacagttccatgcggaactgtgcccggttcgaaggaattaccatgcggagagcgctattcagtcgcgtttttttgcttagatacagcgtgtgttatgatcttcactgtggaatatctcctccggcttttcgctgctccctctagataccgatttattcggtccgttatgtccattatcgacgtagtggcgatcatgccttactatatcggactggtgatgacaaataatgaagacgtgagcggcgcttttgtcacacttcgggtgttccgcgtgttccgcatcttcaagtttagtcgtcacagccaggggctgagaatcctgggctacaccttaaagagctgtgcaagtgagttgggatttctgctcttcagtttaacaatggctataatcatctttgctacagtgatgttttacgccgagaaaggcagctcggcaagtaagttcacgtcaatccccgcatcattctggtacacgatcgtaacaatgaccactctgggatacggtgacatggtccctaaaacaatcgcagggaagatcttcggcagcatctgtagcttatcaggtgttttggtcatcgcgctcccagtgcccgtgattgtgagtaactttagccgcatctatcaccagaaccagcgagctgacaagagacgcgctcagaaaaaagccaggctggctaggatcagagtcgcaaaaaccggcagttcaaacgcctatctccattcaaagcggaacgggctgctgaacgaggcactggaactgactggcactccagaagaggaacacatgggcaaaactacgtcccttatagagtctcaacaccaccaccttctgcactgtctagagaaaacaacaaaccacgagttcatcgatgagcaaatgttcgaacagaactgcatggagagttccatgcagaactatcccagcacgcggtcaccctctttgagctcccaccctggtctgacaaccacatgctgtagtcgacgatcaaagaaaacaacccatctcccgaactcaaaccttcctgcaactcgtttgcggagtatgcaggagctcagtaccattcacattcaaggctcagagcagcccagtctgaccacatcccggtcttctcttaatcttaaagctgacgatggactgcgaccaaattgcaagacctcccaaatcacaactgcaatcatatctatacctaccccaccagcgttaactcctgaaggtgagtcccgacctcccccagctagtccgggaccgaacacaaacatcccttcaatagccagtaatgtcgtgaaggtaagcgcactgtag

SEQ ID NO: 235776 - DNA, 1758 bp, synthetic construct
  misc_feature 1..1758: note = Description of Artificial Sequence: Synthetic coding sequence
  source 1..1758: mol_type = other DNA
atgggacagggtgatgagagtgagaggatcgtcatcaatgtgggcggtacaaggcaccagacttacaggtccaccctcaggaccctgcccggtaccaggctcgcctggttggcggagcccgacgctcactctcacttcgactacgacccgcgtgccgacgaattcttcttcgatcgccaccctggcgtgttcgcacacatcctaaactactaccgcaccggcaagttacattgccccgctgacgtgtgtggacccttatatgaggaggaactggcattttggggcatcgatgaaaccgatgtcgagccttgctgttggatgacctaccgtcagcaccgggacgctgaggaggccctcgactcatttggcggagctccactagataatagcgcagatgacgccgatgctgatgggcctggcgatagcggagatggggaggacgaactggaaatgacaaagcgcctggcattgagcgacagcccggacggtcgcccaggtggattttggagacgctggcagccgaggatctgggcattattcgaagatccttacagttcccgctacgcgcgatacgtagcgtttgccagtctgttctttatactggttagtatcactacattctgtttggagacccatgagagatttaacccaattgtgaacaaaaccgaaatcgagaatgtcagaaatggtacgcaggtccgctactatagagaggccgaaaccgaggcctttctgacatatattgagggtgtatgcgtcgtgtggttcacctttgaattcttgatgcgggtaattttctgtccgaacaaagtggaatttattaaaaattccctcaacattattgacttcgtggccattttgcccttctacttggaagtgggcttatccggtctttcctcaaaagccgcaaaggacgtactcggctttttacgcgttgtccggtttgtgcgcatactgcggatcttcaagctaacccgccacttcgtgggcttaagggttctcggtcataccctacgggcttccaccaacgaatttctgttgctgattatatttctcgcacttggagtgctgatcttcgccacaatgatttactacgccgaacgcattggcgcacaacccaacgatcccagcgcaagtgagcatacacatttcaagaacatcccaattggcttctggtgggcggtagtcactatgaccacgctcggctatggtgatatgtacccgcagacgtggtccgggatgcttgtaggggctttatgcgccctggctggcgtcctcacgattgccatgcccgtgccagtcatcgtcaacaattttggcatgtactacagcttggccatggccaagcagaaactaccgaaaaagaagaagaagcacatccctcgacctcctcagctggggtctcctaattattgcaagagtgttgtaaatagtccccatcactcaactcagagtgatacctgcccgttagcccaagaggaaattttggagataaaccgcgctgattcaaagctgaatggcgaggtcgcaaaggctgccttggccaacgaggattgtcctcatatcgatcaggccctgactcccgacgaaggtttaccttttacaagatctggcacgagagaacggtacgggccatgtttcttactctccactggcgagtacgcatgtcctcccggtgggggtatgagaaaagacctttgcaaggaatctccagttatcgctaagtacatgcccacagaggccgtccgcgttacgtag

SEQ ID NO: 235777 - DNA, 1536 bp, synthetic construct
  misc_feature 1..1536: note = Description of Artificial Sequence: Synthetic coding sequence
  source 1..1536: mol_type = other DNA
atgggtcagggtgatgaaagcgaacgcatcgtgattaacgtaggtggaacaaggcatcagacgtatcgctccaccctcagaacgcttccagggacacgcctggcttggcttgccgaaccggatgcccattcccactttgattatgatcccagggccgacgaattcttctttgatcgccatccaggggttttcgcccacatcttgaactattaccggaccgggaagctgcactgtcctgccgacgtctgtggcccattgtatgaggaagaactagctttctggggtattgacgagacggatgtggaaccctgttgctggatgacctataggcagcacagagatgccgaggaggctctcgatagttttgggggagcacccctggataactcggcagacgacgccgacgctgacgggcctggggattctggggacggagaagatgagctcgaaatgactaagaggctggcactttcagacagtcccgatggccgacccggtggtttctggaggaggtggcaaccccgaatctgggccttgttcgaagatccctacagtagtcgttacgccaggtacgtggctttcgcctcactgtttttcattctggtctccattaccaccttctgcctcgagacccatgagcgcttcaatcctatcgtgaataaaacagaaattgaaaatgtgcggaatggtacccaggtccgatattacagagaagccgagacagaagcattcctgacctacattgaaggggtttgtgtggtgtggttcacttttgagtttttgatgagggtaattttttgcccaaacaaggtggagttcatcaaaaactcgctgaatattattgacttcgtagctatcttgccattttatttggaggttggattgagcggcctctccagtaaagctgcaaaggacgtgttgggcttcctaagagtggtgaggttcgttagaatcctgcgcatattcaagctcacaaggcattttgtgggactaagagtgctgggacataccctgcgagcctcaactaatgaattcctgctcctgatcatcttcctggcactgggggttctgatttttgcaaccatgatatactatgctgagcgcataggagcgcagcccaatgacccatctgcctccgaacacacccactttaaaaatatcccaatcggcttctggtgggcggtggtgacaatgaccactttaggctatggagatatgtatccccagacttggtcaggcatgttggtgggggctctgtgcgcccttgcgggtgtattgactattgcgatgccggtgccagtgatcgtcaataattttggcatgtattactcactggccatggccaaacagaaactccccaaaaagaaaaagaagcacatcccaaggccaccccaactgggctcccctaactactgtaagagcgtcgtaaatagccctcatcatagcacgcagagtgacacctgtcccctcgctcaagaggagatcctcgagatcaatcgggctgggagaaagccactgcgaggcatgagcatctag

SEQ ID NO: 235778 - DNA, 1842 bp, synthetic construct
  misc_feature 1..1842: note = Description of Artificial Sequence: Synthetic coding sequence
  source 1..1842: mol_type = other DNA
atgggaaagattgaaaacaacgaaagggttattctaaacgtgggtggcacacgacacgaaacatacagatctacactgaaaactcttccgggaactcgacttgctctactggcctcttccgagcctcccggtgattgcctcaccaccgccggagacaaactacaaccctctccccctccactttctccccctccgcgtgctccccctctctctcccggaccaggaggctgtttcgagggaggagccggtaattgttctagtcgcggagggagagcatctgaccatccgggtggcggacgggaattcttctttgaccggcatccgggtgttttcgcgtacgtacttaactactatcggactggtaagctacactgtccagctgatgtctgtggccctctgttcgaggaggaactggccttctggggcattgacgaaacagacgtcgaaccctgctgttggatgacctatcgccagcaccgcgatgcagaggaggctctcgacattttcgagactccggatcttatcggaggcgacccaggcgacgatgaggaccttgcagcaaaacggttggggatagaggacgcagcgggtcttggcggtcctgatggcaaatccggcaggtggcgcagactgcaaccaagaatgtgggccctcttcgaagatccctatagcagccgtgcggctcgctttatcgctttcgcctctctgttcttcatccttgtgtccatcacaaccttttgtctggagacgcatgaggcattcaacattgtgaagaataaaactgagcctgtgatcaatggcactagtgtcgttctgcaatatgagatcgagactgatcccgctctcacctacgtagaaggtgtgtgtgtggtgtggtttaccttcgaattcttggtccgcattgtgttctcacccaataagcttgagttcatcaagaatctcctcaacatcattgatttcgtcgcgatcctgcctttctacctggaagttggtttgtctggcctttctagtaaggcggcaaaagacgttctgggattcctccgggttgtgcgattcgtacgtattctgcggatattcaagcttacccggcattttgtaggactgagagtcctgggacacactcttcgagcgtctacgaatgagttcttgctgttaattattttccttgccctcggcgtcctgattttcgcaactatgatttactacgccgagcgagttggtgcccagcctaacgacccctccgcttctgaacatactcagtttaagaatattcctatcggattctggtgggctgtagtgacgatgacaacgcttgggtacggtgatatgtatccccagacttggtccggtatgctggttggggctctgtgtgctctcgcaggcgtgttgaccatcgcaatgccggtacctgtgatcgtgaataacttcggtatgtattattccctggctatggccaagcaaaaactccccagaaagcgcaaaaagcacattcctcccgcaccacaggcctccagcccaaccttttgtaaaaccgaactgaacatggcctgtaatagtacccagtctgatacctgtctcggaaaggacaaccgcctgttggaacacaataggtccgtgctgagtggagatgactcaaccggtagcgagcccccattatcacctcctgagcgcttaccgatccgcagatcatccacacgggataagaataggagaggtgaaacttgttttttgcttacgacgggcgactacacttgcgcatccgacggcggaattcggaaagacaactgcaaggaagtcgtgatcactggctacacccaggccgaggcacgcagcctaacttag

SEQ ID NO: 235779 - DNA, 1890 bp, synthetic construct
  misc_feature 1..1890: note = Description of Artificial Sequence: Synthetic coding sequence
  source 1..1890: mol_type = other DNA
atggggaaaatagagaataacgaaagggtgattttgaacgtgggcggtacaaggcatgagacatataggtccacccttaaaacactacccggaactaggctcgcattgctggccagctcagaacccccaggcgactgccttactacagctggcgataaactgcaaccatcccctccacccctgtcgccccctcctcgtgcccctccactgagtccagggccaggcggatgcttcgagggcggagccggtaactgctctagtagagggggtcgcgcatctgaccacccgggaggtggtcgggagttttttttcgaccggcatcccggagtgttcgcctacgtgctgaactactataggacaggtaagctccattgcccagcagacgtctgtggtcccctctttgaggaggagctcgccttctggggtatcgacgaaaccgacgtcgagccatgctgctggatgacctaccgccaacaccgcgatgccgaggaagcccttgatatcttcgagactcctgacctcataggcggagacccaggcgatgatgaagacttggctgctaaaaggctgggtatcgaggatgctgcaggtctgggagggccagatgggaaaagtgggagatggagaaggctgcaacctcgtatgtgggccctttttgaggatccatactctagcagagctgctaggtttatcgccttcgcctctttattctttatcctcgtgtccatcacaaccttttgcctcgagacgcacgaagcttttaacatagtaaagaataagacagagccagtcatcaatggcaccagcgtggtgttgcagtacgagatcgaaactgatccagccttgacttatgtcgaaggtgtctgcgtggtgtggtttaccttcgagtttttagtgcgcatcgtctttagtcccaacaaactggaattcatcaagaacctgctgaacattatcgatttcgtggccatcctgccattctatttggaagttggcctgtccggcctcagctcaaaggcagctaaagacgtgctgggtttcctgagggtggttcgattcgtgaggatccttaggattttcaagctcaccagacattttgtcggattgcgagtcctggggcataccttgcgcgcttccacaaatgaattcctcctcttgattatcttcctggccttgggcgttctcatcttcgccaccatgatctactacgcagaacgtgtcggcgcacagcccaacgatccctcagcctcggaacatacccagttcaagaatatccctatcgggttctggtgggccgtggtaacaatgaccaccttaggatacggcgatatgtacccacagacctggagcggcatgctggtgggcgctttatgtgccctagccggagttctaacaatcgctatgcccgttccagtgattgtgaacaacttcggaatgtactactctctggccatggccaagcagaagctgcctagaaaacggaagaaacacattccgcctgcacctcaggcgagttctccaactttctgtaagacagagctcaatatggcctgtaactccacccaatccgatacgtgtctggggaaggacaaccgccttctggagcacaacagatctgtactaagcggcgatgacagcaccggttccgaaccccctctctctccacctgaaaggctgccaatcaggcggtcctctacaagagataagaacaggaggggtgaaacatgcttcctgctgaccacaggcgattatacatgtgcctccgacggaggcatccgaaaggtgttatataggatctaccacgggctgctaaccgccgagaaaggtacagtcgagttctcacataccaaggactacactggtaatcggctcctgcttctaaatgttccatag

SEQ ID NO: 235780 - DNA, 1677 bp, synthetic construct
  misc_feature 1..1677: note = Description of Artificial Sequence: Synthetic coding sequence
  source 1..1677: mol_type = other DNA
atgggcaagattgagaataacgagcgtgtgattttgaatgtcggcggaacaaggcacgaaacctatagatcgaccctgaaaacgctccctggtacgcgactggcactgcttgctagctcggagccacctggagattgcctgactactgccggagacaagctgcagccttctccccctcctttatctccgccaccccgagcacccccactgagtccgggacctggtggttgcttcgaggggggagctgggaattgtagctcgagaggtggccgagcttccgatcaccctggagggggaagagagtttttctttgacaggcatcccggtgttttcgcctacgtgctcaattactacaggactggtaagctccactgccccgcagatgtttgcggaccactgtttgaggaggagcttgcattttgggggatcgatgagaccgacgtggaaccttgttgttggatgacataccgccagcatcgggacgcagaagaggcacttgatatcttcgagacaccggatcttattggaggagacccgggagacgacgaggatttagctgcaaaaagactcggcatcgaggatgccgctgggctcggtggaccagacgggaagagcggtcgctggcgccgtctccagccgagaatgtgggccctgtttgaggacccatactcctccagagccgcaagatttatagctttcgcaagcctcttttttatcttagtgagcatcacaaccttctgtcttgagacccatgaagcctttaacattgtgaaaaataagacagagcctgttatcaacggcacttcagtggtgttacagtatgagatcgagacggatccagccctgacttatgtcgaaggcgtctgtgtggtttggtttactttcgaattcctcgtcaggatcgtcttttcacctaataagctggaattcatcaagaacctcttgaacattatagatttcgttgccattttacctttctacttggaggtgggcctgtccgggttatcatccaaagcagctaaagacgtgttggggttcttaagagtcgtccgattcgtgaggatcttaagaatttttaaactgacccgccactttgtggggctccgggtactcggccatacactcagagcctccaccaacgagtttctgttacttattatctttctggccctgggggtccttatcttcgcgacaatgatatactacgctgagcgcgtcggagctcaacccaacgatccatcagcttctgagcacacccagttcaagaacatcccaattggcttctggtgggccgtagtgacaatgacaaccctcggatatggggacatgtatcctcagacatggagcggtatgcttgtcggtgccctatgtgctctggccggagtgctgacgatcgctatgcccgttcccgtgattgtcaacaatttcgggatgtactactctctggcaatggcaaagcagaagttgcctaggaaaaggaagaaacacattccaccagcccctcaggcgtcctctcctaccttttgcaagaccgagcttaacatggcctgtaatagcacacagagcgatacctgtcttggaaaagataacaggcttctggagcataaccggagcgataactgcaaggaagtggtcattaccggctacactcaggcagaggcgcgatccttaacatag

SEQ ID NO: 235781 - DNA, 1842 bp, synthetic construct
  misc_feature 1..1842: note = Description of Artificial Sequence: Synthetic coding sequence
  source 1..1842: mol_type = other DNA
atggggaaaatcgaaaataatgagagggtgatcctcaacgtggggggaacaaggcatgaaacataccggtcaacgttgaaaaccctcccaggcactcggcttgccctcctggcatcaagtgagcccccaggcgattgcctgaccacggcaggggacaaattgcaacccagcccgccaccactgtcccctccccctagagctccccctctatcccccggtcccggaggttgctttgagggaggggcagggaattgtagcagccgagggggtagagcttccgaccatccaggcggaggcagggaattcttctttgacaggcaccccggtgtttttgcctatgtgctaaattactacaggacaggtaaactgcactgtcctgctgatgtctgtggcccactctttgaagaggaactggcgttttggggaatcgatgaaactgatgttgagccgtgttgttggatgacatatcgccaacatcgcgacgccgaagaggctctcgacattttcgagacaccagaccttatcgggggagatccaggcgatgatgaggacttggccgctaaacgacttggaatcgaggatgcagcaggactgggtggccctgacggtaaaagcggacgatggcgcagactacaacccaggatgtgggccctctttgaagacccctattcctctcgggcagctaggtttattgccttcgcttccttgttctttattctggtttctatcacaacgttctgcttggaaacccacgaggcctttaacatcgttaaaaataagaccgaacccgtgattaacggcacctccgtggttctccagtacgagattgaaacggatcccgctcttacttacgtggagggggtttgtgttgtgtggtttacctttgaattcctggtgcggatcgtgtttagccctaataagcttgaatttataaaaaatctgctgaacatcatagacttcgtggccattctgcccttttacctggaagtaggcttgagcggcctgagctccaaagcagctaaagacgtcctggggttcttgagagtggtgcgatttgtgcgcattttaaggatttttaagctcacacgccactttgtgggactgcgggtgctggggcatacattgcgagctagtacaaatgaattcctcttacttattattttcttagcactcggagtgcttatatttgcgaccatgatatattacgcggaacgggtaggcgctcaacccaacgatccttcggcttccgaacacactcagtttaaaaatattcctataggtttttggtgggccgtggtcaccatgactacacttggatacggagatatgtacccgcagacctggagcggaatgctggttggggcattgtgtgcattggctggagtcctcaccattgccatgcctgtccctgtgatcgtgaataacttcgggatgtattattctctggctatggccaaacagaagctgccccgaaagcggaaaaaacacataccacctgcaccacaagcttcatctcccacgttttgcaaaactgaattgaatatggcctgcaacagcacacagagcgacacctgccttggcaaagataatcggcttctggaacacaaccgttcagtgttgtctggcgatgactctacaggctctgagcccccactgtctcctcctgagagactgcccataagaagatcctctacccgagataaaaaccgcaggggcgaaacttgcttcttgttaacaaccggagattacacatgcgcctcggatggaggaattcgaaaggacaactgtaaggaggtggtcatcacgggatacactcaggctgaagccaggagtctcacttag

SEQ ID NO: 235782 - DNA, 1917 bp, synthetic construct
  misc_feature 1..1917: note = Description of Artificial Sequence: Synthetic coding sequence
  source 1..1917: mol_type = other DNA
atgggtaagatcgaaaacaacgaacgggtgatcttgaacgtcggagggacccggcacgagacatatcgctcaacacttaaaaccctgcctggtacacgcctggctctgctcgcttcttccgaacctcctggggattgcttgaccacagctggcgacaagctgcagccgagcccacctcctttgtccccaccccctagggcacccccactgagtcccggacctggtgggtgcttcgaagggggtgccggtaattgctcttctcgagggggaagggccagcgatcatcctggcggaggcagagagttctttttcgacaggcatccgggagtgtttgcctacgtgttgaattattatagaacagggaagctgcattgtcctgcggatgtttgtggtcccttgtttgaagaggagctggctttttggggtatcgatgaaaccgatgttgagccctgttgctggatgacttaccggcaacatcgggatgctgaagaagctttagatatcttcgagactcccgacctaattgggggtgaccctggagatgacgaagaccttgctgccaagcggctgggcatcgaggatgccgcagggctcggtggacctgacgggaagtctggccgatggagacgcttgcagccgagaatgtgggccctcttcgaagatccatactcctctagggccgctcgctttatcgccttcgcctcgctgttcttcatcctcgtctcaattacaaccttctgcctggagacccacgaggcctttaacattgtgaagaacaagactgaacctgtgatcaatgggaccagcgttgtgctacagtacgaaattgaaacagaccctgctctgacgtacgtggagggggtctgcgtcgtctggttcaccttcgaattcctggtgcgcatagtcttctccccgaataagctggagtttatcaagaatttgttaaacatcattgacttcgtggctatcttaccattctacctcgaagttggcttatccgggctgagcagtaaggccgctaaagatgttctcgggtttttacgcgtagtcaggtttgtcagaatcctcagaatcttcaaattaaccaggcatttcgtgggactgagggtgctcggacacacgctccgagcctccacaaacgaattccttctgcttatcatcttcctcgcattaggcgttctaatctttgccaccatgatctattacgcggagagggttggcgctcagccaaacgacccctccgcgagcgaacacactcagttcaaaaacattcctattggcttttggtgggctgtagtaaccatgactaccttgggatacggtgatatgtacccccaaacctggagcggtatgctggtcggcgctctatgcgctctcgcaggcgttctcacaatcgccatgccagtccctgttattgtgaacaacttcgggatgtattattctctagccatggccaagcagaaactacccagaaaacgcaagaagcatattccccctgctccacaggcttcttcacccaccttctgcaagactgagcttaatatggcttgtaattccacacaaagcgacacctgtctcggaaaagataatagattgcttgagcataataggtccgtgctttctggtgacgattcaactggcagcgagccaccactgtcaccgcctgagcgcttgcccattcggaggagcagcaccagggacaaaaatcgacggggtgagacttgtttcctgctcaccaccggagactacacatgcgcttctgacgggggaatacggaaagggtacgaaaagtcccggtcactgaacaatattgctgggctggccggaaacgccctcaggctgagccctgtcacgtcaccatataactcgccttgcccactgagaaggtctcggtcccctataccgtccatcctctag

SEQ ID NO: 235783 - DNA, 1890 bp, synthetic construct
  misc_feature 1..1890: note = Description of Artificial Sequence: Synthetic coding sequence
  source 1..1890: mol_type = other DNA
atgggcaagattgagaacaatgagcgcgtaattttgaatgttgggggaaccagacacgagacgtacaggtctactctcaaaacactccctggaacacgtctggcgctgctcgcttcaagcgaaccaccaggcgattgcctcacgaccgccggtgataagctgcaaccaagtcctcctccattgtcaccgccacctagggctccacctctgagtcccggtcctggcggatgcttcgagggcggagctggaaattgtagttcccgcggaggccgtgcttctgaccatcccggtggcggaagagagtttttcttcgaccggcaccctggggtcttcgcatatgtcctgaactattatagaacgggaaagttgcattgcccagctgacgtgtgtggcccactgtttgaggaggagttggcgttctggggcatagacgaaaccgatgtggagccatgctgttggatgacctaccggcagcatcgcgatgcggaagaggccctagacattttcgaaacaccagaccttattgggggtgacccaggtgatgacgaagatctggccgctaaaagattaggcattgaggacgctgccggtctgggcggacccgacgggaagtctggcagatggagacgattacagccacgtatgtgggcactctttgaggacccctatagcagtcgtgccgctcggtttatcgctttcgcatccctgttttttatactggtgtccatcaccacattttgtcttgagactcacgaagccttcaacatcgtcaaaaataagacggaacccgtgatcaacggcaccagcgtggtgctccagtacgagattgaaacggatcccgcacttacatacgtcgagggcgtctgcgtcgtatggttcaccttcgagttcctggtacgtatagtcttcagtccaaataagctcgagttcatcaagaacttactcaacattatcgatttcgtggcaattctccctttctatctggaggtggggctctcgggcctctcctccaaagccgcaaaagatgttctggggttcctgcgggttgtgagattcgtgaggattctgagaatcttcaagctgacacggcacttcgtgggactccgggtcctgggccacacccttagagcttcaaccaatgagttcctattgcttattatcttccttgccctgggagtgttaatttttgctaccatgatatattatgcagaacgggtcggcgcacagcccaatgacccatcagcttctgaacatacacaattcaaaaatatacctattggattctggtgggcagtggtcacaatgaccacactcggttatggtgacatgtatccccagacttggtcagggatgttggtgggagccctgtgcgccctggccggagttcttaccattgccatgccggtcccagtgatcgtaaacaattttgggatgtactatagtctcgcgatggctaagcagaagctccctagaaagcgaaaaaaacatattcccccagccccacaggccagctcacctaccttctgcaagaccgaattgaacatggcttgtaactcaacacaatctgatacctgtctgggcaaggacaaccgcctgttggagcacaatcgctctgtcctcagtggtgatgacagcactggatccgaacccccactatcccccccagagcggctgcctatcaggaggtctagcactcgagacaaaaaccgaaggggcgaaacttgtttcctcctgaccacaggcgattacacttgtgcctcggacgggggtatcagaaaggtcctgtaccgcatataccacgggttgctgaccgcagaaaagggtacagtcgagtttagtcacactaaggattataccggcaacagactgctgctgctcaacgtaccctag

SEQ ID NO: 235784 - DNA, 2187 bp, synthetic construct
  misc_feature 1..2187: note = Description of Artificial Sequence: Synthetic coding sequence
  source 1..2187: mol_type = other DNA
atgctcagcagtgtgtgcgtctccagctttcgagggcgtcagggggctagcaaacaacagcctgcgcctcctccacagcctcccgaaagccctccaccacctccccttccccctcaacagcaacagccggcacaaccaggccctgcagcctcaccggctggaccccctgcacccaggggtccaggagacaggcgggcagagccgtgtcccggactgcccgctgctgccatgggcagacacggcggaggaggaggtgatagtgggaagatcgtcatcaacgtgggcggtgtccgccatgagacctataggtccactctcagaaccctccccggtacaaggttggccggtctgacggagcctgaggcagcagccaggttcgattacgatccaggggcagatgagttcttttttgatcgccatcctggtgtgtttgcctacgtgctgaactactatcgcaccgggaagctacactgtcctgccgacgtctgtggcccactcttcgaagaggagctgggcttttgggggattgatgagacggatgtcgaagcctgctgctggatgacctatcgccaacacagagacgcagaagaggcgttggacagctttgaggcccctgatcctgccggagccgctaacgccgctaacgcggctggcgctcacgatggaggactcgatgacgaggctggagctggagggggagggcttgatggtgctgggggagaattaaagagactgtgtttccaggatgccggtggcggtgcagggggacctcctggtggagccggtggggcaggtggcacatggtggaggcgttggcagccacgagtctgggcactgttcgaagacccatactcctcacgtgcggcacgctacgtggcctttgccagcctgttcttcatcctaatctccatcaccaccttctgtcttgaaacccatgaggggttcatccacatctctaacaaaacagttacccaagcgtcgcccatccccggagctccccctgagaatataactaacgtggaggttgagaccgagcccttcctcacctacgtggagggcgtgtgcgtggtgtggttcactttcgagttcctcatgagaattactttttgtccagataaggtggagttcctgaagagcagtttaaacatcatcgactgcgtagcaatcctccccttctacctcgaggtggggctatctggactttcaagcaaggcggcaaaagatgtcctgggttttttaagggtcgtgagatttgtcaggattctgcgaatttttaagttgaccagacacttcgtgggcctgagggtccttggccatacgctccgagcctcaaccaacgagttcttgctgctcattatcttcctcgctctgggggttttgatcttcgctacaatgatctactatgcagaacgaataggagcagatcccgatgatattctgggctccaaccacacgtactttaagaacattccaatcggattctggtgggccgtggtcactatgaccactctcgggtacggggacatgtacccaaaaacatggtctggcatgctcgtgggcgctctgtgcgctctggctggtgtcctgacaatcgcaatgcccgttcccgtaatcgtcaacaacttcggcatgtactacagtcttgcaatggctaaacagaaactgcctaagaaaaagaataaacacattcctagaccgcctcaacccggatcccccaattattgtaagcctgacccaccgccacccccaccacctcaccctcaccacggatctgggggaatctccccgccaccaccaatcacgcctccatccatgggagttacggtcgctggcgcttaccccgcaggcccacatacgcacccgggtctgctgaggggcggtgccggtggtctcgggattatgggtctgccccctctgccggctccaggagagccctgcccgctcgcccaagaagaagtcatcgagatcaatcgagctgatcctaggcccaacggcgaccccgctgctgccgctttggcacatgaagattgtcccgctatcgaccagccagccatgtcccctgaagataagagccccatcactcctggaagcagaggcagatatagccgggacagagcatgctttctgttgaccgactacgccccaagcccagacggttctatacgtaaagcccttgtgacggcctag

SEQ ID NO: 235785 - DNA, 468 bp, synthetic construct
  misc_feature 1..468: note = Description of Artificial Sequence: Synthetic coding sequence
  source 1..468: mol_type = other DNA
atgggcatccgccagcaactgcggctgcctactcgaaccgcgcagcctctaacatcactgccctgccctaggaagacgcgggctccttcgcgcctagaagccgtggctgccatcgcaggcactgagcccgctagctcttctcctacaatgccgctgcctctaatggccccaagtgagaagctgctttccccacccgaaactagcagggattttcggtcgcctccccctcttccccctcgtttgagagagatcccccagccccagcaacatagaggtccggagcgaggggtgcctgcacctagagccccatgccatccaccttggcttagccctggtcgccctccaagatcacccgacccagccctacacccactcgctttgccttctcctctatggggcgatagtggagtgactgggaagaaggtcaagggagccggaggcggtggctgggggaagggcttcttttag

SEQ ID NO: 235786 - DNA, 1629 bp, synthetic construct
  misc_feature 1..1629: note = Description of Artificial Sequence: Synthetic coding sequence
  source 1..1629: mol_type = other DNA
atgacctacagacagcacagagacgcagaggaggccttagatagcttcgaagccccagatcctgctggcgcagccaacgctgctaacgccgctggagcacacgacgggggtctggacgacgaggcgggagccggtgggggagggcttgatggtgccggtggagaactgaagaggttatgcttccaggatgccggtggcggagcagggggaccaccaggcggagccggtggcgctggaggtacctggtggcggagatggcagccacgagtctgggcgttgtttgaagacccctatagtagcagagccgctcgatacgtggccttcgcgtctttattttttattctgatttcgattacgaccttctgcctggagactcacgagggatttatccacatcagcaacaaaaccgtcacccaggctagccctatacccggtgccccacctgagaacattactaacgtagaggtggagacagagcctttccttacatatgtagagggagtctgtgttgtctggtttaccttcgagtttttgatgagaatcaccttttgtcctgacaaggttgagttcctcaagtcctcactgaacatcattgactgcgtagccattctgccattctacctggaagtgggactctcgggattgagctcaaaggcagccaaggacgtgctgggatttcttcgtgtggtgcgattcgttcggatcctgcggattttcaaactaacgcgtcactttgtgggcttgcgggtgttgggacacactttaagggcaagcaccaacgaatttctgctgctcattattttccttgccttaggcgtgcttatatttgccactatgatctattacgctgaaagaattggggctgacccagacgacattctcggctcaaatcacacgtactttaaaaatatccctattggcttctggtgggccgttgtcactatgacaacattgggctatggtgacatgtaccctaagacttggagcgggatgttggtgggtgcactgtgcgctttagcaggcgttcttactatagcgatgcccgtacctgtgatcgttaacaacttcgggatgtactactcactggctatggcaaaacagaaattgccaaaaaagaaaaataagcacatcccaaggccaccgcaacctggatcccctaattactgcaagcccgacccaccccctcctccaccaccccatccacatcacggcagtgggggaatttccccaccacctcctattacccccccatctatgggcgttactgtggcaggtgcgtatcccgcagggcctcacacccacccgggactcttaagaggaggtgctggtggactggggatcatgggcttaccgcctctgccagctccaggtgagccttgcccactagcacaggaagaagtgatcgagatcaacagggctgaccctcggcctaacggtgatcccgctgcggcagctttggcccacgaggactgtccagccattgatcagcctgccatgagccctgaagacaagtcacccattaccccgggaagcaggggacgctatagcagagacagagcgtgcttcctcttgacagattacgcccctagcccagacggctcaatcagaaaggcgctcgtgactgcttag

SEQ ID NO: 235787 - DNA, 2274 bp, synthetic construct
  misc_feature 1..2274: note = Description of Artificial Sequence: Synthetic coding sequence
  source 1..2274: mol_type = other DNA
atgctgtcctctgtctgcgtctcgagcttccgcggacgacaaggagctagtaaacaacaaccagctccccctccacagccacccgagagccctcctcctcctccactgccccctcagcagcagcagcccgcacagccagggccagccgcttctcctgcagggccaccggctccgagaggccctggtgataggagagcggaaccatgtcctggtctgcctgcagccgcaatggggaggcatggaggcggtggtggcgacagtggtaaaattgtcatcaatgtcggaggagtcaggcacgaaacgtatagaagtaccctcagaacgctgcctgggactcgacttgcaggacttacggagccagaagctgccgcacggtttgattacgatcctggggcagatgagttctttttcgaccgacaccccggtgtcttcgcgtatgtgctgaattattacagaacaggcaagctccactgccctgcagacgtatgcggtcccttatttgaagaagaactgggcttctggggcatcgatgagacggacgtagaggcctgttgctggatgacctacaggcaacaccgggacgctgaggaagccctggatagttttgaggcacccgacccggcaggtgcggctaatgctgctaacgcagctggggctcatgatggagggctcgacgacgaagcaggagcgggtggaggtggactagacggggcaggcggtgaactgaagcggctttgcttccaagacgcgggaggtggcgcagggggaccacctggcggtgctggcggagcaggtggaacctggtggcggagatggcagcccagagtctgggccctgttcgaggatccgtattcctctcgggctgctcgctacgtagcctttgccagcctgtttttcatcctgattagcattaccactttctgcctggaaactcacgagggctttatccacatcagtaacaaaacagtcactcaagcgagcccaatccctggggcacctcctgagaatataaccaacgtggaagtagagaccgagccattcctcacatatgttgaaggggtctgcgtcgtctggttcacttttgagtttctgatgcgtatcacgttttgtcctgacaaggtcgagtttctaaaatccagccttaacatcattgattgtgttgccatacttccattctatttggaggtgggccttagtggactgtcatccaaggccgctaaagatgttctgggctttctgagagttgttagatttgtgaggatactccggatcttcaaactgacgaggcatttcgtagggctcagagtcttggggcatacgctgcgggcttcaactaacgagttcctgctgctgattatcttcctggcgcttggggtcttgatctttgctacaatgatctattatgccgaaaggattggggcagatccggacgatatcctgggctccaaccatacctacttcaaaaacatccccataggattttggtgggcagtggtgacaatgaccaccctgggatatggcgatatgtaccctaagacatggtccggcatgcttgttggggctttgtgcgctcttgccggtgtccttaccatcgctatgccagtccctgttatcgtgaacaatttcggtatgtattactcccttgctatggcgaaacagaaattgccaaagaagaaaaacaagcatataccacggcctccgcagcccggatctcccaattattgcaagcccgatcctccaccccctccgcctcctcatcctcaccatggcagcggagggatcagtccgcctcctcctatcacgcctcccagcatgggcgtcaccgtagccggtgcatacccagcaggccctcacacacatccgggattactgcgcggaggagcgggaggacttggtatcatgggcctgcccccactgcccgcacccggagaaccttgtccgctggcccaagaagaggtgatagagatcaaccgggcagatcctcggccaaatggcgatcccgctgctgccgctctggcccatgaggattgccctgccattgaccagcctgctatgtctcctgaagacaagagcccaattaccccaggctcccggggaaggtatagccgagaccgcgcatgttttctgctgaccgattacgccccttctcctgacgggagtattcgtaaagccacaggggctccacccctgcctcctcaggattggcggaagcccggacctcccagtttcttgccagacctcaacgcaaatgcagctgcatggataagcccctag

SEQ ID NO: 235788 - DNA, 1908 bp, synthetic construct
  misc_feature 1..1908: note = Description of Artificial Sequence: Synthetic coding sequence
  source 1..1908: mol_type = other DNA
atgatcagtagcgtttgcgtttcctcataccgaggtaggaaatctgggaacaagcctccttctaagacctgtttgaaggaggagatggctaaaggcgaagcttcagaaaaaatcattatcaatgtcggtgggacacgtcacgagacctataggtccactctacgcacactgcctggaactagattagcatggctggccgatcccgatgggggaggtcggcctgaaacggacggaggaggagtagggagttccggctcttccggcggtgggggatgcgagttttttttcgaccggcatcctggtgtgttcgcctacgtgctgaattactaccgaacagggaaactgcattgccccgcagacgtgtgcggcccactcttcgaagaagagcttacgttttggggaatcgacgaaaccgatgttgaaccatgctgttggatgacctacaggcagcatcgtgacgcagaggaggcactagacattttcgagtctccggatgggggaggatcgggcgcaggcccatctgatgaagccggtgatgatgaacgtgagttggcgctgcagcgcctgggcccacatgaggggggagccggtcacggagccggttcaggcggatgccggggttggcagccacgtatgtgggctctgtttgaggatccttattctagccgggcagcccgagtcgtggcattcgccagcctgtttttcatcctcgtcagcattaccactttctgcttggagactcacgaggcgtttaatatcgaccggaatgtgactgaaattctgcgggtgggtaatattacctctgtgcatttcaggcgagaggtggagaccgagcccatcttgacgtacattgagggcgtctgtgtactgtggtttacacttgagtttctggtgagaatcgtatgttgccctgacaccttagactttgtaaaaaatttactgaacataatcgactttgtggccatcctccctttctatctggaggtcggtctatcaggtctgtcgtcaaaggctgccagagacgtgctgggctttctccgggtcgtacgattcgtcagaattttgaggatcttcaaactgaccagacatttcgttggcctccgggttctgggacacacgcttcgtgccagcacaaatgagtttttgctcctgattatttttctggccctaggcgtgctgattttcgcgactatgatctactatgctgaaagaattggagccagacctagtgaccccaggggaaatgatcatacagattttaagaacattcctatcggtttttggtgggctgtcgtaaccatgacaactttgggctacggcgatatgtacccaaaaacttggagcgggatgctcgtgggcgcactctgcgcacttgcaggggtgctcaccatcgccatgcccgttcccgtgattgtaaacaacttcggaatgtattattccttagccatggcaaaacaaaagctgcccaaaaaacggaagaagcacgtccccagacccgctcagcttgagtctcctatgtactgcaaatccgaagaaactagtccaagggatagcacttgttctgacaccagcccacccgctcgagaagagggcatgatcgaaaggaagagagccgattccaagcagaacggagacgcaaatgccgttctctctgatgaggagggagctggattaacacaaccactggcttcatcccccacacctgaagaaaggcgcgcactgaggcgctctacgacaagggaccgaaataagaaggccgcagcatgcttcctactctctaccggcgattacgcttgcgctgatggatcggtgcgcaaggggactttcgtcctgcgtgatctgcccttgcagcactcccctgaggccgcatgtccgccaaccgccggtacactattcttgccacactag

SEQ ID NO: 235789 - DNA, 1881 bp, synthetic construct
  misc_feature 1..1881: note = Description of Artificial Sequence: Synthetic coding sequence
  source 1..1881: mol_type = other DNA
atgatttcatcagtgtgcgtttccagctatcgcggtaggaaaagcggaaacaaaccacccagtaagacctgcttgaaggaggaaatggccaaaggggaagcatcagagaagattattataaacgtaggcggaacgaggcatgagacctatagaagcaccctgagaacactgccaggcaccagactggcatggttagcagatcctgacggtggcggacggccagaaaccgatgggggtggtgttggctccagcggtagctctggcggaggcggttgtgagttcttcttcgatagacatcctggtgtctttgcatacgtgctcaactattaccgtacaggaaaacttcactgccccgctgacgtttgcgggcctctcttcgaggaagagctcacattttggggtatcgatgaaaccgatgtagaaccgtgctgttggatgacttatcggcagcatcgggacgctgaagaggctctagatatattcgagagtcctgatggaggcggaagtggtgccggaccgtctgatgaggccggtgatgatgaacgggaattggccctccaacgcttgggcccacacgaaggcggtgctgggcatggagccggaagtgggggatgccggggatggcagcctcgaatgtgggccctgttcgaagacccttactcctccagggctgctcgagtggtggcattcgcaagcctgttttttattttggtgagcattacaacattctgtttggagacacacgaagcgttcaacatagacaggaacgtgacggagatcctcagagtgggtaacataacatctgtgcactttcgcagggaggtggagaccgagcccatactcacttacatcgagggagtttgcgttctgtggtttacactagagtttcttgtgcgcatcgtgtgctgcccagataccctggattttgtcaagaacctgctgaacattatagattttgtggctatcctgcctttttaccttgaagtgggcttgtcaggactaagctccaaggcagccagagacgtgttggggttcctgcgtgtagtgcgattcgtgcgtattcttcgcatatttaagctgacacggcacttcgtgggcctgcgcgtcttgggccacacgcttagggcgtcaacaaacgagtttctccttctcatcattttcttagcactgggggtgcttatcttcgccacaatgatttactacgctgaacgtattggcgcacggcctagcgaccctaggggcaacgatcacacagatttcaagaatattcccattggattttggtgggctgtagtcacgatgaccactctgggctacggagacatgtacccgaaaacttggtctggaatgctggttggcgcactgtgtgccctggcaggggtgctgaccattgcgatgcccgtgccagttatcgtcaacaactttgggatgtattacagcctggctatggctaagcaaaaacttcctaagaagcgcaagaaacacgtccccaggcccgctcaactcgagagccccatgtattgtaaatctgaggagacttcgcctcgcgattctacatgttcagatacgagccctcccgctcgggaggagggaatgatcgaaaggaagagagccgatagtaaacagaacggggatgccaacgccgtgctgtctgacgaagaaggtgccggacttacacagcccctggcgagcagcccaacacctgaggaacggcgtgccctgagacggtcgaccacccgcgaccggaacaagaaggctgcagcctgttttctgctcagcacaggcgactatgcatgcgcagatgggagcgtccggaaagagacctgccaagacgctctctcttcgaactacgctcaggctgaggttcttacgcttagctag

SEQ ID NO: 235790 - DNA, 1908 bp, synthetic construct
  misc_feature 1..1908: note = Description of Artificial Sequence: Synthetic coding sequence
  source 1..1908: mol_type = other DNA
atgatcagtagtgtttgcgtgtcctcttatagagggaggaagtcaggaaacaaacccccttcaaagacatgcctgaaagaagagatggctaagggagaagcaagcgagaaaatcattatcaatgtcggagggacgcgccatgaaacttatcggagcaccctgcgaactttgcctggcacccggctcgcatggctggctgaccctgacggtggaggtcgacccgagaccgatggcggaggcgtcggtagcagtggcagctcaggtggaggcggatgcgagttcttcttcgatcggcaccccggagtcttcgcctacgtgctgaattactaccggaccgggaaactgcattgccccgcagacgtttgtgggcctttgtttgaggaagagctgactttctggggtatagacgagactgacgttgagccgtgctgttggatgacctaccgacagcacagggatgcggaggaggcactagatatcttcgaaagtcctgacggagggggatctggcgctggcccatctgacgaggcgggtgatgatgagagagagctggccctgcagcgattaggtccacatgaaggcggagctggccatggcgctgggagcggcggttgcaggggatggcagccacgtatgtgggctcttttcgaagatccttacagtagcagagctgcccgagtggtagcgttcgcctcgcttttctttattctcgtaagcatcaccaccttctgcttagaaacgcacgaggcattcaatatcgaccggaatgttacggaaatcctgagagtgggcaatatcacttccgtccatttccggagggaagttgaaacagagccaatcctcacgtacatagaaggggtttgcgtcctttggttcaccctcgaatttttagtgaggatcgtgtgctgtccagacactcttgacttcgtcaagaaccttttaaatatcatcgacttcgttgccatccttccattttatcttgaagtgggccttagcggacttagctccaaggccgctagggatgtcctggggttcctccgcgttgtcagatttgtacgcatcctgagaatcttcaaactgacccggcacttcgtgggcctaagagtactcggtcacacactccgggcatccacaaacgagtttttgttacttatcatttttttggccttaggagtcctgattttcgctacaatgatctattacgcggagcgcatcggggctcgccctagtgaccctagagggaatgatcataccgacttcaaaaacatccctatcgggttttggtgggcggttgtgaccatgaccaccctgggatacggcgacatgtacccaaagacgtggtccggcatgctggttggggcattatgcgcgcttgccggagtgttgaccatcgcaatgcctgtgcccgtcatagtaaacaatttcggcatgtactactcgctagccatggcaaaacaaaaactgccgaaaaagcgcaagaaacacgttccaagacctgcccagctggagtctcctatgtattgcaagtcggaggagacaagtccccgagacagcacttgtagcgacacatccccccctgcacgggaggagggaatgatagaaaggaagagagctgactccaagcaaaacggggatgcaaacgctgtactgtctgatgaggagggcgctgggttaacacaacctctggcctcaagtcctacccccgaggaacggagagcactaaggcgatcaactactagagatagaaataagaaggctgccgcatgtttccttttgagtaccggcgattatgcttgtgctgatggatctgtcagaaaggggacctttgtgttgcgcgaccttcctctgcagcattccccggaggcagcctgccccccaacggcaggaactctttttcttccacactag

SEQ ID NO: 235791 - DNA, 1485 bp, synthetic construct
  misc_feature 1..1485: note = Description of Artificial Sequence: Synthetic coding sequence
  source 1..1485: mol_type = other DNA
atggacggtagtggggaacgaagcctgcccgagcccggtagtcagtcatcagccgcaagtgacgacatagaaattgtggtgaacgtaggaggggtcagacaggtcctatacggtgacctgctctctcagtacccagagacccgcctcgcagagctgattaactgcttggccggtgggtacgatactatcttttctctttgcgatgattatgaccctgggaagcgagaattctattttgaccgtgatccggacgcctttaagtgtgtgattgaagtctattacttcggcgaagttcatatgaaaaagggaatctgtccaatctgcttcaaaaacgaaatggatttttggaaggtggacttaaaattccttgacgattgctgtaagtcacatctcagtgagaagagggaggaactggaggagatcgccagacgggtccagttaatattggatgatcttggagttgatgcggcagaaggacgttggaggaggtgccagaagtgtgtctggaagttcctggaaaagcctgagagctcttgccctgcccgagtggtggcagttcttagctttctcctgatcctggtgagctccgtggttatgtgtatgggcacgatcccggaattacaggtgctggacgcagagggaaaccgtgtcgagcatcctaccctggaaaatgtcgagacagcatgcatcggctggttcactctcgagtacctgctgagattgtttagcagtccaaataagcttcatttcgcgctctccttcatgaacatcgttgacgtgctggccatactgcccttctacgtttctcttaccctcacccacctgggcgctagaatgatggaactgactaacgtccagcaggccgttcaggccctcagaatcatgcgcatagcccgaatcttcaaactggccagacacagttctgggcttcaaaccctcacctatgctcttaagcggagctttaaagagttaggcctgctgctgatgtatctggcagtcggtatttttgtcttttccgcccttggctacactatggagcagtcacaccccgagacgttgttcaaatccatcccccaatccttctggtgggccatcattactatgaccaccgtggggtacggagacatttaccccaagacaacactcgggaaactgaatgcagctatttcattcctgtgtggagtgatcgcaatcgcattgcccattcacccaatcatcaacaattttgtgcggtattacaataagcagcgagtgctagaaaccgctgcgaaacacgaattggaactgatggagctgaactcttcttccggtggtgagggcaagaccggtggaagcaggagtgatttggacaacctgcctcccgaacccgctggcaaagaggcccctagctgttctagccgacttaagttgagccattccgacaccttcattccactcttgaccgaagaaaagcaccacaggactcgcctccagagctgcaagtag

SEQ ID NO: 235792 - DNA, 1542 bp, synthetic construct
  misc_feature 1..1542: note = Description of Artificial Sequence: Synthetic coding sequence
  source 1..1542: mol_type = other DNA
atgaccttgcttccaggtgacaactcagactatgattattcagcactgtcttgtacatccgacgcttcttttcacccagcgtttctcccccagcgccaggccatcaaaggtgccttttacaggagagcccaacgactacgacctcaggacgaaccacggcagggctgtcagccggaagaccgccgacgccgaatcatcatcaacgtcgggggaatcaagtactctctgccatggacaactttggacgagttccctctgacccgcctgggacagctgaaagcttgcactaacttcgacgatattctgaacgtgtgtgatgactacgatgtcacctgcaacgagttttttttcgacaggaatcccggagccttcgggacgatcctaacgtttctccgggctggcaagttaaggctcctgcgggaaatgtgtgcactatcctttcaggaggaactgctttattggggcatcgctgaggaccatttggacggatgttgtaagagaagatatctgcagaagatcgaagagttcgctgaaatggtcgagagagaggaagaagatgatgcattagattctgagggcagggactctgagggaccagcagaaggtgaagggagactcgggagatgcatgcgtaggcttcgtgatatggtggagcggccacattccggtttgcctggcaaggtgtttgcatgcctgagcgtcctgtttgtgactgtgactgcagtaaatcttagcgtgtccactctgccaagcctgcgggaagaggaggaacaaggccactgttcgcagatgtgtcataatgtgttcattgtggaaagtgtctgcgtggggtggttctcgctcgagttcctgttgcgactgattcaggcaccctctaagttcgcttttttacgatcacccttgaccctgatcgaccttgtggcaattctgccctattatatcacacttttggtcgacggagctgcagccggtcggagaaaacctggcgctggcaattcatacctggataaagttggtctggtgttgcgcgtgttgcgagccctgaggatactttacgtgatgcgcttggctcgacattcgctgggcctgcaaaccctcgggctgactgccaggcgctgcacccgggaattcggcctcttgctcctgttcctgtgcgtcgccattgctctttttgcccctcttctgtatgtgattgagaacgagatggccgactctcccgagtttacaagtattcctgcttgctactggtgggcagtgatcacgatgaccaccgttggctatggagatatggttcccagatcaacgcccggacaggtcgtggcactgagttccatcctgtccggcattctcctgatggcctttcctgttacctctatcttccacacattctctagatcttacttggagcttaagcaagagcaggagcgggtgatgttccggagggctcagttcctgattaagactaagtcccagctgagcgtgtcgcaagattcagatattctgttcggatcagcttccagcgacacacgcgataataactag

SEQ ID NO: 235793 - DNA, 828 bp, synthetic construct
  misc_feature 1..828: note = Description of Artificial Sequence: Synthetic coding sequence
  source 1..828: mol_type = other DNA
atgaccctgctgccaggtgacaacagtgattacgactactccgcactgtcctgtacttccgacgcttccttccaccctgcctttctgccccaacggcaggctatcaaaggcgctttctacaggcgcgcacaacgcttacgcccacaggatgagcccagacaggggtgtcaacccgaggataggaggcgacggatcatcatcaacgtgggtggtattaagtacagtctcccttggaccaccttggatgaattccccctgacccgcctgggccaattgaaagcctgcacaaattttgatgacatcctgaacgtctgtgacgactacgatgtgacgtgcaacgagtttttttttgatagaaatccaggggcttttggaacaattctgacgtttttacgcgctggcaaactgcgcttacttagggagatgtgcgccttgagtttccaagaggagctcctctactgggggatcgctgaggatcatttggatggctgttgcaagaggaggtacttgcagaagattgaagaatttgccgagatggtggagcgcgaggaggaggacgacgccctcgactccgaaggccgagattccgagggtccggcagagggcgagggtagattaggtagatgtatgagaagactgagagatatggtagaacgccctcactcaggactgcctggtaaggtttttgcttgcctgtccgttcttttcgtcaccgtcactgcggtgaacctcagcgtcagcacactaccctcactgagagaggaagaggagcaggtaagagctcatgctccacgcggaaatgcgcctccgcgtggcaagggtctctag

SEQ ID NO: 235794 - DNA, 543 bp, synthetic construct
  misc_feature 1..543: note = Description of Artificial Sequence: Synthetic coding sequence
  source 1..543: mol_type = other DNA
atgactctattgccaggcgataattctgactacgactactcagcgctgagctgcacctccgatgcaagcttccaccccgcttttttacctcagcgccaggccattaaaggagccttctacaggcgagcccagaggcttaggccacaggatgaaccacgtcagggttgccaacctgaggataggcgcaggagaatcattattaatgtaggcggaatcaagtacagcctgccctggactacgctggacgaatttccactgacccggctgggacagctcaaggcctgcacaaactttgatgacatcctgaatgtgtgcgatgattatgacgtgacctgcaacgaattcttttttgaccgcaacccaggcgcatttggcaccattttgacctttctgcgcgcaggaaagttgcgcctgctgagagagatgtgcgccctgagctttcaggaggaactcctttattggggaattgcagaggatcatctggatggttgctgtaagcgacgctaccttcagaaaatcgaggagttcgcggagatggtatag

SEQ ID NO: 235795 - DNA, 291 bp, synthetic construct
  misc_feature 1..291: note = Description of Artificial Sequence: Synthetic coding sequence
  source 1..291: mol_type = other DNA
atgaccctgcttccaggtgacaatagcgactatgattactctgccctatcttgtacgtctgacgcctcatttcaccctgccttcctgcctcagagacaagcaataaaaggcgctttctaccgtcgcgcacagagattacgtccacaggatgaaccccgtcagggatgccagccagaggataggaggagaaggataataattaatgtcgggggtatcaaatattcactgccctggaccacactggacgaatttccgctgaccaggctcgggcaactcaaggcatgcacttag

SEQ ID NO: 235796 - DNA, 777 bp, synthetic construct
  misc_feature 1..777: note = Description of Artificial Sequence: Synthetic coding sequence
  source 1..777: mol_type = other DNA
atgacacttctcccaggcgataactctgactatgactattcagcactctcctgcacatctgatgcctcgtttcatccggcatttctgccccaaaggcaggctatcaaaggcgcattctatcggcgagcccagcggctccgtccacaggatgagccgaggcaaggctgtcaacctgaagaccgccgaagaagaattatcattaacgtgggcggtatcaagtatagcctgccatggaccaccctggatgagtttccgttgacccgtcttggacaactgaaggcgtgtactaactttgacgacattctgaatgtatgcgatgattacgatgtgacatgtaacgaatttttcttcgatcgcaacccaggagccttcggcaccatactgacttttttgcgagcaggtaaactgagattgctgagagaaatgtgcgcactgagcttccaagaggaactcctctattggggaattgcagaggaccatctggatggttgttgcaagagacgctatttgcaaaaaattgaggagttcgctgagatggtcgagcgtgaagaggaagacgatgccctggacagtgagggccgtgacagtgaagggccagccgagggagaggggaggctgggcagatgcatgagacgcctccgcgatatggtggaacgtccacactcaggactgccaggcaaggtgtttgcctgcctttcagttctgttcgtgaccgtaaccgccgtcaatctttccgtctcaaccttgccatctctgcgggaagaggaagagcagtag

SEQ ID NO: 235797 - DNA, 147 bp, synthetic construct
  misc_feature 1..147: note = Description of Artificial Sequence: Synthetic coding sequence
  source 1..147: mol_type = other DNA
atgaccctcttgcccggagacaactctgactacgactactcagccttatcatgtacatctgacgcttcctttcacccggcatttctgccccagagacaggcaatcaaaggagctttttaccgtagggcccaaagactcagaccttag

SEQ ID NO: 235798 - DNA, 1311 bp, synthetic construct
  misc_feature 1..1311: note = Description of Artificial Sequence: Synthetic coding sequence
  source 1..1311: mol_type = other DNA
atgacttttgggcgaagcggggcagcgagcgtggtgctcaatgtgggcggagcaagatattccctgtctcgtgaattactgaaagattttccgctgcggagagtcagcaggcttcatggttgccgaagtgagagagatgttctcgaagtgtgtgacgattacgatcgcgaaagaaacgagtatttttttgacaggcacagcgaagccttcggttttattctgctgtacgtgaggggccacggtaaactgcgattcgcacccaggatgtgtgaactgagtttttacaacgagatgatatactggggcttagagggcgctcaccttgagtactgttgccagcggagactcgacgatcgtatgagcgacacctatacattttatagtgccgacgaacctggcgtcctgggccgtgacgaggcgaggccaggtggtgccgaggcagctccctcacggaggtggttggaaaggatgaggcggacatttgaggaacccacgagttccctggccgcacaaatcctggcatccgtgagcgttgtcttcgtgattgtgtccatggtggtgctgtgtgccagcacactgcccgactggaggaatgctgctgctgacaaccgtagcctcgatgacagatctcggtacagtgccggtccgggaagggaaccgagcgggataatcgaagcaatctgcataggatggtttacagccgagtgtattgtgagattcatcgtgagcaagaacaaatgcgaatttgtgaagcgcccactgaacatcatagatttgttggccataaccccgtactatataagcgtcttgatgaccgtatttactggggaaaatagtcagctccagcgggctggggtcacccttagggtgctccggatgatgaggattttttgggtcatcaagttggcaagacactttattgggttacagacattaggactaacactgaaaagatgttatcgggaaatggtgatgctgctcgtgtttatctgtgtcgctatggccatattttcggccctgagtcagctcctcgagcacggtctagacctggagactagtaacaaggatttcacctcgataccggcagcctgttggtgggtgatcatttccatgacgacagtcggatatggggatatgtacccgatcaccgtgcccggtcgcattctgggaggggtctgcgtcgtgtccggtatcgtcctcctggccttgcctattacctttatctaccactcatttgtccagtgttaccacgaattgaagtttcggagcgccagatacagcagatcccttagcactgagttccttaactag

SEQ ID NO: 235799 - DNA, 1278 bp, synthetic construct
  misc_feature 1..1278: note = Description of Artificial Sequence: Synthetic coding sequence
  source 1..1278: mol_type = other DNA
atgacattcggaaggagcggagccgcaagcgtggtattgaatgtggggggagcgagatatagcttgtcacgggaactgctgaaggattttccattaagaagagtgagtcgcttgcacggttgcaggtctgaacgggatgttctagaagtctgtgatgattacgacagggagaggaacgaatacttcttcgacagacactcagaggccttcgggttcattctgctgtacgtgagaggacacgggaaactgcgatttgcaccgaggatgtgcgaactgtcattttacaacgaaatgatttactggggactggagggcgctcacctcgagtactgctgtcagcggcgtcttgatgatcggatgagtgatacttatactttctactctgctgatgagcctggggtattgggcagggatgaagccaggcccggaggtgccgaagccgctccctcccgacgatggctcgaaaggatgaggcggacctttgaagagcccaccagttccctcgccgcacagattctggccagcgtcagcgtcgtattcgtaatcgtatccatggtggttctctgcgcgtcaacgctgccggattggagaaatgccgcagctgacaataggtctctggatgatcggagcaggatcattgaggctatctgcatcgggtggttcacagcagaatgcattgtccgatttatcgtcagcaaaaataaatgcgagttcgtcaagagaccgttgaatattatcgacttgctggcaatcaccccgtactacatttcagtcttaatgacagtgtttacaggagaaaactcccaattgcagcgggcaggtgtgacactcagggtcttgaggatgatgagaattttctgggttatcaaactggcaagacatttcatcggtctgcaaactctgggactcaccctgaagaggtgctatagagagatggtgatgctactggtcttcatctgcgtcgcaatggctatttttagtgccctgagtcaactgctggaacatggcctcgacctggagaccagcaacaaagatttcacctctatacccgcagcctgttggtgggtgattatctcaatgactactgtgggctacggtgacatgtaccctattactgtcccgggacggatactgggcggagtctgtgtggtctcaggtatcgtgctcctggcactccccattacgttcatctatcactccttcgttcaatgctaccatgagctaaaattcaggagcgccagatacagccgcagcctgtcaaccgagttcctcaattag

SEQ ID NO: 235800 - DNA, 1560 bp, synthetic construct
  misc_feature 1..1560: note = Description of Artificial Sequence: Synthetic coding sequence
  source 1..1560: mol_type = other DNA
atgcctatgccatctagggatggcggattgcatcccagacatcaccactacggctcccattctccatggtcacaactcctctcatcacctatggagacgccgagtattaaaggcctttattatcgaagggtacgcaaggtaggtgccttggatgcttccccagtcgacctgaaaaaggaaattctgattaacgtgggcggtaggcggtatctgctcccttggtccacattggacagattcccgctcagccgcctgtcgaagctacgattatgccgcagctacgaagaaatcgtgcaattgtgtgatgactacgacgaggatagtcaggagttctttttcgatcgcagccccagcgcattcggcgtaatcgtgtcttttctcgctgcaggaaagttagttttactccaggaaatgtgtgctctctccttccaggaggagctggcctactgggggatcgaagaggcccatttggagcgttgctgcctcagaaaacttttaagaaaactcgaggagctagaagaactggcaaaactgcacagggaagatgtgttgcggcagcagagggagacccgaaggcccgctagccactcatccaggtggggactttgtatgaaccggttgagagagatggtggagaatccacaatcaggactgcctggcaaggtctttgcctgtctatccatcctgttcgtggctacgactgcagtctccctttgtgtatctacaatgcccgacctgagagccgaggaagaccagggcgagtgttctaggaaatgttactatatattcatagtcgagactatttgtgtcgcctggttttctttggaattttgcctgcggttcgttcaggcccaggacaagtgtcagttctttcagggccctttgaacatcattgacatcctcgcaattagcccatattacgtatctctcgccgtgtccgaagagcctccagaggacggagaacgacctagcgggtcctcttacctggagaaggtgggcttggtgcttagggtgctacgagccctgagaatcctttatgtcatgaggttggctagacatagtctggggctgcaaaccctggggcttacagtaagacgatgcacgcgtgagttcggtctcctgctcctgttcctagccgtggctataactttgtttagcccgctggtgtacgtggcagagaaggagtctgggagagtcctggagttcaccagcattccagcttcgtactggtgggcaatcatcagcatgaccactgtgggctacggggacatggttccaaggtccgtgcctggtcagatggtggcccttagctcaatcctgtcaggaatactcatcatggcttttcccgcaaccagcatttttcacaccttcagtcacagttacttggagctgaagaaagaacaagagcagttgcaggcacggctgcgccacctgcagaacacaggacccgcatcagaatgtgaacttctggacccacatgtggcatcagaacatgagctcatgaacgacgttaacgatttaattttagaggggccagcccttcctataatgcatatgtag

SEQ ID NO: 235801 - DNA, 2970 bp, synthetic construct
  misc_feature 1..2970: note = Description of Artificial Sequence: Synthetic coding sequence
  source 1..2970: mol_type = other DNA
atgaccatggcaggcggacgacgagggctggtcgctccacagaatacatttctcgagaatatcgtcaggaggagcaatgatacgaatttcgtgttgggaaatgcacagattgtggactggccaatcgtctattccaacgatggtttttgtaaattgagcggatatcatagagcggaggtgatgcaaaaaagtagtacgtgttccttcatgtatggcgaactgaccgacaaggacaccatagagaaagttcgccagacgtttgagaactacgagatgaattctttcgaaattctcatgtataagaagaatcggaccccggtgtggttcttcgtgaagattgcgccaatcaggaacgaacaggataaggtggtgctattcctttgtactttcagcgacattaccgcgtttaaacagccaattgaggatgacagctgcaagggttgggggaagtttgccaggttgactcgggctctcacatcgtctaggggcgtactacaacagctggcaccttctgtgcaaaaaggggagaatgtgcacaaacacagtcgattggccgaggtgctgcagttggggtccgacattctccctcagtataaacaggaggcacccaaaacccctccccacataatactgcactactgtgttttcaaaacaacatgggattggatcattttgatactgacattctacactgcaatactggtgccttataatgtcagttttaagacacggcaaaacaacgtcgcctggctggtcgtcgacagcatagtcgatgtcatcttcctggtcgatatcgttctcaactttcataccactttcgtgggaccagcaggtgaggtgatctcagaccctaaactgatacgcatgaattatttgaagacgtggtttgtgatagacctcttgagctgtctgccatatgacgtgatcaacgcttttgagaatgttgatgaggtatccgctttcatgggagatcccggtaagatcgggtttgcagaccagatccctcctccactggagggcagagagtcccaagggatcagctccttattcagttctctcaaggtggttcgtttgctgaggttgggtcgagtggcacgcaagctggaccactacattgagtatggagcagctgttctagtgctcctggtgtgtgtattcggtctggccgctcattggatggcgtgtatctggtattcgatcggggattacgagattttcgacgaggacaccaagaccataaggaataatagctggttgtatcagctggccatggacattgggaccccttaccagtttaatggcagcggaagcggcaaatgggaaggtggtccctctaaaaattcagtctatatcagcagtctatatttcaccatgacttcgttgacgtctgtaggcttcggaaatatcgcccctagcaccgatatagagaaaatcttcgctgtcgctatcatgatgataggttcgctattatacgctactatattcggcaacgtgaccacaatctttcaacagatgtacgccaatactaacagataccacgagatgctaaactcagttcgcgatttcctaaaactgtatcaggtccccaaaggactttcagagagggtgatggattatatcgtgtccacttggtctatgtctcggggaatcgatacagagaaggtgctgcaaatctgtccaaaagacatgagagctgatatatgtgtccatcttaaccggaaggtgttcaaggagcatcctgcattccggttagccagtgatggctgcttacgggctctggccatggaattccagactgtacattgtgctccaggtgatttaatctatcacgccggagaatccgtggacagtctctgttttgtcgtttctggctctttggaagtcattcaggatgatgaagtggttgcaatccttggcaagggtgacgtctttggcgacgtgttctggaaagaagctactctggcacaatcctgtgccaatgtgcgcgctctgacatactgtgacttgcatgtgatcaagcgcgatgccctccagaaagtgcttgaattctacacagcgttctctcatagcttctctcggaacctcatcctgacatataacctgagaaaacgaatcgtgttccgcaagatttccgatgtgaagagggaggaggaagagaggatgaagaggaagaatgaggccccactcatcctacctcctgatcaccctgtccgcagactctttcaacgatttcggcagcagaaagaagctaggctagccgctgaacggggtgggagagaccttgatgacctggacgtcgaaaaaggaaatgtgctgaccgagcatgctagcgccaatcattctttggttaaggcctccgttgtgaccgtgagggaaagcccagcaacccctgtctcattccaggcagccagcacctcgggggttcctgaccacgccaaactccaagcaccaggctcagagtgcttgggccctaagggcggaggcggagattgtgcaaagcgaaagtcctgggctaggtttaaagacgcttgtgggaagtccgaggactggaataaagtcagcaaggccgagtccatggagacactccccgaaaggaccaaagcatctggagaagcaacactgaagaagacagatagctgcgacagcgggatcacgaaaagcgacctacgcctggataacgtaggagaggcacggtccccccaagatcggagtcctattctagctgaggttaaacacagcttctaccctatccccgaacagactctgcaggctacagtgctggaagtccgccacgagctgaaggaggatatcaaagcgttaaacgccaagatgactaatattgagaagcagctgagtgagattcttcgtatcttaacttccaggagaagttcacagtcaccacaggagctctttgagatttcccggccacagagtcctgaatctgagagagatatttttggcgcttcatag

SEQ ID NO: 235802 - DNA, 2889 bp, synthetic construct
  misc_feature 1..2889: note = Description of Artificial Sequence: Synthetic coding sequence
  source 1..2889: mol_type = other DNA
atgaccatggcaggaggcaggagggggctggtggcaccacaaaataccttcctggagaatattgtcagacgctcaaatgacactaacttcgtactgggaaatgcccaaattgttgattggcccatcgtctattccaatgacgggttttgcaaactctctggctaccatagagccgaggtgatgcagaagtctagcacatgcagcttcatgtacggggaactcactgacaaagatactatcgagaaagtacgccagacatttgagaactacgagatgaattctttcgagatacttatgtacaaaaaaaaccgtactccagtttggttctttgtgaaaatcgcacctattcggaacgaacaagacaaggttgtgcttttcctgtgcaccttttccgatataactgccttcaagcagcctatcgaagatgattcctgcaagggttggggaaagttcgcaagattaacgagagccttaacaagctctaggggcgtactgcagcagctggctcctagcgttcagaagggtgagaacgtgcacaagcattcaagactcgccgaggtccttcagctgggcagtgacattctgcctcagtacaaacaagaggctccaaagacaccccctcacattatcctacactactgcgtttttaaaacaacctgggactggattatcttaattttgaccttctatacagcaatcctggtgccgtacaacgtttccttcaaaacccgccagaacaacgttgcctggcttgttgttgattctatcgtggacgtgatctttttggtggacatcgtgctgaactttcatacgaccttcgttggtcctgccggagaagtgatcagcgatcctaagcttattagaatgaactacctcaaaacatggtttgtgattgacctactcagctgcctcccctacgacgtaatcaatgcttttgagaatgtggatgaaggcatttcctccctgttttcttctctgaaagtggtgaggttattgaggcttggcagagtagcacgcaagttggaccactatatcgagtacggcgctgcagtcctagttcttctcgtgtgtgtctttgggctagcggctcattggatggcatgcatctggtactccattggcgactacgaaatcttcgacgaagacacaaagaccattcgaaataattcatggctataccaactggcaatggacatagggaccccttatcagtttaatgggagtgggtcaggcaaatgggagggaggtcccagtaagaattccgtttatattagttccctgtacttcactatgacttcactgacctccgtcggtttcggcaatatcgccccttcaaccgatatcgagaaaatttttgccgtggctattatgatgattggatctctgttgtatgcaacaatcttcgggaatgtcacaaccatctttcagcaaatgtatgccaacacaaatcggtaccacgagatgctgaactccgtcagggattttctcaagctttatcaggtgcctaaagggttgtctgaaagagtaatggactacatcgtgtctacatggtccatgtctagagggatcgacaccgagaaagtgctgcagatctgcccgaaggacatgcgcgctgatatctgtgtacatctcaaccggaaggtattcaaagaacacccagcttttaggctagcatccgatggatgtctacgtgccctagctatggaattccagaccgtccattgtgctccaggcgacctcatatatcatgccggtgagagcgtggactcattgtgtttcgtggtctctggaagtctcgaggtgatacaagatgacgaagtagtggccatactcggcaaaggcgacgtatttggcgacgtcttttggaaagaagccacccttgctcagagctgcgctaacgtgagggctctgacttattgcgatttgcacgtgatcaaacgtgatgcattacagaaagttctagagttctacacagccttcagtcattcttttagtagaaacctaatcctcacctataacctcagaaagagaattgtttttaggaaaatcagcgacgtgaaacgagaggaggaagagcggatgaaacggaagaacgaggcccctcttatcctgccgcctgaccatccggtcaggcggctgttccagagattccggcaacagaaagaagcccgactagccgctgagaggggaggtcgcgatctggacgacctggatgtggaaaaaggaaatgtgctcactgaacacgcaagcgccaaccacagtttagtaaaagcctcggtggtcaccgttcgcgaatcccctgcgactcctgtttcattccaagctgctagcactagtggcgtcccagatcacgccaaactccaagcccctgggagcgaatgcctaggaccaaagggcggaggtggagattgcgcaaagagaaagagctgggcacgcttcaaggatgcttgtggtaagtccgaagactggaacaaggtgagcaaggccgagtcgatggaaacgctcccagagaggaccaaggcaagcggcgaagccactctgaagaagactgattcatgtgattccggaataactaagtccgatttgaggctggataatgttggggaagccaggagccctcaggaccgctcacctattcttgccgaggttaagcactcgttctacccaatacccgagcagactctgcaggctacagtcctagaggttcggcacgagctgaaggaggacatcaaggcacttaatgctaaaatgactaatattgaaaagcagctcagcgaaatattacgaattctgaccagccgtaggtcctcccagagcccccaggagctcttcgaaattagccgtccacagtcacccgagagcgaacgggacattttcggggcaagttag

SEQ ID NO: 235803 - DNA, 3480 bp, synthetic construct
  misc_feature 1..3480: note = Description of Artificial Sequence: Synthetic coding sequence
  source 1..3480: mol_type = other DNA
atgcccgtgcggagagggcacgttgcccctcagaatactttccttgacactattattcgtaagtttgaaggccagagtagaaaattcatcattgctaatgcgagagtagaaaattgcgctgtcatttactgcaacgatgggttctgcgagctgtgtgggtactcaagagctgaggtaatgcaaagaccatgcacctgtgacttcctccacgggcctagaactcagcgcagggccgctgcccaaatcgctcaggcactgttgggagcagaagagcgtaaagtagaaatcgcgttctacaggaaggatggctcttgcttcctctgcttggtggatgtggtgcctgtaaagaacgaagatggggcagttatcatgtttattctgaatttcgaagtcgtaatggaaaaagacatggtcgggtcccccgcacacgatacgaaccaccggggacctccaacgtcctggctggcccctggccgagccaaaacctttcggctgaaactgcctgctctgctcgctttgacagcaagggagagtagtgtgcggtccgggggtgccggaggggctggagctcccggtgcggtggtggtggatgtggatctgacaccagctgcaccctcttcagaaagcctggcccttgacgaggtcactgctatggataatcacgtggcaggtcttggacccgctgaagaacgccgtgctttagtggggccaggctctcccccacgatccgctcctggccagctcccatctcctcgcgctcacagcttgaacccggatgcctcaggaagctcgtgcagtttggcccgtacacgttcccgcgagagttgcgcctcagtgcgacgtgcttcctcagcagacgatatcgaggccatgcgcgctggggtcctgcctccacctcccaggcacgcctctaccggtgccatgcatcccctccggagcggcctgcttaactccaccagcgacagcgacttggtgagataccggaccatcagcaagattccacagattactctgaatttcgtggatctgaaaggtgatcccttcctggcttcaccaaccagtgatcgtgaaatcatagctcccaagattaaggaacgcacccacaacgtcacggagaaggtgacccaggtgttgtccctgggagccgatgtgctccccgagtataagctccaggcccctagaattcataggtggacaatccttcattattccccatttaaagcagtgtgggactggctgatcctgctcctggtcatttatactgccgttttcactccttacagcgcagcctttctgctgaaggagacggaggagggacccccagctactgaatgtgggtacgcatgccagccactggcagtggtcgatctaatcgtggacatcatgtttatcgtcgatatcctgataaacttccgcactacatatgtaaatgcaaatgaagaggtagtgtcccacccaggaaggatcgcagttcattactttaaaggatggtttctaattgatatggtagccgctatacctttcgacttgctgatcttcggtagtggtagcgaagaattgatcggcctcctcaaaaccgctcgactgctgaggttggtgcgcgtggcccgtaagctggaccgttacagcgaatacggcgctgctgtactcttcctgcttatgtgtacattcgcattgatcgcccattggctggcctgtatatggtacgctatcggcaatatggagcagcctcacatggattcccgcattggatggttacacaatcttggcgatcagataggaaaaccatacaattccagtgggctgggcggacccagtatcaaggacaagtacgtcaccgcgctgtactttactttttcaagtctcacctcagtggggttcggcaatgtgtccccgaataccaacagcgagaaaatttttagcatatgtgtcatgctcattggcagtcttatgtatgcttctattttcgggaacgtgagtgctataatccagaggctgtactccggcacagccaggtatcacacgcaaatgctccgagtgagggagttcattagatttcatcaaattccgaacccacttcgtcaacgacttgaggagtactttcagcacgcttggtcatacactaacggaatagatatgaacgccgtgcttaagggctttcccgagtgcctgcaggccgacatctgtttgcacctgaatcgtagcctgcttcagcactgtaagccatttcgaggcgctaccaaggggtgcttaagggctctcgccatgaaattcaaaaccactcatgcgccacccggtgacaccttggtgcacgccggtgatctgttaacggcactttactttattagccgcggatcgattgagatcctgaggggggatgttgtggttgccattctcggaaaaaacgacatttttggcgaacccttaaacttgtatgcacggccagggaagtctaacggcgatgtcagagccttgacatattgtgatctccataagatccacagagatgaccttctggaagtgttggacatgtatccagagttcagtgaccatttttggagctccttggagattacatttaacctgcgtgacaccaacatgatccctggcagccccggatctacggagctggaggggggtttcagccgccagcgaaagcgcaagctaagctttcggagaaggaccgataaagataccgaacagcccggagaagtgtctgctttgggtcctggaagggcaggtgctggccctagcagtagagggagaccaggaggaccgtggggtgaatcacccagctcagggccttcctcaccggaaagctctgaggacgagggaccaggaaggagtagttcccccttgcggcttgtgccattctccagtccacggcctccaggagaaccccctggaggagagcctctcatggaggattgcgagaaatcttcagacacctgtaacccactctcaggagcattttcaggtgtgtccaatatcttctcattttggggcgactcgaggggacgccaataccaggaactgccaagatgccctgccccaacaccatcactgctcaatattcccctctcttcacccggtcgtcggccaaggggcgacgttgagagccgcctcgatgcactccagagacaactgaatcgcctggaaacaagactgtctgccgacatggcgaccgtgctccagctccttcagagacagatgacactggtgccgccagcctacagcgctgtgaccacgcccggacctggccctacaagcacatcccctctactgcctgtaagtccactgccaacgttgacactagattctcttagtcaggtgtctcagttcatggcttgtgaggagcttccacctggcgctcctgaactgcctcaagagggccctactcggagactgtctctaccaggacaactgggtgcccttactagccagcctctacatcgccatggctctgatcctgggtcatag

SEQ ID NO: 235804 - DNA, 2460 bp, synthetic construct
  misc_feature 1..2460: note = Description of Artificial Sequence: Synthetic coding sequence
  source 1..2460: mol_type = other DNA
atggctgctcctgctgggaaggcatcacgaaccggggctctccgacccagagcacagaaaggccgagttaggcgggcagtgagaatctcttccctagtggctcaagaggtgttatctcttggggctgacgtgttgccagaatacaagctccaagccccacgtattcacagatggaccatcttacactactcaccatttaaagccgtatgggactggttaatcttgcttctggtgatctacaccgcagtgtttacaccctattctgctgcttttctgctaaaggagactgaagaaggcccaccggctaccgaatgcggctacgcttgccagcccttggcagtcgtcgatttgattgtggatatcatgtttattgtggacattctgatcaacttccgtacaacttacgtgaatgcgaacgaggaagtcgtaagtcacccaggcagaattgcagtgcattatttcaaagggtggttcttgatcgacatggttgctgctattccctttgatctgctcatcttcggaagtggctcagaagaactaatcggactgctcaaaactgccagactactacgcctggttcgggttgcgagaaagttagatcgctattctgaatacggagccgctgtgctctttttgttaatgtgtacattcgcactgatagcacactggctcgcctgtatttggtacgccattggcaatatggagcagcctcacatggattcgaggatcgggtggctgcacaatctgggcgatcagatcggtaaaccctacaattcttctgggctgggcggaccttccattaaagacaagtacgttactgcgttgtacttcaccttctcaagtctcacatctgtgggctttgggaacgtctctcctaacacaaattctgaaaagattttcagcatctgcgtgatgctgatcggcagtctcatgtatgcctcaatcttcggaaatgtgagcgccattatccagcgcctgtacagcggtacagcgcgttatcatacccagatgttacgtgttcgcgagttcatcaggtttcatcaaattccaaatccattgagacagcggctggaggaatactttcagcacgcttggagctatacaaacgggattgatatgaatgccgtactgaagggcttccctgaatgcctgcaagctgatatctgccttcacttgaaccgcagtctgttgcagcattgtaaaccatttaggggagccactaaggggtgtctgcgcgcacttgctatgaagttcaagactacacacgcccctcctggggatactttagtacatgcaggcgacctgttgaccgccttatatttcatctcacggggaagcatagagatccttcgcggagatgtagttgtggctatcctcggcaagaacgacattttcggggaaccattaaacctctacgctcggccaggcaaatcgaatggggatgtgcgcgcactgacttactgtgacttgcataagatccatcgggacgacttgctcgaggtgctggacatgtacccagaatttagcgaccacttctggtcaagcttggaaatcactttcaatttgcgggatacaaatatgatcccgggttccccaggatcgacggagctcgaggggggattttcgcgacaaagaaaaagaaagttatcattccgccgacgaaccgacaaggatactgagcagccgggagaggtgtctgcactggggccaggcagagcgggagccggaccgagtagtaggggcagaccgggaggcccatggggggaatcgccatccagtgggccttccagtccagagtcatcagaagatgagggccctgggaggtccagttctcctttgcgtctggtccctttcagctctccgcgacccccaggtgaacccccaggcggagaacccctcatggaggattgtgagaagtcctccgacacatgtaaccctctaagcggcgcattttccggcgtgagcaacatcttctctttttggggcgacagtcggggacggcagtaccaggaactgcccaggtgtccggctcccaccccctcccttctgaatataccactgagcagtccagggaggagacctcgcggagacgtggaatctaggctggacgccctgcagcggcagcttaatcgcctggagactaggctctctgctgacatggccactgtgctgcagctcctccagcgacaaatgactttggtgcccccagcttacagtgcggtgacaacgccaggaccaggtccaactagtacatcccctcttctgcctgtctccccactgcccacccttactttggatagtctttctcaggtaagccagtttatggcctgtgaggaactcccccctggtgcccctgagctgcctcaggaagggcctacccggaggctttccctgcctggccagcttggagccctgacctcccagcctctgcataggcacggttccgaccctggatcctag

SEQ ID NO: 235805 - DNA, 1182 bp, synthetic construct
  misc_feature 1..1182: note = Description of Artificial Sequence: Synthetic coding sequence
  source 1..1182: mol_type = other DNA
atggccgcaccggctggaaaagcaagccggactggcgcactgcgacccagggctcagaaggggcgagtccggagagctgtgaggatttcaagcctggtcgcccaagaagtactgtcccttggagctgatgtcttacccgagtacaagcttcaagctccaaggatccacaggtggactatattacattactcaccattcaaggccgtgtgggactggcttatactgctgctagtgatctacaccgcagtcttcacaccttattcagccgctttcctgctgaaagaaactgaggagggccctccagctacagagtgcggatacgcgtgtcagcctctggccgtcgtggatttgattgtggatatcatgttcattgtggacatacttatcaatttcagaacgacctacgtaaatgccaacgaagaggtggtttcccaccctgggagaatcgcagtgcactactttaaaggttggtttctgatagacatggtggccgctattccttttgaccttctgatttttggaagtggatctgaagagctgatcggactcctgaagactgccagacttctacgactggtgcgcgtggctcgcaaactggatcggtacagtgaatacggagccgcagtcctttttctgctaatgtgtacttttgccctcatcgcccactggctcgcctgtatttggtacgcgatcggcaacatggagcagccccacatggattcaaggatcggatggctgcacaacttgggagaccagatcgggaagccatataatagctccggccttggtgggccttctataaaggataaatacgttacagctctgtactttactttttcctccctgacctctgttgggttcggaaacgtcagtccgaatacaaactctgagaaaatcttttccatctgtgtgatgctcataggaagtctcatgtatgcgagcatttttgggaacgtgagcgctattatccaaagactgtattccgggaccgccaggtaccatactcagatgttacgggtcagagagttcatccggttccaccagatccctaaccctctgaggcagtgctgcgaccatcccggagcttggccgcacttccacataccagccgtggccagacaaccgccaccacacccccacctcggcctggccttttccggtttccctgttcacggagtttag

SEQ ID NO: 235806 - DNA, 3192 bp, synthetic construct
  misc_feature 1..3192: note = Description of Artificial Sequence: Synthetic coding sequence
  source 1..3192: mol_type = other DNA
atgtcttcccacagcgccggtagttgttttttatgcctggtagacgtggtccctgtcaagaacgaggacggggctgttatcatgttcatcttgaacttcgaggtcgttatggagaaggacatggtcgggagtccagctcatgatacaaatcatcgtggtccacccacttcttggctagcccctggacgcgcaaagaccttcaggctgaagttgcccgctctcttggccctgactgctcgtgagagcagcgtccgctccggtggggcaggaggcgcaggagcacccggagctgttgttgtggatgtcgatttgactcccgcagctcctagctcggaaagcttagccttagatgaggttacagcaatggacaaccacgttgccggactcggacctgctgaggagaggagggctctggtggggcctggtagcccaccacggagtgctcccggtcagctgccttccccccgtgcccactcactcaacccagatgccagtggaagctcctgctctctggccagaacgcggagtcgcgagtcctgcgcttccgtgcgccgtgcaagcagcgcagacgacattgaagcaatgcgagctggcgtgctcccacctccccctcgccacgccagtacaggggcaatgcatccactgcgcagcggactgctgaactctacctcagacagcgatttggtcaggtaccgtacaatctccaaaataccccaaatcaccctcaactttgttgacctcaaaggcgacccatttttggcctcaccaacatcagatagggagattattgccccaaagattaaggagaggacacacaacgtcactgaaaaggtaacacaggttctgtcactgggagctgacgtcctgccagaatataagttacaggcaccgaggatccaccgttggaccatactccactatagccctttcaaggctgtgtgggactggttaattctattgctggtgatatatacagcagtgttcaccccttactctgccgctttccttcttaaggaaaccgaagagggaccccctgctactgaatgcggctatgcatgccagcccctcgcagttgtcgatctcattgtcgatatcatgtttatcgtcgacatcctgattaactttcgaacgacctacgtcaatgcaaacgaagaggtcgtatctcaccctggacgcattgccgtgcactacttcaagggttggtttctgattgacatggttgctgcaatcccctttgatctcctgattttcggctccgggagtgaggaactgattggcctcctgaaaacagctcgtctgttgcgtctggttagggtagcgcgaaaactggataggtatagtgagtacggagctgcagtactcttcctgctgatgtgcaccttcgcattgatcgctcattggctagcatgcatttggtacgccatcgggaatatggagcagcctcatatggactcacgaattggctggcttcataatctaggtgaccagatcgggaaaccctataatagttccggcctgggagggccaagcattaaggataaatacgtgacagccctatattttacatttagctctctcacttctgtgggtttcggtaacgtgtcacccaatacaaactcagagaagatttttagcatctgtgtgatgctgattggttctctgatgtatgcctctatttttggtaacgtttctgccatcatccagcggttgtattcagggaccgccagataccatacacaaatgctgcgcgtgcgagagtttattcgcttccatcagatccccaaccctttaaggcagcgcctggaggagtactttcagcacgcctggtcctacacaaatgggatcgacatgaatgctgtgctcaaaggcttcccagagtgcttgcaggccgacatttgcttacacctgaacagatcactcttacagcactgcaagccctttcggggagcaactaagggatgcctgcgagctttggcaatgaaattcaagacaacccacgccccacccggagacaccctagttcatgctggcgatctcttaaccgccttatatttcattagccgcggatctatcgagatcctccgtggtgacgttgtggtggccattctcggcaagaacgatatttttggggaacccctcaacttgtatgcccgtccaggcaagtccaatggcgacgttagagcactgacctactgcgacttgcacaaaattcaccgtgatgacctgctggaggtgctggatatgtaccccgaattcagcgatcacttttggtcttcactcgagatcacatttaatcttagggacacgaacatgatcccagggtctcctggatccacggagctcgaggggggtttcagtaggcagaggaaaaggaaactgtctttccgcaggaggaccgacaaagacaccgaacagcctggggaagtgtccgcactcggacccggaagggctggcgcagggccttcctcaaggggacggccaggcggaccatggggggaatctccgtcatcgggcccatctagtcctgagtcatccgaggatgagggccctggccgatcttcctctccgctgcgcttggtcccgttctcttctccgagacctcctggcgaaccaccagggggagagcccttgatggaagattgcgagaaatcaagtgatacgtgcaatcccctgtcaggagcctttagcggcgtgtctaatattttctctttttggggggatagccgcggtcggcaataccaggagctgccacgttgtcccgcacctacaccatcattgctcaacataccactttcttcacccggacgcaggcccagaggtgacgtggagtccaggctcgatgccctccagcgccagctgaaccggttagagacacgcttgagcgccgacatggctacagtgcttcagttgctccagaggcagatgactcttgtgccgccagcatactccgctgtcaccacaccaggacctggcccaaccagtacttcacctctgcttccagtgagtccacttccaactctcactctcgactccctctcgcaggtgagccagtttatggcctgtgaagagctgcctcccggtgctcccgagttgccccaggagggacccacgcggcgactcagcctgcccggtcagctgggcgctctcacaagtcagccgctgcaccggcatggctctgatcctggttcatag

SEQ ID NO: 235807 - DNA, 2667 bp, synthetic construct
  misc_feature 1..2667: note = Description of Artificial Sequence: Synthetic coding sequence
  source 1..2667: mol_type = other DNA
atgccagttagacggggtcacgttgctcctcaaaacaccttcttggacaccatcatcaggaaattcgagggtcagtctcgcaagtttattatcgccaatgctagggtggaaaattgcgctgtaatctattgcaacgacggtttttgcgaactgtgcggatatagtcgggctgaggtgatgcagagaccgtgtacctgcgactttttgcacggaccaaggacacagaggcgcgcagctgcacagatcgcgcaggcactcttgggagcagaggagagaaaggtggagattgccttctataggaaggacggcagttgtttcctgtgtttggtcgatgtggtgcctgtgaagaacgaggatggagccgtaatcatgttcatcttgaacttcgaagtggttatggagaaggacatggtgggaagtccagctcacgatactaaccatcgcggacccccaacttcctggctcgccccagggcgagccaagacctttcgactcaagctgcccgcactgctcgctctcacggctcgggagtcttcagtgcgaagcgggggtgcgggaggggcaggcgcaccaggcgcagtggtggtggatgtagatctgactcctgctgcgccttcttccgagagcctcgctctagacgaggtgaccgccatggacaaccacgtcgctggcctgggccctgccgaggagcgcagagctctggtgggccctggatccccccctcggtccgctcctggacagcttcctagcccccgagcccactcactcaacccggatgctagcggatccagctgctcgctcgctcgcacgcgttctagagaatcatgcgcttccgtgcgcagggcatccagcgcagacgatatcgaggccatgagggccggagtgcttccccctccccctaggcacgcatccacgggcgcaatgcatcccctccggagcggactgctgaacagcacgtccgacagcgacctcgtgagatacagaactatctcaaagatcccccagatcactctgaacttcgtggacttgaagggcgatcccttcctggcctcccccaccagcgatagagagataattgccccaaaaattaaagagagaacccataatgtcacggagaaggttacccaggtactatcacttggagcagacgtactgcccgaatacaaactacaggcacctcgtatccatagatggaccatcctgcattattctccttttaaagccgtctgggactggctgatcttactcctggtaatctatactgctgtattcactccttacagtgctgcattcctgctcaaggaaacagaggagggcccacccgcaacagagtgtggttacgcatgccagccactcgccgtcgtggaccttatcgtggatattatgttcattgtcgacatactcattaatttccggactacatatgtgaacgcaaatgaggaagtggtttcgcaccctggcagaattgcagtgcactattttaaaggctggttcctcatcgacatggttgctgcgatcccttttgacctactcatcttcgggtcaggttcagaggagctcatcgggcttctcaaaacggcccgactactcagactggttagggtcgccaggaaattggaccggtatagcgaatatggcgctgcggtgctcttcttgctgatgtgcactttcgcactcatcgctcactggctggcctgcatctggtacgctatcggcaacatggaacagcctcacatggactctaggataggctggctccacaatcttggagaccagatcggcaagccttacaatagctctggtctgggcggtccttctatcaaagacaaatatgtgaccgctctttatttcaccttttcttccctcacttcagtggggttcggcaatgtgtccccaaatactaattctgagaaaatatttagcatctgcgtaatgctcatcggtagcttaatgtatgccagcatattcggaaatgtgtcagctattatccagagattatatagcggaacagctcgataccacactcagatgctgcgagtgcgcgagtttatccggttccatcagattccaaatccgctgcgccagagactcgaggaatactttcagcatgcctggagttatacaaacgggatagatatgaacgcagttctgaagggattccccgagtgtctccaggcagatatttgtttgcacctgaacaggtccctgttgcaacactgcaaaccatttcggggagccacaaaaggatgtctgcgcgctctggccatgaagttcaagaccactcacgccccacccggagacactctggtgcatgctggagacctgcttacagccctgtacttcatctctaggggaagtatcgagatattgagaggcgatgtggtcgtcgccatcttagggatgggctggggagctggcaccggtctggaaatgccttccgctgcaagtcgaggagcaagcctattaaatatgcaaagccttggcctttggacttgggattgtctgcagggccactgggcacctctcattcatctaaatagcggccctcccagcggagctatggagcggagcccgacctggggggaagcagccgagctgtggggtagccatatcctgctgccttttcgcatacgtcacaagcagaccctttttgcctccctgaagtag

SEQ ID NO: 235808 - DNA, 3252 bp, synthetic construct
  misc_feature 1..3252: note = Description of Artificial Sequence: Synthetic coding sequence
  source 1..3252: mol_type = other DNA
atgcctgccatgcgcggtctgcttgccccacaaaacactttcttggacactatagccacaagattcgatggaacacacagcaattttgtgctaggcaacgcacaggtcgccggactctttcccgtagtctattgctctgacggcttttgtgatttgactggattttctcgcgctgaggtgatgcagcgtggctgcgcctgctcctttctctacggcccagatacttctgaattggtgcggcagcagatccggaaggcactggatgaacataaggaattcaaggccgagctcatcctctatcggaaatctggattacctttctggtgcttgcttgacgttatccccatcaaaaacgaaaagggcgaagtggcactttttctcgttagccacaaggatatctccgagaccaaaaatagaggtgggcctgatcgctggaaagagacagggggtggcaggaggagatacggacgcgctcgttccaaaggtttcaacgcaaatcggagacgtagtagggccgtcctgtatcacctttctggacatttacagaagcaaccaaagggcaaacataaactgaataagggggtcttcggtgaaaaaccgaaccttcctgaatacaaagtcgctgctatccggaagtccccttttatccttctgcactgtggcgctttgcgcgctacttgggatggttttatcttgctggccaccctttatgtggctgtgacagtgccctattctgtgtgcgtgtccactgcccgtgagccctccgctgcaagaggacccccatctgtctgcgacctggctgtcgaggtgctgtttatacttgacattgtgttgaatttcagaacaacatttgtgtctaaaagtggtcaggtcgtgtttgccccaaagtcaatatgccttcactacgtgaccacatggttccttctggacgttatcgcggctctgcctttcgatcttcttcatgctttcaaggttaacgtgtattttggagcacatctcctgaagaccgtgcgcctgctccgactattgagattactgccgaggctcgacaggtactctcagtactccgccgtggttctgacgctgttaatggcggtatttgcactgcttgctcattgggtggcctgtgtatggttttatattgggcagcgcgaaattgagtccagtgaatcagagctcccagagattgggtggctgcaggaattggctagacgtcttgagaccccctactaccttgtggggcgtcgacctgccggaggaaactcctcaggccagtcagacaactgctcttcatcatctgaggccaacggcactgggctagaactgttgggtggcccttccctccggtccgcctacatcactagtctgtacttcgctctcagctcactcacctcggtgggctttggcaatgtttctgctaacactgataccgagaagatattcagtatatgcaccatgcttattggagcacttatgcatgctgtcgtttttgggaacgtgaccgcaatcatacagagaatgtacgctagacgcttcctctaccacagcaggacacgggatttaagggactatattcgaatacatagaatcccaaaaccacttaaacagcgcatgctagagtacttccaggccacgtgggcggtgaataacggtatcgacaccacagagctgctgcagtccctgcctgatgaactcagagccgacatcgctatgcaccttcataaggaggtactccagctgcctctgtttgaagcagcatctcgtggctgcttgagagctctcagtttggccctgaggccagccttctgtactccgggtgagtatctgatccaccagggggacgccttacaggcactctattttgtgtgttctggatccatggaagttcttaagggaggcacagttctggctatcctggggaagggggacctgattggatgcgagcttccacgcagagagcaggttgtgaaggcaaacgcagatgtcaaaggtctcacttattgtgtgcttcagtgtctgcaactggcaggacttcacgactctctagcgctgtacccagagttcgctccacggtttagtcggggtttgcgcggagagttgagctacaatctgggtgcaggcggaggctcagctgaggttgacacaagctctctatctggggataacacgctcatgtcaactcttgaagaaaaggagacagatggggaacagggaccaaccgtgtcacccgcaccagcagatgaacctagttctccattgctgtctcccggttgcacatcttctagctccgcagccaagctactttctcctcgcaggacagctccccgacccagactgggagggagaggtcggccaggccgagccggagccctgaaggctgaagcaggcccatctgcccctccaagggcactcgagggcctgcgcctgccacctatgccatggaatgtaccaccagatctctctccacgggtggttgacgggattgaggatggctgcggaagcgaccagccgaaattctccttcagagtcggtcagagtggacctgaatgctctagctcccctagccccggacctgaaagcgggcttctcacggtcccgcatgggccaagcgaggcgcgtaacacagatacactcgacaaactgcgccaggccgtgaccgagctttcagagcaagttctacagatgagggagggcctgcagagcctgaggcaggcggtgcagcttgttctagctccacacagggaggggccttgtccaagggcatctggggaaggcccatgccccgcttccacctctggtcttctccagcctctttgcgtggatacaggtgcgtcgtcctattgtttgcagcccccagccggtagcgtgctctctggaacttggccccaccccagaccaggcccacctcctctgatggccccatggccttggggaccaccagccagtcagagcagtccctggcctcgagccactgccttttggacctcaacctccgacagcgagccccctgcaagcggggatctctgctctgaaccctctactcctgcctctcccccaccttctgaagagggagcccgaaccggacctgccgaaccggtgtcccaggccgaggctaccagcacaggcgaaccccctcccggaagtggcggtttagcgctgccctgggacccacactccttggagatggtcctcattggctgccacgggtctggaaccgtgcagtggacccaggaagaaggcaccggggtatag

SEQ ID NO: 235809 - DNA, 2967 bp, synthetic construct
  misc_feature 1..2967: note = Description of Artificial Sequence: Synthetic coding sequence
  source 1..2967: mol_type = other DNA
atgccagggggtaagcgcggtttggttgcacctcagaacacattcctggaaaatatcgtcagaagaagctctgagagctcctttctgctgggaaacgcacagatcgtggactggcccgtggtctattccaacgacgggttttgcaaactgtccggctaccaccgcgctgacgtgatgcagaaatcgtccacttgttcgttcatgtatggcgagctgacagataaaaaaacaatcgaaaaggtgaggcagacttttgataactatgaatctaactgctttgaggttctgctctacaagaaaaatcgcacccctgtgtggttctacatgcagatcgccccaatccgaaacgagcatgagaaggtggtcctcttcctctgcacctttaaggacatcacactgttcaaacagccaatcgaagatgactccaccaaaggctggaccaagttcgcgcgtttaacacgggcactcacaaattctaggagcgtattacagcagctgactcccatgaataaaaccgaagttgttcacaaacacagcagactagccgaggtgctgcagctgggtagcgacatcctccctcaatacaagcaggaagccccaaaaacccctcctcacatcatccttcactactgtgctttcaagacaacctgggactgggtcatcctcatcttgaccttctacactgccatcatggtgccttacaacgtcagcttcaaaacaaaacaaaataacatcgcttggttagtgcttgattctgtggtcgacgtgattttcctggtggatattgttttgaactttcatacaacattcgtgggtccaggaggtgaagtcatttccgatccaaagttaatccggatgaattaccttaaaacatggtttgtcattgatttgttgtcatgcttaccctacgacatcattaatgcattcgagaatgtggacgaaggaatctcatctctgttcagctccttaaaagtggttagacttctgcgcttgggccgtgtcgctcggaagctggatcactacctggagtacggagcagcggtgttggtgctgctggtgtgcgtatttggacttgttgctcattggctcgcttgtatctggtactctattggggactatgaggttatagacgaggtcacaaacacgattcagattgattcatggctttaccagctagccttgagcattggcaccccttaccgatataataccagtgcaggtatttgggaaggcggaccatccaaagactccctctatgtgagttcattgtactttaccatgaccagcctaactacaatcggctttgggaatattgccccaaccactgatgtcgaaaagatgtttagtgtcgccatgatgatggtgggctctctgttatatgccaccatcttcgggaatgtgactacgatctttcagcagatgtacgcaaacacaaatcggtaccatgaaatgctgaacaatgttcgagattttttgaaattgtaccaggtcccgaaagggttgtccgaaagagtaatggactatattgtgtcaacgtggtcaatgagtaaaggaatcgacacagaaaaggtgctctctatttgcccgaaggatatgagggccgatatttgcgtacacttgaatcggaaagttttcaatgaacatcctgcgtttcggctggcatcagacgggtgtctgagggcactggctgtcgagttccagacaatccactgtgcgccaggagacctgatctatcacgctggcgaatccgttgatgctctgtgtttcgtggtgagcggctccctcgaggtgattcaggatgacgaggtcgtggcaatcctaggcaaaggtgacgtattcggggacattttttggaaggagacaacgttagcgcacgcctgcgctaacgtaagggccctgacctactgtgacctccacatcattaagcgggaagccctcctcaaggttctggatttctacacagcatttgctaatagcttctcaaggaatcttacccttacttgtaatttacgcaaacgtatcatcttccggaagatctctgatgtaaagaaggaggaagaggaacgcttgcggcagaaaaacgaagttaccctgagcatcccagtcgatcatccggtgaggaaactctttcagaaatttaagcagcagaaagaactgcggaatcagggaagcacccaaggggatccagaaaggaaccagcttcaggttgaaagtagatccctgcagaacggcgcttctattaccggaacctccgtcgtgactgtcagtcaaataacaccgatccagacctccctggcctacgtaaaaacatccgagagtctgaagcagaacaacagagatgctatggagttgaaacccaatggtggcgcagatcagaaatgtttgaaggttaatagcccaatcagaatgaagaacgggaacggtaagggatggctcaggttgaagaataacatgggcgctcacgaagagaagaaagaagactggaataatgtgactaaggcagaaagtatggggttactgtcggaggatcctaaaagctcagatagtgaaaacagcgtgactaagaatcctctgcgaaagactgattcatgcgatagcggaataaccaaatccgatctgcgcttggataaggctggagaggcccgtagtcccctggaacatagtcccatccaggctgacgccaagcatccattctaccccatccccgaacaggccctgcaaaccacgctgcaagaggtcaaacatgaacttaaggaggacatacagctgctgtcttgcaggatgacagctctggagaaacaggttgccgagatactgaaaatcctctcagagaagagtgttccccaagcctcaagtcctaaatcccaaatgccattgcaggtgcctcctcaaatcccttgccaggacattttcagtgtcagcagaccagaaagtccagagagtgacaaggacgagatacacttctag

SEQ ID NO: 235810 - DNA, 1269 bp, synthetic construct
  misc_feature 1..1269: note = Description of Artificial Sequence: Synthetic coding sequence
  source 1..1269: mol_type = other DNA
atgcagaaaagtagtacttgcagtttcatgtacggggagctcacagacaagaagactattgagaaagtccggcagacatttgacaattacgagagtaattgctttgaagtcctgctctacaagaagaatagaactccagtgtggttttacatgcagatcgcgccaatccgcaatgaacacgaaaaggttgtgctattcttgtgtacatttaaagacattacacttttcaagcagccaatcgaggatgattctaccaagggctggactaagtttgcaaggctcacaagagctctcacgaatagtcggtccgtactgcagcagttaacacccatgaataagacagaggttgtgcacaagcactctagattggcagaggttctccagcttggaagtgatatcctcccacaatacaaacaggaagcaccgaagactcctccgcacattatcttgcattactgtgcctttaaaacaacctgggactgggttatcttgattttaaccttttataccgccattatggttccatacaacgtgagtttcaagaccaaacagaacaacatcgcatggctggtgctcgatagcgtggtggacgtgatatttctggttgatatcgtcttgaactttcacaccacctttgttggcccaggcggagaagtaatcagcgatcctaagctaattaggatgaattacctgaagacctggttcgttatcgaccttttaagctgcctcccgtacgatataattaacgcatttgagaatgttgacgagggtattagtagtttgttcagcagcttgaaggtcgtaaggctgctgcgcctggggagagtggccaggaaactcgaccactatcttgagtatggtgcagctgttttagtgctcctggtgtgtgtctttggtctggtggcccactggctggcttgtatttggtacagcattggcgactacgaagtgattgatgaggtgacaaatacaatccagatcgattcctggctgtatcagttagccctaagtatcgggaccccataccgatataataccagtgctggcatttgggaaggaggccctagtaaagatagcctttatgtgagcagtctgtatttcacaatgactagccttacaacaatcggttttggtaatattgctcctaccacagatgtcgagaagatgttcagtgtggcaatgatgatggtgggctgtaagtactttaattttttcatcgaaaactactgctattggcagttctcctggctacaaagccagatcgggtag

SEQ ID NO: 235811 - DNA, 2199 bp, synthetic construct
  misc_feature 1..2199: note = Description of Artificial Sequence: Synthetic coding sequence
  source 1..2199: mol_type = other DNA
atgccagtaaggcgcggtcacgtcgctcctcagaatacgttcctgggtactatcatcagaaaatttgaaggacaaaacaaaaaatttattattgccaatgcccgtgtgcagaactgcgcaataatctactgcaatgatggtttctgtgaaatgacaggtttttctcgtccggacgtgatgcaaaagccatgcacttgcgactttctccatggccctgaaactaagcggcatgacattgcacagattgctcaggcccttctggggtctgaggaacggaaagtggaggtgacatactatcataagaatggctccacattcatctgcaacacacatatcatacctgtgaaaaatcaggaaggggttgctatgatgttcatcatcaatttcgagtatgtgactgacaacgaaaatgccgcaactccagagagagttaaccccatcctgcccataaagactgtcaatcgtaaatttttcggcttcaaatttccaggactgcgcgttctgacctataggaaacagtctctgccacaggaagacccagacgtggtagttatcgatagtagtaagcacagcgatgattccgtagcaatgaaacactttaagtctccaacaaaagagagttgcagccctagtgaggccgacgatactaaggccttgattcagccatccaaatgctctccattggtgaacattagtggaccactagaccactcctcaccaaaaagacagtgggaccgcctttatccagacatgctgcagtccagctcccagctgagccatagtcgctcccgagagtctttgtgttcgatccggagggcatcgagcgtccatgacattgaaggtttcggagtgcatcctaaaaatatatttcgtgacagacacgccagcgagggcccatttaatcacattaagagctcgctgctggggagtacaagcgactccaacttgaacaagtactccaccataaataaaatacctcagttaacgctgaacttcagcgaggtgaagaccgaaaagaaaaactcatcacccccatctagcgacaagacaatcatcgctcctaaggtcaaagatagaacacacaatgtgacagagaaggttactcaggtgctgagtctcggcgcagacgtgttgccagagtacaagctgcagactcccaggatcaacaagttcacaatcctccactactctccgtttaaagcggtatgggactggttaattctactacttgtaatctacaccgccatttttactccctattcagctgccttcctgttgaatgatcgggaggaacagaaacgcagggagtgtgggtatagctgctctccactgaatgttgttgacctcattgtggatatcatgttcatcatcgatatcttgatcaactttaggactacatacgttaaccagaacgaggaggtggtgtctgaccctgccaagatagcaatacattactttaaggggtggttcttgatcgatatggtcgccgcaattcctttcgatctcctgatcttcggatcaggtagcgacgagacgactaccctgattggtcttttgaaaactgctcggctgttgagactcgtgagagtcgcacgcaaattggacagatatagcgaatacggcgctgccgtgctgatgcttttaatgtgtattttcgctttaattgcacattggctagcctgtatctggtatgcgatcggaaacgtcgaacgcccatacttgaccgataaaatcggctggctggacagcttaggtcagcaaatcggcaagcgctataacgattctgactcttcttcaggcccatccattaaagataagtatgtcactgctctctattttacgttttctagtcttaccagtgtcggctttggtaacgtctccccaaacaccaactccgaaaagattttctcaatctgcgtgatgttgatcggctccttgatgtacgcaagcatcttcggtaatgttagcgccattattcagcgtctctactcaggcaccgctaggtaccacatgcagatgctgagggtgaaagaattcatcagatttcatcaaattcccaaccccctccgccagcgcttagaagaatattttcagcatgcatggacttatactaacggcattgacatgaacatggtgtgcatgagcgtctttcagaacgaaagtgccgctgggattattgtgattgcgaaaatggagtag

SEQ ID NO: 235812 - DNA, 3591 bp, synthetic construct
  misc_feature 1..3591: note = Description of Artificial Sequence: Synthetic coding sequence
  source 1..3591: mol_type = other DNA
atgcccgtcagacggggtcacgtggcaccacagaacactttcttgggcaccatcatcagaaagttcgaaggtcagaataagaagttcataatcgcaaatgctagggttcagaactgcgcaatcatttactgtaatgatgggttttgcgaaatgacaggcttcagccgacctgacgtgatgcagaagccatgcacatgcgacttcctgcacggccctgaaactaaacgccacgacattgcgcagattgcacaggcactactaggatccgaggagcgcaaggtggaagttacttactaccataaaaacgggtccacctttatctgtaacactcacatcatccccgtaaagaaccaggagggtgtggccatgatgtttataattaacttcgaatacgtcacggataatgagaacgcggcaacgcccgagagggttaatcccattctacctatcaagacagtgaacaggaaatttttcggtttcaaatttccgggtttacgcgtcttgacatatagaaagcagtccctaccacaagaggatccagatgtcgttgtaatcgactcatctaagcattctgacgacagtgtggcaatgaagcacttcaagagtcctactaaggagagttgctcgccttctgaagccgatgataccaaggctctgatccagccctcgaaatgctccccactggtgaatatatccggtcccttggaccacagttctccaaagcgtcagtgggatcggttgtacccggacatgctgcaatcctcatcccagttatcacacagcaggtctagggaaagtttatgttctattaggagggcaagttccgtgcacgatatcgagggattcggtgtgcatcccaagaacatatttcgggaccggcatgcaagcgaagacaatgggcgtaacgtcaaagggcctttcaaccacattaagagcagtctcctcggctctacaagcgattctaatctaaataagtacagtactatcaataaaatcccccaacttacactcaatttctccgaagtaaagaccgaaaaaaaaaacagcagcccaccctcttctgataaaaccattatcgctcccaaggtgaaagatcgtacgcataacgtcacagagaaggttacacaggtcctctcactcggggcagatgtactgccggagtataagctacagacccccagaattaacaaatttaccatcctgcattatagtccctttaaggccgtttgggactggctgatcttactcctggtgatctacaccgccatcttcaccccatatagcgcggctttcttactgaatgatcgtgaggagcagaaaaggagggagtgtggttattcctgctcacccctgaacgtggtagatttgatcgttgatatcatgttcattattgacatcctcattaacttccggactacgtacgtcaaccagaacgaggaggtcgtcagcgacccagcaaagatcgcaatccattactttaagggttggtttctgattgatatggttgctgcaatcccatttgacctcttgatattcgggtctggcagcgatgagaccaccacacttatcggcctgctaaagacggcacggcttcttcgccttgtgcgggttgctcgtaagcttgatcggtatagcgagtacggggcagcggtgcttatgctgctgatgtgtatctttgcccttatcgctcactggctggcatgcatctggtacgctattggcaacgttgagcgcccttacttaaccgacaaaatcggatggctggattctctcggccagcagattggcaaacgctacaacgacagcgattccagctctggcccatctataaaagacaagtatgtgaccgccctgtattttacatttagttctctgacctccgtcgggttcgggaatgtctcccccaataccaactctgagaaaatctttagcatatgcgtaatgctgatcggctctctcatgtacgcaagtatctttggaaatgtaagcgcaatcattcagagattgtattctggcaccgctcggtaccacatgcagatgctgcgggtgaaggagtttattcggtttcaccagattcctaaccccttacgccagcgattggaagagtatttccagcacgcatggacctatacaaacggcattgatatgaacatggtgctgaaaggtttcccagaatgtctgcaagcagatatttgccttcacttgaaccagacactgctccagaattgtaaagcctttcggggagcctctaaagggtgtctgagagcactggccatgaaatttaaaaccacacacgcaccacctggggatacacttgtgcattgcggtgacgttttgacagccctttacttcctcagccggggttccatcgaaattttgaaggacgatatcgtagtggccatcctcggcaagaacgatatatttggcgaaatggtgcatctttatgccaagcctggcaagagcaatgctgacgttcgggcactaacatactgcgacttgcacaaaatacaacgggaggacctgttggaagtcctggatatgtaccccgagttcagcgaccatttcctaactaacctagaattaacatttaatctgagacacgagtccgcaaaggctgacctgctgcgatcgcagtcaatgaacgacagtgaaggagataattgcaagctgcgcaggcggaagctaagctttgagtctgagggagaaaaggaaaacagcacgaatgatccagaggacagcgctgacacaatccggcactaccagtcatcaaagcggcatttcgaggaaaagaaaagccgatctagctccttcattagtagtatcgatgacgaacaaaaacccctgttcagcggtattgttgattcaagtcctgggattggaaaggcctctgggttggactttgaggagactgtgcctacctcaggccgtatgcatattgataagcgctcccactcttgtaaggatattactgacatgaggagttgggagcgggagaacgcacatccacagcccgaggatagttcaccaagcgcattgcagagagccgcttggggcatcagcgagactgagagtgatcttacttatggcgaggttgagcaacgccttgatctgctgcaggagcagctgaaccgtctggaatcacagatgaccacagatattcagactatactgcagttgttgcagaagcagaccactgtagtcccacctgcatattccatggtcactgccggttctgagtaccagaggccaatcatacagctgatgcggacgtcccagcccgaggcgagtatcaaaactgatcgcagcttcagtccctcatcccaatgtcccgaattcctggaccttgaaaagtcaaagctgaagagtaaggagagcctgagttcaggtgtgcacttgaataccgcttctgaggataaccttaccagcctgttgaagcaggactccgatctgagtcttgaactccatctgaggcagcgcaagacctacgtgcatccgatcagacacccctccttacccgacagttcactgagcaccgtagggattgtcggccttcaccgacacgttagtgatccagggctgcccggtaagtag

SEQ ID NO: 235813 - DNA, 1755 bp, synthetic construct
  misc_feature 1..1755: note = Description of Artificial Sequence: Synthetic coding sequence
  source 1..1755: mol_type = other DNA
atggtcgctgaggtgtgctcaatgccaaccgcttccacagttaagaagccttttgatctccgatccaaaatgggaaagtggtgtcatcataggttcccatgctgtagaggaagcggaaagtccaatatgggtacatcaggcgaccacgacgattcctttatgaaaatgctgcgcagcaaaatggggaaatgctgccgtcattgcttcccttgttgcagaggcagcgggacctcaaatgtcggcacctctggcgatcatgagaattcctttatgaaaatgctcagaagtaagatggggaaatggtgttgtcactgttttccctgttgtcggggatcagggaaatcgaacgtaggcgcatggggggattatgaccacagcgcctttatggaacccagataccatatccgacgggaggatctggacaaactgcatagagccgcttggtggggaaaagtgccaagaaaagacttgattgtgatgttaagggatacggacatgaacaagagggataaggagaaacgaacagcccttcacttggcttccgcgaacggaaattcagaggtcgtgcaattgctcttggaccgcaggtgccagcttaatgtgctcgataacaagaagagaactgccctgataaaagccatccagtgccaagaagatgagtgcgtgctcatgctgctggaacatggcgcagatcgaaacatccccgacgaatacgggaatacagcgctgcactatgcaatctacaatgaagacaaattaatggccaaggctctcttgttatacggggctgacattgagtcaaagaacaagtgcggactgaccccactgctcctaggagtgcatgaacagaagcagcaggtcgtaaagttcttaataaagaaaaaagccaatctgaacgtcctcgatcgctacggacgcacagccttgattctggctgtgtgctgcggaagcgcttcaattgtcaacctcctcctggaacagaatgtggacgtgagctcccaggacctctcaggacagaccgccagagagtacgccgtttcgtctcatcatcacgttatatgcgaactgctgagcgactacaaagaaaaacagatgcttaagatctcttctgagaacagcaatcctgagcaggacctaaagctcacatcagaagaggagtcccagaggctgaaggtaagtgagaattcccagccagaaaaaatgagtcaggaaccagaaattaacaaagactgcgaccgcgaggtggaagaggagataaaaaagcatggaagcaaccccgttggcctccctgaaaatttgacaaatggggcttccgcagggaacggcgatgacggattgatcccgcagcggagaagcaggaaacctgaaaaccagcagttccccgatacagaaaacgaggaataccacagtgacgagcagaatgatactcgcaagcagctatctgaagagcagaatacaggaatcagccaggacgaaatactgactaataagcagaaacaaatcgaggttgccgagcagaaaatgaactccgaattaagtttgtctcacaagaaggaggaggatttgctgagagaaaattctgtgttacaggaggaaatagcaatgctcagacttgaactggacgaaacgaaacatcaaaaccaactccgggagaataagatccttgaggaaatcgagagcgtgaaagaaaaaacagataagctactgcgtgcaatgcagctcaacgaagaagccctcacgaaaacaaacatctag

SEQ ID NO: 235814 - DNA, 1638 bp, synthetic construct
  misc_feature 1..1638: note = Description of Artificial Sequence: Synthetic coding sequence
  source 1..1638: mol_type = other DNA
atggtagctgaggcgggatccatgccagcagcgagctccgtcaaaaaaccgtttggcctgcgctctaagatgggcaagtggtgcaggcactgcttcgcctggtgtcgcggatcaggcaagtccaatgtgggcacttccggagatcatgacgattccgctatgaaaactctccggagcaagatggggaagtggtgttgtcactgcttcccttggtgccgcggaagcggaaagagcaacgttggcacctcaggcgatcatgatgatagcgccatgaaaacgttgcgaagcaagatgggcaagtggtgttgtcactgcttcccctgttgtcgcggatctggcaagtccaacgtaggcactagtggagatcacgatgatagcgcaatgaaaaccctccgttccaaaatgggaaaatggtgctgccactgctttccttgctgtcgtggcagcggtaagaataaagtcggcccttggggtgattatgatgatagcgcattcatggagcctaggtaccacgtccggagagaagacctggacaagttacatcgggctgcatggtggggcaaggtgccccgaaaggatcttattgtgatgcttaaggacaccgatatgaataagaaagataagcaaaaacgcactgcgcttcaccttgcctcggcaaacggaaattccgaagtcgtgaagctcctattggatcgtcgctgccagttgaatatactggacaataaaaaacggactgcattgacaaaagccgtgcagtgtcaggaggatgaatgcgctcttatgctgctcgagcacggaaccgatccaaacatcccggatgagtacgggaacactgccttgcactacgccatttataatgaagataagctaatggcaaaggcacttttgctctacggggcagacatagaaagtaaaaacaagcatggactcacacctcttctccttggtgttcatgagcagaaacagcaggtggtcaagttcctgatcaagaagaaagccaaccttaatgctctcgatagatatggcaggacagctctgatccttgccgtgtgctgcgggtctgcaagtatcgtgtcgctccttctggagcagaacattgacgtctctagccaggacctaagtgggcagaccgccagagagtacgctgtgtcctcaagacacaatgtcatttgtcagttactgtcagactataaggaaaaacaaattctgaaagtttcatccgagaattccaatcccgagcaagaccttaaattaacaagtgaagaggaaagccaacgcctgaagggaagtgagaatagccaacccgaagagatgagtcaggaacctgagatcaacaaggggggagatcgaaaggtcgaggaggaaatgaaaaagcatggatctacgcacatgggattccccgaaaaccttacaaatggtgcaaccgccgataacggcgacgatgggctgattccacctcgcaaatcccgaacgccagaatcccaacaatttcccgacacggaaaacgaacagtatcatagtgacgaacaaaacgatacgcagaagcagttgtccgaggaacagaacactggtatccttcaggatgaaatcctgatccacgaagagaaacagatcgaagtggctgagaatgagttttag

SEQ ID NO: 235815 - DNA, 867 bp, synthetic construct
  misc_feature 1..867: note = Description of Artificial Sequence: Synthetic coding sequence
  source 1..867: mol_type = other DNA
atggttgcagaggctggctctatgcccgctgcgagttcggtcaagaaaccctttggtctccggagcaagatgggtaagtggtgtcgtcattgtttcgcttggtgtcggggaagcggcaaatccaacgtcggaacatccggggatcacgatgactccgcaatgaagaccctgaggtcaaagatgggtaagtggtgttgccactgtttcccctggtgtagaggatccggtaagtcaaatgttggcacttccggggatcatgacgattctgccatgaagacgcttcgaagcaaaatggggaaatggtgctgccattgtttcccttgttgtcgaggcagcggaaagtctaatgtagggacatctggagatcacgatgatagtgcgatgaaaaccctgagaagcaaaatgggcaaatggtgttgccactgttttccctgctgccggggatccgggaagaataaggtgggcccttggggcgactatgacgacagcgccttcatggaaccgagataccatgtgagaagggaggacttggacaaacttcatagggcagcatggtgggggaaagtcccaagaaaagacttgattgtcatgcttaaggatactgacatgaacaagaaagacaagcagaagcgaaccgccctgcacctggcctctgccaatggcaacagcgaagtcgtgaaattacttctggaccggcgatgccagctcaatattcttgacaacaagaagcgaaccgcgctcacaaaagccgtgcagtgtcaggaggatgaatgcgccctcatgctcttagaacatggaacggatcccaacatccctgacgaatatggaaacaccgcccttcattacgctatctacaatgaggattag

SEQ ID NO: 235816 - DNA, 1527 bp, synthetic construct
  misc_feature 1..1527: note = Description of Artificial Sequence: Synthetic coding sequence
  source 1..1527: mol_type = other DNA
atggtggccgaagctggtagcatgccggctgcttcctctgtgaaaaagcccttcggtctccgctcaaagatgggcaaatggtgccgccactgcttcgcgtggtgtaggggaagcggcaagtctaatgtaggaacctcaggagatcacgatgactcggctatgaaaacactgagatcaaagatgggcaaatggtgctgccattgcttcccctggtgcagggggagcggcaaatctaacgtggggactagtggtgaccacgatgattccgcaatgaaaacgctgaggtccaagatggggaaatggtgttgtcactgcttcccctgttgcaggggctccgggaagaataaggttggcccttggggcgactacgacgatagcgccttcatggaacctaggtaccacgtcagacgcgaggacctggataagctgcatagggccgcatggtggggcaaggtgcccagaaaagatctgattgtgatgttgaaggatacagatatgaacaaaaaggacaaacagaagagaactgcattacaccttgcgagcgcgaacgggaatagcgaagtggttaagctcttgctggaccggaggtgccaactcaatatcctggataacaagaaacgaaccgcactgactaaagctgttcagtgccaggaggatgagtgcgctctgatgctgttggaacacggaactgacccgaacatccccgacgaatatgggaacaccgctctgcattatgccatctacaatgaagataagctgatggctaaggcattacttctctacggcgcagacatcgagagtaaaaacaaacatggactgaccccactgcttttgggcgtgcatgagcagaagcagcaggtggtcaaatttctgatcaagaagaaggctaatttgaacgctttagatcgctacggacgaacggccctcatattagccgtttgttgtggctccgcctccatcgtgagtctcctgctagaacagaatattgacgtatcatcacaggatctgtctggccagactgcccgtgagtacgcggtcagctctaggcataatgtgatctgccagctgctgagtgattataaagagaagcagatcctgaaggtgagttccgaaaatagcaaccctgagcaggacttgaaattgactagtgaggaagagtcacagagactcaaggggtccgagaatagccagccggaagaaatgagtcaggaaccagagattaacaaaggcggagaccgaaaagtggaggaggaaatgaagaaacacggaagcacacacatgggattccccgaaaatttgacaaatggcgctacagcagacaacggagacgatggccttatccctccccgaaagtcgaggacgcctgagagccagcaattccctgacaccgaaaatgaacagtatcattcagatgagcagaatgacactcaaaagcagctctctgaggagcagaatacaggaatcctgcaggacgaaatcctgatacacgaagagaagcagattgaagtggccgagaacgagttctag

SEQ ID NO: 235817 - DNA, 954 bp, synthetic construct
  misc_feature 1..954: note = Description of Artificial Sequence: Synthetic coding sequence
  source 1..954: mol_type = other DNA
atgagttgtcaggccttcacttctgcagatactttcattccacttaactcagacgcgagtgcgactctgcctctgatcatgcaccacagtgctgcagagtgtttaccagtttcgaaccacgctacaaatgtcatgagcacagtccccagcatcttgtcactcatccagactccaaagtgtctatgcacccactttagtgtgactacactcggcaatactgccacaggcctgcattattctgtgcccagctgtcattatggcaaccagcctagcacttacggcgtaatggctggaagcctcacaccttgcttgtataagtttcctgatcacaccttatcccacgggttccccccaatccaccaaccgctcctggcggaggatcctacagctgccgactttaagcaggaattgagaagaaagtcaaaactcgtagaggaaccgatcgatatggattcccccgaaatccgggagctcgaaaaattcgcaaacgagtttaaagtgaggcgcatcaaacttggatatactcagacgaatgtcggcgaggccctggcggctgtacatggcagtgaattttcccagactacgatatgcaggttcgagaacctgcaactcagctttaaaaacgcgtgtaagctcaaggctatccttagcaagtggctagaggaggcagagcaggtcggagcgctgtacaacgagaaggtaggcgcaaacgagcgcaagcgaaagcggcgaaccactatctccattgccgctaaggatgccctggaacgccactttggtgaacaaaacaagccttcgtcacaggaaatcatgcgtatggccgaggagctcaatctcgaaaaggaggtggtccgtgtctggttctgtaacaggcgccagcgtgagaaacgggtgaagacaagcctgaaccaatccctgttctccattagtaaagaacacctggaatgccggtag

SEQ ID NO: 235818 - DNA, 876 bp, synthetic construct
  misc_feature 1..876: note = Description of Artificial Sequence: Synthetic coding sequence
  source 1..876: mol_type = other DNA
atgtcctgtcaggcgtttactagtgctgacacatttatcccccttaactctgatgcgtccgctaccctgcctctcatcatgcatcattccgccgcagaatgccttcccgtatccaatcatgctactaatgtgatgtctactgccaccggcctacactacagcgtcccttcctgtcactatgggaatcagccttctacctacggcgtcatggcaggaagtctgaccccttgcttatacaagttccccgatcataccctgtctcacggcttcccccctatacaccagcctctgctggctgaagatccgacagcagccgatttcaagcaggaactccgacggaagagcaagctggtggaagaacctatcgacatggacagtcccgagatcagagaacttgagaaatttgcaaatgagttcaaggtgcgcagaatcaagttaggctacacgcagacgaacgttggggaggccttggccgctgtccatgggagcgaattcagccaaactaccatatgtcgctttgagaatctgcagttgtcttttaagaatgcatgtaaattgaaggccatcctctctaaatggctggaggaagccgagcaggttggagccctgtacaacgagaaggtcggggctaatgagcggaagcggaaaagacgcacaaccatatctatcgcggctaaggatgcactcgagagacactttggtgaacaaaacaagccctcgtcacaggagattatgagaatggccgaagaactgaatctcgagaaagaggtagtaagagtttggttttgcaatcgccgacagcgtgaaaaaagggtgaaaacttccctgaatcaatcattgttttctatcagtaaagagcacttggagtgtagatag

SEQ ID NO: 235819 - DNA, 771 bp, synthetic construct
  misc_feature 1..771: note = Description of Artificial Sequence: Synthetic coding sequence
  source 1..771: mol_type = other DNA
atgctctggcagaaacccacagctcctgagcaagctccagcacctgccaggccttaccaaggcgttagggttaaggaacccgtgaaagaactgcttcggaggaagcggggtcacgcctccagcggagcagcccctgcccctacagccgtggttttgccccaccagcctctagccacctatacgaccgtcggtccctcttgtttggatatggaaggaagcgtgagcgcggtgaccgaagaggcagcattgtgcgctgggtggctgagtcagcccacacccgcaaccctgcagcctcttgcaccatggacaccttatacagagtacgtaccacacgaggccgtaagctgtccttattctgcggacatgtatgtacaacctgtatgccccagctacacagtcgtcggcccttccagtgtgctgacatacgcaagtccaccattgatcaccaacgtgaccacaaggtcatctgccacccccgctgtaggaccacccctagagggaccagagcatcaggcccctctgacatattttccctggcctcagcccttgtctaccctgcctaccagcacgttacagtaccagcccccagcacctgccctgcccggaccgcaatttgtgcagttaccaatatcaatcccagagcccgtgcttcaggatatggaggaccccagacgcgctgctagtagcctgactatagataaacttctgcttgaggaagaagatagcgatgcatatgctctgaatcacacgctctctgtggagggcttttag

SEQ ID NO: 235820 - DNA, 1440 bp, synthetic construct
  misc_feature 1..1440: note = Description of Artificial Sequence: Synthetic coding sequence
  source 1..1440: mol_type = other DNA
atggttcatagtagtatgggagctccggaaatccgcatgtcgaagccactggaggccgaaaagcaggggttggattccccatctgagcacaccgacaccgagcgcaacggacccgacaccaatcatcagaaccctcagaacaaaacgtcaccattctctgtctcacctacagggcctagtacaaagattaaggcagaggacccgtcaggcgattctgcccctgccgctcctttgccccctcagccggctcaaccacacctgccacaagctcaattaatgctgacgggtagtcagctggcgggagatatccagcaactcctgcagcttcaacagctcgttctggtgcctggccatcaccttcagccaccagcccagttccttctgcctcaggctcagcagtcccagcccggattgctgcccacgccaaatcttttccaactccctcagcagacccagggggcacttctgaccagccaacctcgcgcaggcctcccaacccaagccgttacgcgcccaacactccccgacccccacctttcccatccccaacccccaaagtgcctggaacctcctagtcacccagaggagccctctgaccttgaggagctagagcagtttgctagaaccttcaaacaacgcaggataaaactgggctttacacagggggatgtgggcctggccatgggtaagctgtatggaaacgatttctcccagactaccattagccgcttcgaggctttgaatttgagttttaaaaacatgtgcaaactcaagcccctgttggagaagtggttgaatgatgctgagactatgtccgtggatagcagtctccccagtccgaaccaactctctagcccaagcctcggattcgatggtctgcccggacggcgaagaaagaagagaacttctatcgagactaatgtgagatttgctctcgagaaatcatttttggccaatcagaaaccaacaagcgaagaaatcctcctgattgcagagcagctgcatatggagaaagaggtcatacgggtgtggttctgcaatcggaggcaaaaagagaaacgtatcaacccgtgtagtgccgctcccatgttgccaagccccggaaaaccggctagttattcacctcacatggttaccccgcagggaggagccggaactttgcctctctcccaggcttccagctcactgtctacaaccgtgactactttgtcttccgcagtcggcactctgcacccttctcgcactgcgggaggcggtggcggtgggggaggcgctgcaccacccctgaacagtataccatccgtgactcctcccccacccgctactactaacagcacaaatccttctccacaggggagccattctgcaattggcctgtcaggcctcaacccctccacaggcccaggcctgtggtggaaccccgctccgtaccagccatag

SEQ ID NO: 235821 - DNA, 1809 bp, synthetic construct
  misc_feature 1..1809: note = Description of Artificial Sequence: Synthetic coding sequence
  source 1..1809: mol_type = other DNA
atggtccactcgtcaatgggagcccctgagattaggatgagcaagcccttggaggctgagaaacaggggttggattctccatctgagcacaccgatacagagcgcaacgggccagatactaaccaccagaacccacagaataagacatcccctttctctgtctccccaaccggtccatcaacaaaaatcaaggctgaagaccccagtggcgactcagctcctgctgctccactgcctccccagcccgctcagccacatctccctcaagcgcaactcatgcttacaggcagccaactggcaggcgacattcagcaactgctgcagcttcaacagctggtcttggtgcccggacaccatttgcagccgccagcacagttcctactgccacaggcccaacagagccagcccggacttttgcctacacccaacttgttccaactaccccagcagactcagggagctttgctcacctcccagcctagggccggacttccaacacaagccgtgacacggcctacgctgcccgacccccatctgtcacatcctcagcctccgaaatgtttggagccaccaagccaccctgaggagcctagcgacttagaggaactggagcaatttgctcgcacttttaagcagagaaggattaagctggggttcactcaaggcgatgtggggctggcaatggggaagttgtacgggaacgatttcagtcagactacaatcagtaggtttgaggcactcaacttgagtttcaaaaatatgtgtaagctgaagcctcttctggagaagtggctgaatgatgccgagactatgtccgtggatagcagcctgcctagtcctaatcagctttctagtccttctttaggctttgatggcttgccagggcgaagaaggaaaaaacgaacctctattgagacgaatgtaaggtttgctctggagaaaagcttcttggctaaccaaaaacctacttccgaagagatcctgctgattgccgagcagcttcacatggaaaaggaagtgatcagagtgtggttctgcaacaggcgccagaaagagaaacgaataaacccctgctcggctgcgcctatgctaccgtctcccggtaaacctgcctcatactcacctcacatggtgactcctcaaggcggagccggaacacttcccctttcacaagcatccagcagccttagcaccacggtgacaacactgtcctctgccgttgggacactgcatccttcccgcaccgctggcggaggcggaggaggtggtggcgctgcacctcctctgaactctatcccgagtgttacgccacctcccccagccacaactaacagcacaaacccatcaccccaaggctctcattccgctattggcttgtccgggctcaatccttcaacaggctctaccatggtgggtctgagttctggcctgtctccagccttgatgtccaacaatcccctggcgaccattcaggcacttgctagtggagggacacttcccctcacgtcgcttgacggttcgggaaacctagtgctaggcgcagcaggcgcagcccctggttccccgggactcgttacctcccccctttttcttaatcacgctgggcttccgctgctgtctacccctcctggagttggactcgtatctgctgctgctgctgcagtcgccgcttctattagcagcaaaagtccaggactgtcatccagtagttctagctcaagttcctccagcagctccacttgttccgagactgccgctcagacacctggcggacctgggggtcccgaggccggaagcaagcccgagtag

SEQ ID NO: 235822 - DNA, 1392 bp, synthetic construct
  misc_feature 1..1392: note = Description of Artificial Sequence: Synthetic coding sequence
  source 1..1392: mol_type = other DNA
atggtccacagctctatgggagcccctgagataaggatgtcaaagcctttagaggccgagaaacaagggctagactcccccagcgaacacaccgatactgagcgaaacggcccagacacaaaccaccaaaacccacagaataagacatctccattctcggtttctccaaccgggccttccaccaagattaaggccgaagacccgtctggggactcagcgcctgcagctccgctcccaccacagcccgctcagccccacctgccccaagcccagctgatgctgaccggtagtcaactcgccggagacattcaacagttgctgcaactgcagcagttggttctcgtcccgggacaccacctccagcctccagcacaattcttgttgccccaggcgcagcagtctcagcccggacttttaccaactccgaatcttttccagctgccacagcagacccagggcgctctcctgacgagccaacccagggccggtctgccgacacagcctccaaaatgtctagaacctcccagtcatccagaagagccctccgatcttgaggaactggaacagttcgcacgcacttttaaacagaggcgtatcaagctgggattcacccaaggcgatgttggtctcgcaatgggaaagctctatggaaacgatttctcacaaactactatttcaagatttgaagccctcaatctctcgttcaaaaatatgtgtaaattgaagcctctgctcgagaaatggctgaacgacgccgaaacaatgtcagtagatagctccttgcccagtccgaaccagctgtcttccccttcgctggggtttgatggactcccaggcaggcggagaaaaaagcggacatctattgaaaccaatgttcgttttgctctggagaagtcgttcttagcaaatcaaaagccgactagtgaagagatcctgttaatcgcagaacagctgcacatggagaaggaggtgatccgcgtctggttctgtaataggaggcagaaggagaagaggattaacccctgcagcgcagctccgatgctgcctagccccggaaagcctgcgtcctattctccccacatggtcactccccagggcggtgccggtaccctgccgctgtcacaggcttcgtcaagtctgtcaaccacggtgactaccctgtcctctgctgtcggaaccttacacccgtcaaggaccgccggagggggtgggggaggcggaggcgctgcaccacccttgaactctatcccatctgtgacaccacctcccccagccacgaccaatagcactaacccttccccacagggatcgcatagcgcaatcggactgagcggactgaatccgagcactggccctggtctgtggtggaaccccgctccataccagccttag

SEQ ID NO: 235823 - DNA, 1425 bp, synthetic construct
  misc_feature 1..1425: note = Description of Artificial Sequence: Synthetic coding sequence
  source 1..1425: mol_type = other DNA
atgggggctcccgaaattagaatgagcaaacccctcgaagccgagaagcagggtctggatagtccctccgaacatacggataccgagcggaacggaccagatacgaatcaccagaacccccagaacaagacaagtcccttcagcgtgtcaccgacaggcccatccaccaaaatcaaagcggaagacccatcaggggacagcgccccagcagccccactccctccacagcccgcacagccacatcttcctcaggcgcagttaatgctgacaggcagccagctcgccggtgacattcagcagctactccagctgcaacaactggttttggtgcctggtcaccaccttcaaccacccgcacagtttcttctgccccaggctcagcagtcccaacctgggctgctgcccactcctaatctcttccagttgccccagcaaacccaaggcgcactgctcacttcacaaccgcgagccggacttcccacacaggctgtgactcggcctacactgcccgatccccacctgtcccatccccaacctccgaagtgtcttgagcccccttcccatcccgaggagccgagcgatctagaagagcttgagcagttcgccaggacattcaagcagaggcgcataaagctcgggtttactcagggggacgtgggcctggccatgggcaagctgtacggaaacgatttttcacagaccaccatcagtcgtttcgaagccctgaatttgagctttaagaatatgtgcaagctaaagcctctccttgagaagtggctgaatgatgctgagactatgagtgtggatagctcattgcctagtcctaatcagctttccagcccatcattggggtttgatggcttaccaggaaggagacgcaaaaaacggacgtcgatcgagacgaacgtgagatttgccctcgagaaaagcttcttggccaatcagaaaccaacctctgaagagatcttactgatcgctgagcagctgcatatggagaaggaagtgattagagtgtggttttgcaacagaaggcagaaagagaagaggataaacccctgttctgctgcccctatgctcccctcccctggaaaaccggcatcgtacagtccgcacatggtcacaccacagggcggagcaggaacacttcctctgagccaagcatcttctagtcttagtacgacggttacaaccctgtcgtccgcagtgggcacgcttcaccctagcagaaccgccggaggcggtggcggaggaggcggagcagctcccccattgaactcaataccctctgtcacacccccaccacctgcaacaactaattctactaacccttctccacagggtagccatagcgcaatcgggttgtctgggctgaatccgtcaaccggtcctgggttgtggtggaatccagcaccttatcagccatag

SEQ ID NO: 235824 - DNA, 1203 bp, synthetic construct
  misc_feature 1..1203: note = Description of Artificial Sequence: Synthetic coding sequence
  source 1..1203: mol_type = other DNA
atggtgcatagctccatgggtgccccagaaataagaatgtccaaacccctcgaagccgaaaagcaaggacttgacagcccctcagagcacaccgataccgaacgtaatgggcctgataccaaccaccaaaacccacagaataagacaagcccctttagcgtgagccctaccggaccttccaccaaaattaaggcggaggatccatcaggggactcggctcccgcagccccattgcccccacagccggctcagccacatctgccccaggctcaactcatgttgactggcagccaactcgccggagacatccagcagcttcttcagctccaacagctagttctggttccgggacatcacttgcagccgccagcacagtttctgctgcctcaagctcagcagtctcagcccggtctgttacccactcctaacttgtttcagctcccccagcaaactcaaggggctctgctgacatcccagccgagagccggtctccccacccagccgcctaaatgtctagaacccccttcacaccccgaagagccatcagaccttgaagagttggaacagtttgcgaggactttcaaacagcggaggatcaagctggggttcacccagggagacgtcggtctcgctatgggcaaactgtatgggaacgacttttcacagacgaccatttctcgctttgaggctcttaatctgtcctttaagaacatgtgtaaattaaagcctcttcttgagaagtggctgaacgatgcagagaccatgtccgtggattcatccttgccctccccaaaccaactcagcagcccttccttaggttttgatgggcttcccggacggagaaggaagaaaagaacatccattgaaacaaacgtaaggtttgcactggagaagagctttcttgctaatcagaagcccacatctgaggaaatcctccttattgccgagcagttacacatggaaaaagaagtcattcgggtctggttttgtaaccggagacaaaaagaaaagcggattaacccatgctctgcagcccctatgctcccaagcccgggtaaacccgctagctactccccccacatggtgacaccacagggcggagccggaaccctccccctcagccaagcatcatccagtttaagcaccaccgcccagacgcccgcactaaaagccgctacccgcctgagcgcctgccaggcctag

SEQ ID NO: 235825 - DNA, 1404 bp, synthetic construct
  misc_feature 1..1404: note = Description of Artificial Sequence: Synthetic coding sequence
  source 1..1404: mol_type = other DNA
atggtgcatagttctatgggcgcacccgagatcagaatgtcaaaaccattagaggcagagaaacagggcctggatagcccatctgagcacacggacaccgaaaggaacgggccagacaccaaccaccagaacccacaaaataagacaagcccatttagcgtctccccaacaggacctagtacaaaaataaaggctgaagaccctagtggagactccgcccctgcagccccactcccaccgcagcctgcccagcctcacctgcctcaggcacagctgatgctgaccggctcccagttggcaggcgacattcagcagcttctgcaactacaacagctagtgctggtgccagggcaccacctccaaccaccagcccaatttctgctgccccaggcccagcagtcccaacctgggctgttaccaaccccgaacctgtttcagttgccacaacaaacccagggggctctcctgacatcccagcccagagccggactgcccactcaggctgtcacccgacccactcttcccgacccacacctcagccacccccagcctccaaagtgtctcgaacctccgtcccatccggaggagccttcggatctggaagagttggagcagtttgcacggaccttcaagcagagacgcattaagttggggttcacccaaggagacgttggtttggcaatgggcaaattgtacggaaacgacttcagtcagaccaccatctccaggtttgaggcactaaacctctcattcaagaacatgtgtaaattgaagcccctcctggagaaatggttgaacgacgccgagaccatgagcgtggactcttctcttccctcaccaaatcaactgtcatctccatccctgggctttgatggcctgccgggtcgcaggcgtaagaaaaggacaagcattgaaacaaatgtgaggtttgctctggaaaaaagcttcctagccaaccagaagccgaccagcgaggaaattctcttgattgccgagcaactccacatggagaaagaagtcattcgggtgtggttttgtaacagaaggcaaaaagagaaacgcatcaacccatgcagcgcggcacccatgctgccctcgccgggaaaacctgcgagttattccccacatatggtaaccccccagggcggagctggtacactgcccttaagccaggcatcaagctctctgagtaccactgtcaccactctcagtagtgcagtggggaccctgcaccctagccgtacagccggtgggggtggcggaggcggaggcgctgcaccaccgcttaacagcatcccttctgtcactcccccaccacccgcaacaaccaactcaacaaatccaagtccacagggctctcacagtgccattggcctgtccgggttaaatccatccaccggctag

SEQ ID NO: 235826 - DNA, 1761 bp, synthetic construct
  misc_feature 1..1761: note = Description of Artificial Sequence: Synthetic coding sequence
  source 1..1761: mol_type = other DNA
atggtgcatagctccatgggagcaccagagatacggatgtctaaaccccttgaggccgagaagcaggggctcgattccccgagcgagcacaccgacacggagcggaacgggccagacaccaaccaccagaacccacaaaataaaacatcgccatttagtgtatctccgactggtccatcaacaaaaatcaaagccgaagatccgtcaggtgactcagctccggctgctcctttaccccctcagccggctcagcctcatctgccccaggcccagctcatgctcacgggcagccagcttgcgggagacattcagcaactgctacaactccagcagttggtgctggtgccagggcatcacctgcaacccccagcccaattcttgctcccccaagctcagcagtcccagccgggtttgcttcctacccctaacctgtttcaacttcctcaacaaacccaaggtgcattgttgacatctcagcccagagccggactgccaacccagcctccaaaatgccttgagcctccttcgcacccagaggagccttctgacctggaggagttggaacaattcgcccgaacgtttaaacagcgtcggattaagctgggctttacccagggcgatgtcgggctggccatgggcaaactctacgggaacgatttttcccagaccacgatcagtaggttcgaggccctgaatttgtctttcaaaaatatgtgtaagttgaagcccctccttgagaagtggttgaacgacgccgagaccatgagcgtggattcgtctctcccctcgcctaaccagcttagttccccctctctcggcttcgacgggctgccagggaggaggcggaaaaaacgtacgtccattgagaccaatgttaggttcgcattagaaaaaagctttttggccaaccagaagccaaccagcgaggaaattttgctaatcgccgaacagctccacatggaaaaggaagttattcgtgtttggttctgcaaccgtcgacaaaaggagaagcgcataaatccctgctcagcagctcccatgctgcccagccccggtaagccagcttcttacagtccgcacatggttacgccacagggcggagccggaactttacccctctcccaggctagttcctccctcagtactaccgtaaccacattgagcagcgcagtcggcaccctgcacccatcgcgcactgcgggtggtgggggtggcggaggcggtgcagctccccctctcaacagcatcccctcagtcactccccctcccccagccacgaccaactccaccaatccgagcccacaaggcagccactccgctatcggtctgagcggactaaaccccagcacagggagcaccatggtggggttgagcagcggccttagcccagccctcatgtccaacaatcctctggctacaatacaggctctggctagcggagggacactgcccctcacttcactggatgggagtggtaatctcgttttaggtgctgccggagctgcccctggctcgccgggtctggttaccagtccgctcttcctgaatcatgccggtctaccactattgtcaacacccccaggcgtgggcttggtttcagccgctgcagcagcagttgccgctagtatcagctcgaaatcccccggtctcagcagctcttctagcagcagctccagtagctcctccagtacttgttccgaaacggcagcacagacacctggaggacccggaggacccgaggctggatccaaacctgagtag

SEQ ID NO: 235827 - DNA, 1311 bp, synthetic construct
  misc_feature 1..1311: note = Description of Artificial Sequence: Synthetic coding sequence
  source 1..1311: mol_type = other DNA
atggtgaacttggaatccatgcacacagatattaagatgtcgggtgacgtcgcggactcaaccgatgcacgttctacactgtcccaggttgaaccaggtaacgatcgtaacggactagacttcaaccggcaaatcaaaaccgaggatttaagcgattccctgcagcagaccctctcacacaggccgtgtcatctgagtcagggacccgctatgatgtctggaaaccagatgtcagggcttaatgcttcaccatgccaggatatggcctccctgcatcctctgcaacagctcgtgctggtccctggtcacctgcagtcagtgtctcaatttctcctgagtcaaacgcagcccggtcagcaggggttgcaacctaacctcctcccctttccccagcagcagagtgggctcttacttcctcagacgggcccaggcctggcatcccaggcgtttggccatcccggtctccccggatcgtctttggaaccacatctggaggcttcccaacacctgccagtacctaaacacctcccttctagcgggggtgccgatgaaccttctgatttagaggagttggagaagttcgctaaaaccttcaaacagaggaggatcaaactgggttttacgcagggtgatgttggcttggctatggggaaactctacgggaacgacttctcacagaccacaatcagcaggttcgaagctctgaacttgagcttcaaaaatatgtgcaagctgaagcccttgctggagaaatggctaaatgacgctgaaagctcgcccagtgatcctagcgtaagcaccccatcaagctatccctcactgagcgaagtgttcggacggaagcgtaaaaagaggacgagcattgagaccaatattaggttgacgctggaaaaacggtttcaggacaatcccaagccgtcctccgaagaaattagcatgatagccgaacagctgagtatggagaaggaggtggtaagagtgtggttctgcaatcggaggcaaaaggagaagcgaatcaactgtccagtggctacgcctatcaaaccaccagtgtataatagtcgcctcgtgtccccctccgggtcactgggaccactctccgttccccctgtgcatagtactatgcctggaaccgtgacttcgtcgtgctctcctggcaataacagccgcccatcctccccgggttcaggcctccatgctagctctccgactgcatcccaaaataattctaaagcggcagtgaattctgctagttcctttaatagctctgggagctggtaccggtggaaccactccacctacctacattag

SEQ ID NO: 235828 - DNA, 1317 bp, synthetic construct
  misc_feature 1..1317: note = Description of Artificial Sequence: Synthetic coding sequence
  source 1..1317: mol_type = other DNA
atggaatcccccagaaccgctaaggggggaagggacataaagatgagcggcgacgtcgccgacagtactgatgccaggagcaccttgagccaagtggaacctggaaacgatcgcaacggcttggactttaaccggcagatcaagactgaagacctttccgattcactgcagcagacactgagtcacagaccctgccacctcagtcaagggcctgcgatgatgtcgggaaaccagatgagcgggcttaatgcgagtccgtgccaggatatggcctcattgcacccactccagcaacttgtacttgtgcccggacatcttcagtccgtgtcccagtttcttttatcccaaactcagccaggacagcagggcttacaacctaacctgctgcccttccctcagcagcagagcggccttctgctcccccagactgggcctggactagcctcccaagcttttggacaccccggtttgccagggagtagcctggagccccatctggaggcctcccagcacctgccggtaccaaaacatcttcctagctcaggaggggcagacgaaccaagtgatctggaggaactggagaagttcgccaagacctttaaacagaggcgaataaaattaggcttcacccagggggatgttgggttagcaatggggaagttatacggtaacgacttctcacaaacaaccatctctcgcttcgaggcacttaacctctccttcaagaacatgtgtaaactgaaaccacttttagagaaatggttgaacgatgcggagtccagcccatccgacccatccgtgtctacaccatccagttaccccagcttgtccgaagtgtttggacgcaagcggaagaagcgaacctctattgaaactaacatcaggttaactctggagaaacgctttcaagataatcccaagccctcatcagaagaaatcagcatgattgcggaacaactgtcaatggagaaagaagtggtgagagtgtggttttgcaatcgacggcagaaggaaaaacgcatcaactgtcctgtggcgacacctataaaaccacctgtctataacagccggttagtgagtccctccggctccctaggaccactctctgttccaccagtgcattcgacaatgccgggaactgttacttccagctgctcccccggtaataactctcggccatccagccccggatcaggcctgcacgcctccagccctacagcgagtcagaataattccaaagccgcagtgaactctgcctcttcgtttaattcatcgggctcatggtatcggtggaatcatagcacctacctccattag

SEQ ID NO: 235829 - DNA, 1356 bp, synthetic construct
  misc_feature 1..1356: note = Description of Artificial Sequence: Synthetic coding sequence
  source 1..1356: mol_type = other DNA
atggccaccactgcccagtacttacctcgaggcccaggaggcggagcgggaggtaccggcccactgatgcatcccgacgcggctgccgctgcagctgccgctgcagctgccgagaggctgcacgcaggagctgcctacagagaggtccagaagctaatgcatcatgaatggctaggggcaggtgccggacatcccgtcggcctggctcacccccagtggctgcccaccggtggaggaggcggaggggattgggcaggtgggcctcacttggaacatggcaaagcagggggtgggggtacggggagggctgacgatggaggtgggggaggcggtttccacgccaggttagtgcatcaaggagcagctcacgctggagctgcctgggctcaaggctcaacagcccaccatttaggccctgctatgagcccctcccctggcgcttcggggggtcaccagccacagcctcttggcttgtacgcacaggccgcataccctggaggcggaggcggtggactcgccggtatgctggccgctggcggaggaggggcaggaccgggtctgcatcacgctctgcacgaagacgggcacgaggcccagctggaaccttcaccccctccccacctgggtgcgcatgggcatgctcacggacacgcacacgctggaggcctgcacgcggctgccgcacacctgcaccctggtgctggcggaggtggcagtagcgtcggtgagcatagtgatgaagatgcaccatcttctgacgacctagaacagttcgcaaagcagttcaagcagcggagaatcaagctaggatttactcaggcggatgtggggctggctctgggcaccctgtacggtaacgtgttcagccagaccactatctgtcgctttgaagccctgcagctgtccttcaaaaatatgtgcaagctgaaacctctgctgaacaagtggctcgaagagaccgactccagtagcggcagtccaacaaatttggacaagattgcagcccagggccgtaagcgaaagaagaggacgtctatcgaggtaggcgtaaaaggcgcactcgaaagtcattttctgaaatgtcccaaaccatccgcacacgagatcaccggcttagcagattcattacagctggaaaaagaagttgtgcgcgtgtggttctgtaacagaagacagaaagaaaagcgaatgactccagccgcaggagccggtcacccacctatggacgacgtttacgcccctggcgaactgggcccaggagggggtggcgcatccccaccatctgcccctccccctcctccccctgctgccctgcaccaccaccaccatcatacccttcccggtagcgtgcaatag

SEQ ID NO: 235830 - DNA, 1332 bp, synthetic construct
  misc_feature 1..1332: note = Description of Artificial Sequence: Synthetic coding sequence
  source 1..1332: mol_type = other DNA
atggcgacggctgctagtaatcattactcactccttactagctccgcgtcaatcgtacatgcagaaccacccggaggaatgcagcagggagccggagggtacagggaagcccagagcctcgtacagggagactacggcgcattgcagtcaaacggccacccattatctcacgctcatcaatggattacggccctgtcacatggtggcggagggggtggcggaggcggaggcggtggaggcggagggggaggcggaggagggggtgacggcagtccttggtctaccagtccactgggtcagcccgacattaagccatcagtcgtggtgcagcaaggcggaagaggggatgagttgcacggccctggcgcactgcaacagcagcatcaacaacaacagcagcagcagcaacagcagcagcaacaacagcagcagcagcagcaacagcagcgaccgccacatctcgttcaccacgcagctaaccaccaccccggtcctggtgcctggagaagcgccgcagccgcagcgcaccttccgccttccatgggcgctagtaacggtggattgctctattcgcagccctcctttactgtgaatggcatgctgggcgcaggagggcagccggcaggcctacaccatcacgggctacgcgacgcccacgacgaaccccatcatgctgaccaccatcctcacccacattcacacccacatcaacaaccaccccctccccctccgcctcagggtcctcctggtcaccccggagcccaccatgacccgcactccgatgaggatacccccacctctgatgaccttgaacagttcgccaagcagttcaagcagagaagaataaagctgggtttcactcaagctgacgtggggttagcactcggaacactctatgggaatgttttctcccagacgacaatatgcaggttcgaggccttgcagttgagtttcaagaatatgtgcaaactcaaacccctgcttaacaaatggctcgaagaggctgattccagtagtggcagcccaacctcaattgacaagattgctgcacaagggcgtaagcgcaaaaagcgcactagcatcgaagtcagcgttaagggggcactggaaagtcatttcctcaaatgccctaaaccctctgctcaggagatcacctctctcgcagactcgctgcagctcgagaaggaagtcgtgcgagtttggttctgtaataggagacaaaaggagaaacgtatgacgcctcccggtggcactctccccggagccgaggatgtctatggagggtctcgggatactcctccacatcatggcgttcagacaccagtccagtag

SEQ ID NO: 235831 - DNA, 1131 bp, synthetic construct
  misc_feature 1..1131: note = Description of Artificial Sequence: Synthetic coding sequence
  source 1..1131: mol_type = other DNA
atggcgacagcggcaagcaaccattacagcctgttgacatccagcgcatccatcgtgcacgccgaaccccctggcggtatgcaacaaggtgctggaggctatagggaggcccagtcgctcgtgcaaggtgactacggggcactgcagagcaatggccatcccctgtcacacgcccatcagtggatcaccgctctcagccacggtggagatgggtccccttggtctaccagccccctaggccagccagatataaagccttccgttgttgttcagcaaggtgggagaggcgacgagctccacggacccggagctctccaacagcaacatcagcaacaacagcagcagcagcaacaacaacagcagcagcagcagcaacagcaacagcaacagaggccaccacatttggttcaccacgccgcaaatcatcacccaggtcccggagcttggcgaagcgccgctgccgctgcacacttgcctccaagcatgggcgcatctaacggaggccttctttactctcagccacctccacctccacaaggaccacctggacaccccggagctcatcatgaccctcactcagatgaggacaccccaacatccgatgacctggagcagttcgcaaagcaattcaaacagcggcgaattaagctcggctttacacaggccgacgtaggtctggccctgggcactctgtatggaaatgtgttttctcagacaacgatttgcagatttgaggctctgcagctatcatttaaaaacatgtgtaaactcaagccactcttgaataagtggcttgaggaagcggactcatctagcggatcacctacctctatcgataaaatcgctgcccaaggcaggaaacgcaaaaagcggaccagcattgaagtctccgtgaaaggagccctggagtcacacttcctgaaatgccctaaacccagtgcccaggagatcacatctcttgccgactctttgcaacttgagaaggaggttgtcagggtgtggttctgcaacaggcgccagaaggagaaaagaatgactcctccagggggaactttgcctggcgcagaagacgtttacggaggttcccgggatacgcctcctcatcacggcgtgcagaccccagtgcagtag

SEQ ID NO: 235832 - DNA, 1503 bp, synthetic construct
  misc_feature 1..1503: note = Description of Artificial Sequence: Synthetic coding sequence
  source 1..1503: mol_type = other DNA
atggctaccgcagcttctaacccttacttaccaggcaactccttgcttgcggctggttcaatcgttcactccgatgcggctggggctggaggaggcggaggcggaggcggagggggtgggggaggaggggctgggggtggaggaggtggcatgcagcctggcagcgccgcagtcacaagtggtgcctatagaggggacccttcgtccgttaaaatggtccagagcgatttcatgcaaggggctatggccgcaagcaacgggggacacatgttgtcccatgctcatcagtgggtgacggccctgcctcatgccgctgctgcagctgctgccgcagcagcggcagccgttgaagcctcttccccgtggtccggctccgcagttggtatggctggatccccccagcaaccccctcagcctcctccaccccctccccagggacccgacgttaagggtggcgctggaagggacgatttgcatgcgggaaccgccctccatcaccggggacctccacatttgggaccgcctcccccaccaccgcatcaaggacaccccggagggtggggggctgccgctgccgctgcggctgcagctgccgcagcagccgcagcggctcacctgccatctatggctggagggcaacagcccccaccccagagcctgctgtactcacagccaggcggatttactgtaaacggcatgttgtccgctccacccggtcccggtggcggagggggaggagctgggggtggcgcacagtccttggttcatcccggtctggtccgtggtgacacaccagaactagcagagcaccatcatcaccatcatcatcatgctcatccacaccctcctcacccacaccacgcccaaggccctcctcaccatgggggtggtggaggcggtgccggtcctggtctgaattctcacgatccccattctgacgaggacacacccacttcagacgacctggaacagtttgcgaagcagttcaaacagaggaggatcaagctgggatttacgcaggccgatgtcggactggcactcgggacgctttatggaaatgtgttcagtcagacgactatatgccgttttgaagccttgcagctttcatttaaaaacatgtgcaagctgaagcccctgctgaataaatggctggaagaagctgacagcagtacaggttcacccacaagtatcgacaagattgctgcccaggggcgaaaacggaagaagagaacctccatagaagtgagcgttaagggggcactcgagtctcattttttgaagtgccccaagccaagcgcacaggagataaccaacctcgcagactctctccagctcgaaaaagaggtcgtgcgtgtctggttctgtaatcgcaggcagaaagaaaaacgaatgactcccccaggcatccagcagcaaacccccgacgacgtctattctcaggttggcacggttagcgccgacaccccaccgcctcatcacggcctccagacatccgtccagtag

SEQ ID NO: 235833 - DNA, 1086 bp, synthetic construct
  misc_feature 1..1086: note = Description of Artificial Sequence: Synthetic coding sequence
  source 1..1086: mol_type = other DNA
atggcaaccgcggcatccaatccttattcgatactctccagcacctctctcgtccacgcagattctgcgggaatgcaacaaggttctccattccggaatccacagaagctgctgcagagtgattacctgcaaggtgtcccaagtaatggtcatcccttggggcaccactgggtgacgagtctctcagatggcggaccatggtcatccaccctggcgacctccccactggaccagcaagatgtgaagccaggcagggaggatttgcagttgggagctatcatacaccatagatcaccgcatgttgcgcatcattcaccacacactaaccatcctaacgcttggggcgcttcacctgcccctaacccttctattacttcaagcggacagccgcttaatgtatactcacagcccggttttaccgtgtccggaatgctcgaacacggagggctaacacctcctccggcagcggctagcgcacagagtctacatccggtgctccgagagccaccagatcacggcgagctagggtctcaccattgtcaagaccacagtgatgaggagacgccaactagcgatgaattagagcaattcgctaaacagttcaagcagagacgaatcaagctggggtttacacaagcagacgtaggactcgccctagggactctgtatggaaacgtttttagccagaccacaatttgtagattcgaaggattacagctgtcctttaagaacatgtgcaagctgaaacccctcctaaataagtggctcgaggaagctgactctagcaccgggagtcccacctcaatcgataagatcgcagcccaggggagaaagcggaaaaagcgcaccagtattgaggttagcgtgaaaggtgtacttgagacccacttcttaaagtgccccaaaccagcggctcaagaaatctcctcacttgcagactctctccagctggaaaaagaggtggtgcgcgtttggttctgtaatcgccgtcagaaagaaaagcgaatgaccccgcctggtgatcagcagccgcacgaggtttacagtcacacggtaaaaaccgatacttcttgtcatgatctgtag

SEQ ID NO: 235834 - DNA, 1260 bp, synthetic construct
  misc_feature 1..1260: note = Description of Artificial Sequence: Synthetic coding sequence
  source 1..1260: mol_type = other DNA
atgatgagtatgaattctaagcagcctcatttcgcaatgcaccccacgctgccagagcacaaataccctagcttgcactcctcctctgaagctatacgaagagcgtgcctcccgactcccccacttcagtctaacctgtttgcctccttggacgaaacgctgctggcacgggctgaagccctggcagcggtggatatcgccgtcagccaggggaaatcgcatccgttcaaacccgatgctacgtatcacactatgaatagcgtcccgtgcacaagtacttccactgtgccccttgcgcaccaccaccatcaccaccatcaccatcaggctcttgaacctggagacctgctagaccatatttcttcgccaagtctggccctgatggctggcgctggcggtgccggagcagccgcaggagggggaggcgctcatgacggcccaggcggtggcggaggaccaggtggagggggaggaccgggtggcggtcctggcggtgggggaggagggggtcccggtgggggaggcggagggccagggggaggcctgcttggcggttcggcacacccccatccccacatgcatagtcttggacacttgtcccaccctgctgctgctgccgctatgaacatgccgtccggcttgccccatccaggtcttgtcgctgcagcggcacaccacggggcagcagcggcagcagccgctgccgctgctggacaagtggctgcggctagtgctgccgctgcagtggtgggtgctgccggactggcttcgatctgtgatagtgatacggacccaagagaattggaagcctttgcagagcggttcaagcagagaagaatcaaactgggcgtgacacaggctgatgtgggctcggctctggctaaccttaagatccccggtgttgggagtctgtcccagtcgaccatttgtcgcttcgaatccctgactctcagtcataacaatatgattgccctgaaacctattctgcaggcgtggctggaggaagcagaaggggctcaaagggagaaaatgaataaaccagaattatttaatggcggtgagaagaaaagaaagcgcacatccatcgccgcacctgagaagcgcagcttggaggcgtacttcgccgtgcagcctaggccgagcagtgagaagatcgctgcaattgcggaaaagctggatctgaagaaaaacgttgtgagggtgtggttttgcaaccagcgtcagaagcagaagcgcatgaaattcagcgctacatactag
